(19) United States
(12) Patent Application Publication
(10) Pub. No.: US 2004/0216190 A1
(43) Pub. Date: Oct. 28, 2004

(54) Nucleic acid molecules and other molecules associated with plants and uses thereof for plant improvement

(76) Inventor: David K. Kovalic, University City, MO (US)

Correspondence Address: MONSANTO COMPANY, 800 N. LINDBERGH BLVD., ATTENTION: G.P. WUELLNER, IP PARALEGAL, (E2NA), ST. LOUIS, MO, 63167, US

(21) Appl. No.: 10/739,930

(22) Filed: Dec. 18, 2003

Related U.S. Application Data
(63) Continuation-in-part of application No. 10/424,599, filed on Apr. 28, 2003.
(63) Continuation-in-part of application No. 10/425,115, filed on Apr. 28, 2003.

(51) Int. Cl. A01H 1/00; C07H 21/04; C12N 15/82; C12Q 1/68

(52) U.S. Cl. 800/289; 536/23.6

(57) ABSTRACT

Recombinant polynucleotides useful for improvement of plants are provided. In particular, polynucleotide sequences are provided from plant sources. Polypeptides encoded by the polynucleotide sequences are also provided. The disclosed recombinant polynucleotides and polypeptides find use in production of transgenic plants to produce plants having improved properties.

[0001] This application claims the benefit of and is a continuation in part of prior application U.S. Ser. No. 10/424,599, filed on Apr. 28, 2003 and prior application U.S. Ser. No. 10/425,115, filed on Apr. 28, 2003. Both applications are hereby incorporated by reference in their entirety.

### INCORPORATION OF SEQUENCE LISTING

[0002] Two copies of the sequence listing (Seq. Listing Copy 1 and Seq. Listing Copy 2) and a computer-readable form of the sequence listing, all on CD-ROMs, each containing the file named pa_{—}00614.rpt, which is 27,196,645 bytes (measured in MS-DOS) and was created on Dec. 16, 2003, are herein incorporated by reference.

### INCORPORATION OF TABLE

[0003] Two copies of Table 1 (Table 1 Copy 1 and Table 1 Copy 2) all on CD-ROMs, each containing the file named pa_{—}00614.txt, which is 5,182,046 bytes (measured in MS-DOS) and was created on Dec. 17, 2003 are herein incorporated by reference.

### FIELD OF THE INVENTION

[0004] Disclosed herein are inventions in the field of plant biochemistry and genetics. More specifically recombinant polynucleotides for use in plant improvement are provided, in particular, DNA sequences of such recombinant polynucleotides and polypeptide sequences encoded thereby from multiple plant species are disclosed. Also disclosed are DNA constructs comprising such recombinant polynucleotides. Methods of using the recombinant polynucleotides for production of transgenic plants with improved biological characteristics are disclosed.

### BACKGROUND OF THE INVENTION

[0005] The ability to develop transgenic plants with improved traits depends in part on the identification of genes that are useful for production of transformed plants for expression of novel polypeptides. In this regard, the discovery of the polynucleotide sequences of such genes, and the polypeptide encoding regions of genes, is needed. Molecules comprising such polynucleotides may be used, for example, in DNA constructs useful for imparting unique genetic properties into transgenic plants.

### SUMMARY OF THE INVENTION

[0006] This invention provides recombinant polynucleotides and the polypeptides encoded by such polynucleotides from multiple species. In particular, the present invention provides recombinant DNA constructs comprising such polynucleotides. Polynucleotide sequences of the present invention are provided in the attached Sequence Listing as SEQ ID NO: 1 through SEQ ID NO: 5544. Polypeptides of the present invention are provided as SEQ ID NO: 5545 through SEQ ID NO: 11088. Preferred subsets of the polynucleotides and polypeptides of this invention are useful for improvement of one or more important properties in plants.

[0007] The present invention also provides fragments of the recombinant polynucleotides of the present invention for use, for example as probes or molecular markers. Such fragments comprise at least 15 consecutive nucleotides in a sequence selected from the group consisting of SEQ ID NO: 1 through SEQ ID NO: 5544 and complements thereof. Polynucleotide fragments of the present invention are useful as primers for PCR amplification and in hybridization assays such as transcription profiling assays or marker assays, e.g. high throughput assays where the oligonucleotides are provided in high-density arrays on a substrate. The present invention also provides homologs of the polynucleotide and polypeptides of the present invention.

[0008] This invention also provides DNA constructs comprising polynucleotides provided herein. Of particular interest are recombinant DNA constructs, wherein said constructs comprise a polynucleotide selected from the group consisting of:

[0009] (a) a polynucleotide comprising a nucleic acid sequence selected from the group consisting of SEQ ID NO: 1 through SEQ ID NO: 5544;

[0010] (b) a polynucleotide encoding a polypeptide having an amino acid sequence selected from the group consisting of SEQ ID NO: 5545 through SEQ ID NO: 11088;

[0011] (c) a polynucleotide comprising a nucleic acid sequence complementary to a nucleic acid sequence selected from the group consisting of SEQ ID NO: 1 through SEQ ID NO: 5544;

[0012] (d) a polynucleotide having at least 70% sequence identity to a polynucleotide of (a), (b) or (c);

[0013] (e) a polynucleotide encoding a polypeptide having at least 80% sequence identity to a polypeptide having an amino acid sequence selected from the group consisting of SEQ ID NO: 5545 through SEQ ID NO: 11088;

[0014] (f) a polynucleotide comprising a promoter functional in a plant cell, operably joined to a coding sequence for a polypeptide having at least 80% sequence identity to a polypeptide having an amino acid sequence selected from the group consisting of SEQ ID NO: 5545 through SEQ ID NO: 11088, wherein said encoded polypeptide is a functional homolog of said polypeptide having an amino acid sequence selected from the group consisting of SEQ ID NO: 5545 through SEQ ID NO: 11088; and

[0015] (g) a polynucleotide comprising a promoter functional in a plant cell, operably joined to a coding sequence for a polypeptide having an amino acid sequence selected from the group consisting of SEQ ID NO: 5545 through SEQ ID NO: 11088, wherein transcription of said coding sequence produces an RNA molecule having sufficient complementarity to a polynucleotide encoding said polypeptide to result in decreased expression of said polypeptide when said construct is expressed in a plant cell.

[0016] Such constructs are useful for production of transgenic plants having at least one improved property as the result of expression of a polypeptide of this invention. Improved properties of interest include yield, disease resistance, growth rate, stress tolerance and others as set forth in more detail herein.

[0017] The present invention also provides a method of modifying plant protein activity by inserting into cells of said plant an antisense construct comprising a promoter which functions in plant cells, a polynucleotide comprising a polypeptide coding sequence operably linked to said promoter, wherein said protein coding sequence is oriented such that transcription from said promoter produces an RNA molecule having sufficient complementarity to a polynucleotide encoding said polypeptide to result in decreased expression of said polypeptide when said construct is expressed in a plant cell.

[0018] This invention also provides a transformed organism, particularly a transformed plant, preferably a transformed crop plant, comprising a recombinant DNA construct of the present invention.

### DETAILED DESCRIPTION OF THE INVENTION

[0019] The present invention provides recombinant polynucleotides, or nucleic acid molecules, representing plant cDNA sequences and the polypeptides encoded by such polynucleotides. The recombinant polynucleotides and polypeptides of the present invention find a number of uses, for example in recombinant DNA constructs, in physical arrays of molecules, and for use as plant breeding markers. In addition, the nucleotide and amino acid sequences of the polynucleotides and polypeptides find use in computer based storage and analysis systems.

[0020] Depending on the intended use, the recombinant polynucleotides of the present invention may be present in the form of DNA, such as cDNA or genomic DNA, or as RNA, for example mRNA. The polynucleotides of the present invention may be single or double stranded and may represent the coding, or sense strand of a gene, or the non-coding, antisense, strand.

[0021] The polynucleotides of the present invention find particular use in generation of transgenic plants to provide for increased or decreased expression of the polypeptides encoded by the cDNA polynucleotides provided herein. As a result of such biotechnological applications, plants, particularly crop plants, having improved properties are obtained. Crop plants of interest in the present invention include, but are not limited to soy, cotton, canola, maize, wheat, sunflower, sorghum, alfalfa, barley, millet, rice, tobacco, fruit and vegetable crops, and turf grass. Of particular interest are uses of the disclosed polynucleotides to provide plants having improved yield resulting from improved utilization of key biochemical compounds, such as nitrogen, phosphorous and carbohydrate, or resulting from improved responses to environmental stresses, such as cold, heat, drought, salt, and attack by pests or pathogens. Polynucleotides of the present invention may also be used to provide plants having improved growth and development, and ultimately increased yield, as the result of modified expression of plant growth regulators or modification of cell cycle or photosynthesis pathways. Other traits of interest that may be modified in plants using polynucleotides of the present invention include flavonoid content, seed oil and protein quantity and quality, herbicide tolerance, and rate of homologous recombination.

[0022] The term “recombinant polynucleotide” or “recombinant DNA” as used herein means a polynucleotide that contains a genetically modification through manipulation via mutagenesis, restriction enzymes, and the like. The polynucleotide itself can come from either naturally occurring sources or can be created in the laboratory. It can include all vectors or constructs created by DNA engineering. It can also include molecules containing naturally occurring DNA or cDNA, or DNA molecules of synthetic origin in a plasmid, or isolated. Recombinant polynucleotide may comprise DNA segments obtained from different sources, or DNA segments obtained from the same source, but which have been manipulated to join DNA segments which do no naturally exist in the joined form. A recombinant polynucleotide may exist outside of the cell, for example as a PCR fragment, or integrated into a genome, such as a plant genome. The term “recombinant polynucleotide” as herein is not intended to encompass molecules present in their native state.

[0023] As used herein a “transgenic” organism is one whose genome has been altered by the incorporation of foreign genetic material or additional copies of native genetic material, e.g. by transformation or recombination.

[0024] It is understood that the molecules of the invention may be labeled with reagents that facilitate detection of the molecule. As used herein, a label can be any reagent that facilitates detection, including fluorescent labels, chemical labels, or modified bases, including nucleotides with radioactive elements, e.g. ³²P, ³³P, ³⁵S or ¹²⁵I such as ³²P deoxycytidine-5′-triphosphate (³²PdCTP).

[0025] Recombinant polynucleotides of the present invention are capable of specifically hybridizing to other polynucleotides under certain circumstances. As used herein, two polynucleotides are said to be capable of specifically hybridizing to one another if the two molecules are capable of forming an anti-parallel, double-stranded nucleic acid structure. A nucleic acid molecule is said to be the “complement” of another nucleic acid molecule if the molecules exhibit complete complementarity. As used herein, molecules are said to exhibit “complete complementarity” when every nucleotide in each of the molecules is complementary to the corresponding nucleotide of the other. Two molecules are said to be “minimally complementary” if they can hybridize to one another with sufficient stability to permit them to remain annealed to one another under at least conventional “low-stringency” conditions. Similarly, the molecules are said to be “complementary” if they can hybridize to one another with sufficient stability to permit them to remain annealed to one another under conventional “high-stringency” conditions. Conventional stringency conditions are known to those skilled in the art and can be found, for example in Molecular Cloning: A Laboratory Manual, 3^{rd} edition Volumes 1, 2, and 3. J. F. Sambrook, D. W. Russell, and N. Irwin, Cold Spring Harbor Laboratory Press, 2000.

[0026] Departures from complete complementarity are therefore permissible, as long as such departures do not completely preclude the capacity of the molecules to form a double-stranded structure. Thus, in order for a nucleic acid molecule to serve as a primer or probe, it needs only to be sufficiently complementary in sequence for being able to form a stable double-stranded structure under the particular solvent and salt concentrations employed. Appropriate stringency conditions which promote DNA hybridization are, for example, 6.0× sodium chloride/sodium citrate (SSC) at about 45° C., followed by a wash of 2.0 ×SSC at 50° C. Such conditions are known to those skilled in the art and can be found, for example in Current Protocols in Molecular Biology, John Wiley & Sons, N.Y. (1989). Salt concentration and temperature in the wash step can be adjusted to alter hybridization stringency. For example, conditions may vary from low stringency of about 2.0×SSC at 40° C. to moderately stringent conditions of about 2.0×SSC at 50° C. to high stringency conditions of about 0.2×SSC at 50° C.

[0027] As used herein “sequence identity” refers to the extent to which two optimally aligned polynucleotide or peptide sequences are invariant throughout a window of alignment of components, e.g. nucleotides or amino acids. An “identity fraction” for aligned segments of a test sequence and a reference sequence is the number of identical components which are shared by the two aligned sequences divided by the total number of components in the reference sequence segment, i.e. the entire reference sequence or a smaller defined part of the reference sequence. “Percent identity” is the identity fraction times 100. Comparison of sequences to determine percent identity can be accomplished by a number of well-known methods, including for example by using mathematical algorithms, such as those in the BLAST suite of sequence analysis programs.

[0028] Polynucleotides—This invention provides recombinant polynucleotides comprising regions that encode polypeptides. The encoded polypeptides may be the complete protein encoded by the gene represented by the polynucleotide, or may be fragments of the encoded protein. Preferably, recombinant polynucleotides provided herein encode polypeptides constituting a substantial portion of the complete protein, and more preferentially, constituting a sufficient portion of the complete protein to provide the relevant biological activity.

[0029] Of particular interest are recombinant polynucleotides of the present invention that encode polypeptides involved in one or more important biological functions in plants. Such recombinant polynucleotides may be expressed in transgenic plants to produce plants having improved phenotypic properties and/or improved response to stressful environmental conditions. See, for example, Table 1 for a list of improved plant properties and responses and the SEQ ID NOs representing the polynucleotides that may be expressed in transgenic plants to impart such improvements.

[0030] Recombinant polynucleotides of the present invention are generally used to impart such biological properties by providing for enhanced protein activity in a transgenic organism, preferably a transgenic plant, although in some cases, improved properties are obtained by providing for reduced protein activity in a transgenic plant. Reduced protein activity and enhanced protein activity are measured by reference to a wild type cell or organism and can be determined by direct or indirect measurement. Direct measurement of protein activity might include an analytical assay for the protein, per se, or enzymatic product of protein activity. Indirect assay might include measurement of a property affected by the protein. Enhanced protein activity can be achieved in a number of ways, for example by overproduction of mRNA encoding the protein or by gene shuffling. One skilled in the art will know methods to achieve overproduction of mRNA, for example by providing increased copies of the native gene or by introducing a construct having a heterologous promoter linked to the gene into a target cell or organism. Reduced protein activity can be achieved by a variety of mechanisms including antisense, mutation or knockout. Antisense RNA will reduce the level of expressed protein resulting in reduced protein activity as compared to wild type activity levels. A mutation in the gene encoding a protein may reduce the level of expressed protein and/or interfere with the function of expressed protein to cause reduced protein activity.

[0031] The recombinant polynucleotides of this invention represent cDNA sequences from multiple plant species including Zea maize (corn), Glycine max (soy), Arabidopsis thaliana, Triticum aestivum (wheat), and Brassica napus. Nucleic acid sequences of the polynucleotides of the present invention are provided herein as SEQ ID NO: 1 through SEQ ID NO: 5544.

[0032] A subset of the nucleic molecules of this invention includes fragments of the disclosed polynucleotides consisting of oligonucleotides of at least 15, preferably at least 16 or 17, more preferably at least 18 or 19, and even more preferably at least 20 or more, consecutive nucleotides. Such oligonucleotides are fragments of the larger molecules having a sequence selected from the group of polynucleotide sequences consisting of SEQ ID NO: 1 through SEQ ID NO: 5544, and find use, for example as probes and primers for detection of the polynucleotides of the present invention.

[0033] Also of interest in the present invention are variants of the polynucleotides provided herein. Such variants may be naturally occurring, including homologous polynucleotides from the same or a different species, or may be non-natural variants, for example polynucleotides synthesized using chemical synthesis methods, or generated using recombinant DNA techniques. With respect to nucleotide sequences, degeneracy of the genetic code provides the possibility to substitute at least one base of the protein encoding sequence of a gene with a different base without causing the amino acid sequence of the polypeptide produced from the gene to be changed. Hence, the DNA of the present invention may also have any base sequence that has been changed from SEQ ID NO: 1 through SEQ ID NO: 5544 by substitution in accordance with degeneracy of the genetic code. References describing codon usage include: Carels et al., J. Mol. Evol. 46: 45 (1998) and Fennoy et al., Nucl. Acids Res. 21(23): 5294 (1993).

[0034] Polynucleotides of the present invention that are variants of the polynucleotides provided herein will generally demonstrate significant identity with the polynucleotides provided herein. Of particular interest are polynucleotide homologs having at least about 60% sequence identity, at least about 70% sequence identity, at least about 80% sequence identity, at least about 85% sequence identity, and more preferably at least about 90%, 95% or even greater, such as 98% or 99% sequence identity with polynucleotide sequences described herein.

[0035] Protein and Polypeptide Molecules—This invention also provides polypeptides encoded by recombinant polynucleotides of the present invention. Amino acid sequences of the polypeptides of the present invention are provided herein as SEQ ID NO: 5545 through SEQ ID NO: 11088.

[0036] As used herein, the term “polypeptide” means an unbranched chain of amino acid residues that are covalently linked by an amide linkage between the carboxyl group of one amino acid and the amino group of another. The term polypeptide can encompass whole proteins (i.e. a functional protein encoded by a particular gene), as well as fragments of proteins. Of particular interest are polypeptides of the present invention which represent whole proteins or a sufficient portion of the entire protein to impart the relevant biological activity of the protein. The term “protein” also includes molecules consisting of one or more polypeptide chains. Thus, a polypeptide of the present invention may also constitute an entire gene product, but only a portion of a functional oligomeric protein having multiple polypeptide chains.

[0037] Of particular interest in the present invention are polypeptides involved in one or more important biological properties in plants. Such polypeptides may be produced in transgenic plants to provide plants having improved phenotypic properties and/or improved response to stressful environmental conditions. In some cases, decreased expression of such polypeptides may be desired, such decreased expression being obtained by use of the polynucleotide sequences provided herein, for example in antisense or cosuppression methods. See, Table 1 for a list of improved plant properties and responses and SEQ ID NOs for the polypeptides whose expression may be altered in transgenic plants to impart such improvements. A summary of such improved properties and polypeptides of interest for increased or decreased expression is provided below.

[0038] Yield/Nitrogen: Yield improvement by improved nitrogen flow, sensing, uptake, storage and/or transport. Polypeptides useful for imparting such properties include those involved in aspartate and glutamate biosynthesis, polypeptides involved in aspartate and glutamate transport, polypeptides associated with the TOR (Target of Rapamycin) pathway, nitrate transporters, ammonium transporters, chlorate transporters and polypeptides involved in tetrapyrrole biosynthesis.

[0039] Yield/Carbohydrate: Yield improvement by effects on carbohydrate metabolism, for example by increased sucrose production and/or transport. Polypeptides useful for improved yield by effects on carbohydrate metabolism include polypeptides involved in sucrose or starch metabolism, carbon assimilation or carbohydrate transport, including, for example sucrose transporters or glucose/hexose transporters, enzymes involved in glycolysis/gluconeogenesis, the pentose phosphate cycle, or raffinose biosynthesis, and polypeptides involved in glucose signaling, such as SNF1 complex proteins.

[0040] Yield/Photosynthesis: Yield improvement resulting from increased photosynthesis. Polypeptides useful for increasing the rate of photosynthesis include phytochrome, photosystem I and II proteins, electron carriers, ATP synthase, NADH dehydrogenase and cytochrome oxidase.

[0041] Yield/Phosphorus: Yield improvement resulting from increased phosphorus uptake, transport or utilization. Polypeptides useful for improving yield in this manner include phosphatases and phosphate transporters.

[0042] Yield/Stress tolerance: Yield improvement resulting from improved plant growth and development by helping plants to tolerate stressful growth conditions. Polypeptides useful for improved stress tolerance under a variety of stress conditions include polypeptides involved in gene regulation, such as serine/threonine-protein kinases, MAP kinases, MAP kinase kinases, and MAP kinase kinase kinases; polypeptides that act as receptors for signal transduction and regulation, such as receptor protein kinases; intracellular signaling proteins, such as protein phosphatases, GTP binding proteins, and phospholipid signaling proteins; polypeptides involved in arginine biosynthesis; polypeptides involved in ATP metabolism, including for example ATPase, adenylate transporters, and polypeptides involved in ATP synthesis and transport; polypeptides involved in glycine betaine, jasmonic acid, flavonoid or steroid biosynthesis; and hemoglobin. Enhanced or reduced activity of such polypeptides in transgenic plants will provide changes in the ability of a plant to respond to a variety of environmental stresses, such as chemical stress, drought stress and pest stress.

[0043] Cold tolerance: Polypeptides of interest for improving plant tolerance to cold or freezing temperatures include polypeptides involved in biosynthesis of trehalose or raffinose, polypeptides encoded by cold induced genes, fatty acyl desaturases and other polypeptides involved in glycerolipid or membrane lipid biosynthesis, which find use in modification of membrane fatty acid composition, alternative oxidase, calcium-dependent protein kinases, LEA proteins and uncoupling protein.

[0044] Heat tolerance: Polypeptides of interest for improving plant tolerance to heat include polypeptides involved in biosynthesis of trehalose, polypeptides involved in glycerolipid biosynthesis or membrane lipid metabolism (for altering membrane fatty acid composition), heat shock proteins and mitochondrial NDK.

[0045] Osmotic tolerance: Polypeptides of interest for improving plant tolerance to extreme osmotic conditions include polypeptides involved in proline biosynthesis.

[0046] Drought tolerance: Polypeptides of interest for improving plant tolerance to drought conditions include aquaporins, polypeptides involved in biosynthesis of trehalose or wax, LEA proteins and invertase.

[0047] Pathogen or pest tolerance: Polypeptides of interest for improving plant tolerance to effects of plant pests or pathogens include proteases, polypeptides involved in anthocyanin biosynthesis, polypeptides involved in cell wall metabolism, including cellulases, glucosidases, pectin methylesterase, pectinase, polygalacturonase, chitinase, chitosanase, and cellulose synthase, and polypeptides involved in biosynthesis of terpenoids or indole for production of bioactive metabolites to provide defense against herbivorous insects.

[0048] Cell cycle modification: Polypeptides encoding cell cycle enzymes and regulators of the cell cycle pathway are useful for manipulating growth rate in plants to provide early vigor and accelerated maturation leading to improved yield. Improvements in quality traits, such as seed oil content, may also be obtained by expression of cell cycle enzymes and cell cycle regulators. Polypeptides of interest for modification of cell cycle pathway include cyclins and EIF5alpha pathway proteins, polypeptides involved in polyamine metabolism, polypeptides which act as regulators of the cell cycle pathway, including cyclin-dependent kinases (CDKs), CDK-activating kinases, CDK-inhibitors, Rb and Rb-binding proteins, and transcription factors that activate genes involved in cell proliferation and division, such as the E2F family of transcription factors, proteins involved in degradation of cyclins, such as cullins, and plant homologs of tumor suppressor polypeptides.

[0049] Seed protein yield/content: Polypeptides useful for providing increased seed protein quantity and/or quality include polypeptides involved in the metabolism of amino acids in plants, particularly polypeptides involved in biosynthesis of methionine/cysteine and lysine, amino acid transporters, amino acid efflux carriers, seed storage proteins, proteases, and polypeptides involved in phytic acid metabolism.

[0050] Seed oil yield/content: Polypeptides useful for providing increased seed oil quantity and/or quality include polypeptides involved in fatty acid and glycerolipid biosynthesis, beta-oxidation enzymes, enzymes involved in biosynthesis of nutritional compounds, such as carotenoids and tocopherols, and polypeptides that increase embryo size or number or thickness of aleurone.

[0051] Disease response in plants: Polypeptides useful for imparting improved disease responses to plants include polypeptides encoded by cercosporin induced genes, antifungal proteins and proteins encoded by R-genes or SAR genes. Expression of such polypeptides in transgenic plants will provide an increase in disease resistance ability of plants.

[0052] Galactomannanan biosynthesis: Polypeptides involved in production of galactomannans are of interest for providing plants having increased and/or modified reserve polysaccharides for use in food, pharmaceutical, cosmetic, paper and paint industries.

[0053] Flavonoid/isoflavonoid metabolism in plants: Polypeptides of interest for modification of flavonoid/isoflavonoid metabolism in plants include cinnamate-4-hydroxylase, chalcone synthase and flavonol synthase. Enhanced or reduced activity of such polypeptides in transgenic plants will provide changes in the quantity and/or speed of flavonoid metabolism in plants and may improve disease resistance by enhancing synthesis of protective secondary metabolites or improving signaling pathways governing disease resistance.

[0054] Plant growth regulators: Polypeptides involved in production of substances that regulate the growth of various plant tissues are of interest in the present invention and may be used to provide transgenic plants having altered morphologies and improved plant growth and development profiles leading to improvements in yield and stress response. Of particular interest are polypeptides involved in the biosynthesis of plant growth hormones, such as gibberellins, cytokinins, auxins, ethylene and abscisic acid, and other proteins involved in the activity and/or transport of such polypeptides, including for example, cytokinin oxidase, cytokinin/purine permeases, F-box proteins, G-proteins and phytosulfokines.

[0055] Herbicide tolerance: Polypeptides of interest for producing plants having tolerance to plant herbicides include polypeptides involved in the shikimate pathway, which are of interest for providing glyphosate tolerant plants. Such polypeptides include polypeptides involved in biosynthesis of chorismate, phenylalanine, tyrosine and tryptophan.

[0056] Transcription factors in plants: Transcription factors play a key role in plant growth and development by controlling the expression of one or more genes in temporal, spatial and physiological specific patterns. Enhanced or reduced activity of such polypeptides in transgenic plants will provide significant changes in gene transcription patterns and provide a variety of beneficial effects in plant growth, development and response to environmental conditions. Transcription factors of interest include, but are not limited to myb transcription factors, including helix-turn-helix proteins, homeodomain transcription factors, leucine zipper transcription factors, MADS transcription factors, transcription factors having AP2 domains, zinc finger transcription factors, CCAAT binding transcription factors, ethylene responsive transcription factors, transcription initiation factors and UV damaged DNA binding proteins.

[0057] Homologous recombination: Increasing the rate of homologous recombination in plants is useful for accelerating the introgression of transgenes into breeding varieties by backcrossing, and to enhance the conventional breeding process by allowing rare recombinants between closely linked genes in phase repulsion to be identified more easily. Polypeptides useful for expression in plants to provide increased homologous recombination include polypeptides involved in mitosis and/or meiosis, including for example, resolvases and polypeptide members of the RAD52 epistasis group.

[0058] Lignin biosynthesis: Polypeptides involved in lignin biosynthesis are of interest for increasing plants' resistance to lodging and for increasing the usefulness of plant materials as biofuels.

[0059] The function of polypeptides of the present invention is determined by comparison of the amino acid sequence of the novel polypeptides to amino acid sequences of known polypeptides. A variety of homology based search algorithms are available to compare a query sequence to a protein database, including for example, BLAST, FASTA, and Smith-Waterman. In the present application, BLASTX and BLASTP algorithms are used to provide protein function information. A number of values are examined in order to assess the confidence of the function assignment. Useful measurements include “E-value” (also shown as “hit_p”), “percent identity”, “percent query coverage”, and “percent hit coverage”.

[0060] In BLAST, E-value, or expectation value, represents the number of different alignments with scores equivalent to or better than the raw alignment score, S, that are expected to occur in a database search by chance. The lower the E value, the more significant the match. Because database size is an element in E-value calculations, E-values obtained by BLASTing against public databases, such as GenBank, have generally increased over time for any given query/entry match. In setting criteria for confidence of polypeptide function prediction, a “high” BLAST match is considered herein as having an E-value for the top BLAST hit provided in Table 1 of less than 1E-30; a medium BLASTX E-value is 1E-30 to 1E-8; and a low BLASTX E-value is greater than 1E-8. The top BLAST hit and corresponding E values are provided in columns six and seven of Table 1.

[0061] Percent identity refers to the percentage of identically matched amino acid residues that exist along the length of that portion of the sequences which is aligned by the BLAST algorithm. In setting criteria for confidence of polypeptide function prediction, a “high” BLAST match is considered herein as having percent identity for the top BLAST hit provided in Table 1 of at least 70%; a medium percent identity value is 35% to 70%; and a low percent identity is less than 35%.

[0062] Of particular interest in protein function assignment in the present invention is the use of combinations of E-values, percent identity, query coverage and hit coverage. Query coverage refers to the percent of the query sequence that is represented in the BLAST alignment. Hit coverage refers to the percent of the database entry that is represented in the BLAST alignment. In the present invention, function of a query polypeptide is inferred from function of a protein homolog where either (1) hit_p<1e-30 or % identity>35% AND query_coverage>50% AND hit_coverage>50%, or (2) hit_p<1e-8 AND query_coverage>70% AND hit_coverage>70%.

[0063] A further aspect of the invention comprises functional homologs which differ in one or more amino acids from those of a polypeptide provided herein as the result of one or more conservative amino acid substitutions. It is well known in the art that one or more amino acids in a native sequence can be substituted with at least one other amino acid, the charge and polarity of which are similar to that of the native amino acid, resulting in a silent change. For instance, valine is a conservative substitute for alanine and threonine is a conservative substitute for serine. Conservative substitutions for an amino acid within the native polypeptide sequence can be selected from other members of the class to which the naturally occurring amino acid belongs. Amino acids can be divided into the following four groups: (1) acidic amino acids, (2) basic amino acids, (3) neutral polar amino acids, and (4) neutral nonpolar amino acids. Representative amino acids within these various groups include, but are not limited to: (1) acidic (negatively charged) amino acids such as aspartic acid and glutamic acid; (2) basic (positively charged) amino acids such as arginine, histidine, and lysine; (3) neutral polar amino acids such as glycine, serine, threonine, cysteine, tyrosine, asparagine, and glutamine; and (4) neutral nonpolar (hydrophobic) amino acids such as alanine, leucine, isoleucine, valine, proline, phenylalanine, tryptophan, and methionine. Conserved substitutes for an amino acid within a native amino acid sequence can be selected from other members of the group to which the naturally occurring amino acid belongs. For example, a group of amino acids having aliphatic side chains is glycine, alanine, valine, leucine, and isoleucine; a group of amino acids having aliphatic-hydroxyl side chains is serine and threonine; a group of amino acids having amide-containing side chains is asparagine and glutamine; a group of amino acids having aromatic side chains is phenylalanine, tyrosine, and tryptophan; a group of amino acids having basic side chains is lysine, arginine, and histidine; and a group of amino acids having sulfur-containing side chains is cysteine and methionine. Naturally conservative amino acids substitution groups are: valine-leucine, valine-isoleucine, phenylalanine-tyrosine, lysine-arginine, alanine-valine, aspartic acid-glutamic acid, and asparagine-glutamine. A further aspect of the invention comprises polypeptides which differ in one or more amino acids from those of another protein sequence as the result of deletion or insertion of one or more amino acids in a native sequence.

[0064] Also of interest in the present invention are functional homologs of the polypeptides provided herein which have the same function as a polypeptide provided herein, but with increased or decreased activity or altered specificity. Such variations in protein activity may exist naturally in polypeptides encoded by related genes, for example in a related polypeptide encodes by a different allele or in a different species, or can be achieved by mutagenesis. Naturally occurring variant polypeptides may be obtained by well known nucleic acid or protein screening methods using DNA or antibody probes, for example by screening libraries for genes encoding related polypeptides, or in the case of expression libraries, by screening directly for variant polypeptides. Screening methods for obtaining a modified protein or enzymatic activity of interest by mutagenesis are disclosed in U.S. Pat. No. 5,939,250. An alternative approach to the generation of variants uses random recombination techniques such as “DNA shuffling” as disclosed in U.S. Pat. Nos. 5,605,793; 5,811,238; 5,830,721 and 5,837,458; and International Applications WO 98/31837 and WO 99/65927, all of which are incorporated herein by reference. An alternative method of molecular evolution involves a staggered extension process (StEP) for in vitro mutagenesis and recombination of nucleic acid molecule sequences, as disclosed in U.S. Pat. No. 5,965,408 and International Application WO 98/42832, both of which are incorporated herein by reference.

[0065] Polypeptides of the present invention that are variants of the polypeptides provided herein will generally demonstrate significant identity with the polypeptides provided herein. Of particular interest are polypeptides having at least about 35% sequence identity, at least about 50% sequence identity, at least about 60% sequence identity, at least about 70% sequence identity, at least about 80% sequence identity, and more preferably at least about 85%, 90%, 95% or even greater, sequence identity with polypeptide sequences described herein. Of particular interest in the present invention are polypeptides having amino acid sequences provided herein (reference polypeptides) and functional homologs of such reference polypeptides, wherein such functional homologs comprises at least 50 consecutive amino acids having at least 90% identity to a 50 amino acid polypeptide fragment of said reference polypeptide.

[0066] Recombinant DNA Constructs—The present invention also encompasses the use of recombinant polynucleotides of the present invention in recombinant constructs, i.e. constructs comprising polynucleotides that are constructed or modified outside of cells and that join nucleic acids that are not found joined in nature. Using methods known to those of ordinary skill in the art, polypeptide encoding sequences of this invention can be inserted into recombinant DNA constructs that can be introduced into a host cell of choice for expression of the encoded protein, or to provide for reduction of expression of the encoded protein, for example by antisense or cosuppression methods. Potential host cells include both prokaryotic and eukaryotic cells. Of particular interest in the present invention is the use of the recombinant polynucleotides of the present invention for preparation of constructs for use in plant transformation.

[0067] In plant transformation, exogenous genetic material is transferred into a plant cell. By “exogenous” it is meant that a nucleic acid molecule, for example a recombinant DNA construct comprising a polynucleotide of the present invention, is produced outside the organism, e.g. plant, into which it is introduced. An exogenous nucleic acid molecule can have a naturally occurring or non-naturally occurring nucleotide sequence. One skilled in the art recognizes that an exogenous nucleic acid molecule can be derived from the same species into which it is introduced or from a different species. Such exogenous genetic material may be transferred into either monocot or dicot plants including, but not limited to, soy, cotton, canola, maize, teosinte, wheat, rice and Arabidopsis plants. Transformed plant cells comprising such exogenous genetic material may be regenerated to produce whole transformed plants.

[0068] Exogenous genetic material may be transferred into a plant cell by the use of a DNA vector or construct designed for such a purpose. A construct can comprise a number of sequence elements, including promoters, encoding regions, and selectable markers. Vectors are available which have been designed to replicate in both E. coli and A. tumefaciens and have all of the features required for transferring large inserts of DNA into plant chromosomes. Design of such vectors is generally within the skill of the art.

[0069] A construct will generally include a plant promoter to direct transcription of the protein-encoding region or the antisense sequence of choice. Numerous promoters, which are active in plant cells, have been described in the literature. These include the nopaline synthase (NOS) promoter and octopine synthase (OCS) promoters carried on tumor-inducing plasmids of Agrobacterium tumefaciens or caulimovirus promoters such as the Cauliflower Mosaic Virus (CaMV) 19S or 35S promoter (U.S. Pat. No. 5,352,605), and the Figwort Mosaic Virus (FMV) 35S-promoter (U.S. Pat. No. 5,378,619). These promoters and numerous others have been used to create recombinant vectors for expression in plants. Any promoter known or found to cause transcription of DNA in plant cells can be used in the present invention. Other useful promoters are described, for example, in U.S. Pat. Nos. 5,378,619; 5,391,725; 5,428,147; 5,447,858; 5,608,144; 5,614,399; 5,633,441; and 5,633,435, all of which are incorporated herein by reference.

[0070] In addition, promoter enhancers, such as the CaMV 35S enhancer or a tissue specific enhancer, may be used to enhance gene transcription levels. Enhancers often are found 5′ to the start of transcription in a promoter that functions in eukaryotic cells, but can often be inserted in the forward or reverse orientation 5′ or 3′ to the coding sequence. In some instances, these 5′ enhancing elements are introns. Deemed to be particularly useful as enhancers are the 5′ introns of the rice actin 1 and rice actin 2 genes. Examples of other enhancers which could be used in accordance with the invention include elements from octopine synthase genes, the maize alcohol dehydrogenase gene intron 1, elements from the maize shrunken 1 gene, the sucrose synthase intron, the TMV omega element, and promoters from non-plant eukaryotes.

[0071] DNA constructs can also contain one or more 5′ non-translated leader sequences which serve to enhance polypeptide production from the resulting mRNA transcripts. Such sequences may be derived from the promoter selected to express the gene or can be specifically modified to increase translation of the mRNA. Such regions may also be obtained from viral RNAs, from suitable eukaryotic genes, or from a synthetic gene sequence. For a review of optimizing expression of transgenes, see Koziel et al. (1996) Plant Mol. Biol. 32:393-405).

[0072] Constructs and vectors may also include, with the coding region of interest, a nucleic acid sequence that acts, in whole or in part, to terminate transcription of that region. One type of 3′ untranslated sequence which may be used is a 3′ UTR from the nopaline synthase gene (nos 3′) of Agrobacterium tumefaciens. Other 3′ termination regions of interest include those from a gene encoding the small subunit of a ribulose-1,5-bisphosphate carboxylase-oxygenase (rbcS), and more specifically, from a rice rbcS gene (U.S. Pat. No. 6,426,446), the 3′ UTR for the T7 transcript of Agrobacterium tumefaciens, the 3′ end of the protease inhibitor I or II genes from potato or tomato, and the 3′ region isolated from Cauliflower Mosaic Virus. Alternatively, one also could use a gamma coixin, oleosin 3 or other 3′ UTRs from the genus Coix (PCT Publication WO 99/58659).

[0073] Constructs and vectors may also include a selectable marker. Selectable markers may be used to select for plants or plant cells that contain the exogenous genetic material. Useful selectable marker genes include those conferring resistance to antibiotics such as kanamycin (nptII), hygromycin B (aph IV) and gentamycin (aac3 and aacC4) or resistance to herbicides such as glufosinate (bar or pat) and glyphosate (EPSPS). Examples of such selectable markers are illustrated in U.S. Pat. Nos. 5,550,318; 5,633,435; 5,780,708 and 6,118,047, all of which are incorporated herein by reference.

[0074] Constructs and vectors may also include a screenable marker. Screenable markers may be used to monitor transformation. Exemplary screenable markers include genes expressing a colored or fluorescent protein such as a luciferase or green fluorescent protein (GFP), a β-glucuronidase or uidA gene (GUS) which encodes an enzyme for which various chromogenic substrates are known or an R-locus gene, which encodes a product that regulates the production of anthocyanin pigments (red color) in plant tissues. Other possible selectable and/or screenable marker genes will be apparent to those of skill in the art.

[0075] Constructs and vectors may also include a transit peptide for targeting of a gene target to a plant organelle, particularly to a chloroplast, leucoplast or other plastid organelle (U.S. Pat. No. 5,188,642).

[0076] For use in Agrobacterium mediated transformation methods, constructs of the present invention will also include T-DNA border regions flanking the DNA to be inserted into the plant genome to provide for transfer of the DNA into the plant host chromosome as discussed in more detail below. An exemplary plasmid that finds use in such transformation methods is pMON18365, a T-DNA vector that can be used to clone exogenous genes and transfer them into plants using Agrobacterium-mediated transformation. See U.S. patent application 20030024014, herein incorporated by reference. This vector contains the left border and right border sequences necessary for Agrobacterium transformation. The plasmid also has origins of replication for maintaining the plasmid in both E. coli and Agrobacterium tumefaciens strains.

[0077] A candidate gene is prepared for insertion into the T-DNA vector, for example using well-known gene cloning techniques such as PCR. Restriction sites may be introduced onto each end of the gene to facilitate cloning. For example, candidate genes may be amplified by PCR techniques using a set of primers. Both the amplified DNA and the cloning vector are cut with the same restriction enzymes, for example, NotI and PstIl. The resulting fragments are gel-purified, ligated together, and transformed into E. coli. Plasmid DNA containing the vector with inserted gene may be isolated from E. coli cells selected for spectinomycin resistance, and the presence of the desired insert verified by digestion with the appropriate restriction enzymes. Undigested plasmid may then be transformed into Agrobacterium tumefaciens using techniques well known to those in the art, and transformed Agrobacterium cells containing the vector of interest selected based on spectinomycin resistance. These and other similar constructs useful for plant transformation may be readily prepared by one skilled in the art.

[0078] Transformation Methods and Transgenic Plants—Methods and compositions for transforming bacteria and other microorganisms are known in the art. See for example Molecular Cloning: A Laboratory Manual, 3^{rd} edition Volumes 1, 2, and 3. J. F. Sambrook, D. W. Russell, and N. Irwin, Cold Spring Harbor Laboratory Press, 2000.

[0079] Technology for introduction of DNA into cells is well known to those of skill in the art. Methods and materials for transforming plants by introducing a transgenic DNA construct into a plant genome in the practice of this invention can include any of the well-known and demonstrated methods including electroporation as illustrated in U.S. Pat. No. 5,384,253, microprojectile bombardment as illustrated in U.S. Pat. Nos. 5,015,580; 5,550,318; 5,538,880; 6,160,208; 6,399,861 and 6,403,865, Agrobacterium-mediated transformation as illustrated in U.S. Pat. Nos. 5,635,055; 5,824,877; 5,591,616; 5,981,840 and 6,384,301, and protoplast transformation as illustrated in U.S. Pat. No. 5,508,184, all of which are incorporated herein by reference.

[0080] Any of the polynucleotides of the present invention may be introduced into a plant cell in a permanent or transient manner in combination with other genetic elements such as vectors, promoters enhancers etc. Further any of the polynucleotides of the present invention may be introduced into a plant cell in a manner that allows for production of the polypeptide or fragment thereof encoded by the polynucleotide in the plant cell, or in a manner that provides for decreased expression of an endogenous gene and concomitant decreased production of protein.

[0081] It is also to be understood that two different transgenic plants can also be mated to produce offspring that contain two independently segregating added, exogenous genes. Selfing of appropriate progeny can produce plants that are homozygous for both added, exogenous genes that encode a polypeptide of interest. Back-crossing to a parental plant and out-crossing with a non-transgenic plant are also contemplated, as is vegetative propagation.

[0082] Expression of the polynucleotides of the present invention and the concomitant production of polypeptides encoded by the polynucleotides is of interest for production of transgenic plants having improved properties, particularly, improved properties which result in crop plant yield improvement. Expression of polypeptides of the present invention in plant cells may be evaluated by specifically identifying the protein products of the introduced genes or evaluating the phenotypic changes brought about by their expression. It is noted that when the polypeptide being produced in a transgenic plant is native to the target plant species, quantitative analyses comparing the transformed plant to wild type plants may be required to demonstrate increased expression of the polypeptide of this invention.

[0083] Assays for the production and identification of specific proteins make use of various physical-chemical, structural, functional, or other properties of the proteins. Unique physical-chemical or structural properties allow the proteins to be separated and identified by electrophoretic procedures, such as native or denaturing gel electrophoresis or isoelectric focusing, or by chromatographic techniques such as ion exchange or gel exclusion chromatography. The unique structures of individual proteins offer opportunities for use of specific antibodies to detect their presence in formats such as an ELISA assay. Combinations of approaches may be employed with even greater specificity such as western blotting in which antibodies are used to locate individual gene products that have been separated by electrophoretic techniques. Additional techniques may be employed to absolutely confirm the identity of the product of interest such as evaluation by amino acid sequencing following purification. Although these are among the most commonly employed, other procedures may be additionally used.

[0084] Assay procedures may also be used to identify the expression of proteins by their functionality, particularly where the expressed protein is an enzyme capable of catalyzing chemical reactions involving specific substrates and products. These reactions may be measured, for example in plant extracts, by providing and quantifying the loss of substrates or the generation of products of the reactions by physical and/or chemical procedures.

[0085] In many cases, the expression of a gene product is determined by evaluating the phenotypic results of its expression. Such evaluations may be simply as visual observations, or may involve assays. Such assays may take many forms including but not limited to analyzing changes in the chemical composition, morphology, or physiological properties of the plant. Chemical composition may be altered by expression of genes encoding enzymes or storage proteins which change amino acid composition and may be detected by amino acid analysis, or by enzymes which change starch quantity which may be analyzed by near infrared reflectance spectrometry. Morphological changes may include greater stature or thicker stalks.

[0086] Plants with decreased expression of a gene of interest can also be achieved through the use of polynucleotides of the present invention, for example by expression of antisense nucleic acids, or by identification of plants transformed with sense expression constructs that exhibit cosuppression effects.

[0087] Antisense approaches are a way of preventing or reducing gene function by targeting the genetic material as disclosed in U.S. Pat. Nos. 4,801,540; 5,107,065; 5,759,829; 5,910,444; 6,184,439; and 6,198,026, all of which are incorporated herein by reference. The objective of the antisense approach is to use a sequence complementary to the target gene to block its expression and create a mutant cell line or organism in which the level of a single chosen protein is selectively reduced or abolished. Antisense techniques have several advantages over other ‘reverse genetic’ approaches. The site of inactivation and its developmental effect can be manipulated by the choice of promoter for antisense genes or by the timing of external application or microinjection. Antisense can manipulate its specificity by selecting either unique regions of the target gene or regions where it shares homology to other related genes.

[0088] The principle of regulation by antisense RNA is that RNA that is complementary to the target mRNA is introduced into cells, resulting in specific RNA:RNA duplexes being formed by base pairing between the antisense substrate and the target. Under one embodiment, the process involves the introduction and expression of an antisense gene sequence. Such a sequence is one in which part or all of the normal gene sequences are placed under a promoter in inverted orientation so that the ‘wrong’ or complementary strand is transcribed into a noncoding antisense RNA that hybridizes with the target mRNA and interferes with its expression. An antisense vector is constructed by standard procedures and introduced into cells by transformation, transfection, electroporation, microinjection, infection, etc. The type of transformation and choice of vector will determine whether expression is transient or stable. The promoter used for the antisense gene may influence the level, timing, tissue, specificity, or inducibility of the antisense inhibition.

[0089] As used herein “gene suppression” means any of the well-known methods for suppressing expression of protein from a gene including sense suppression, anti-sense suppression and RNAi suppression. In suppressing genes to provide plants with a desirable phenotype, anti-sense and RNAi gene suppression methods are preferred. More particularly, for a description of anti-sense regulation of gene expression in plant cells see U.S. Pat. No. 5,107,065 and for a description of RNAi gene suppression in plants by transcription of a dsRNA see U.S. Pat. No. 6,506,559, U.S. patent application Publication No. 2002/0168707 A1, and U.S. patent applications Ser. No. 09/423,143 (see WO 98/53083), Ser. No. 09/127,735 (see WO 99/53050) and Ser. No. 09/084,942 (see WO 99/61631), all of which are incorporated herein by reference. Suppression of an gene by RNAi can be achieved using a recombinant DNA construct having a promoter operably linked to a DNA element comprising a sense and anti-sense element of a segment of genomic DNA of the gene, e.g., a segment of at least about 23 nucleotides, more preferably about 50 to 200 nucleotides where the sense and anti-sense DNA components can be directly linked or joined by an intron or artificial DNA segment that can form a loop when the transcribed RNA hybridizes to form a hairpin structure. For example, genomic DNA from a polymorphic locus of SEQ ID NO: 1 through SEQ ID NO: 5544 can be used in a recombinant construct for suppression of a cognate gene by RNAi suppression.

[0090] Insertion mutations created by transposable elements may also prevent gene function. For example, in many dicot plants, transformation with the T-DNA of Agrobacterium may be readily achieved and large numbers of transformants can be rapidly obtained. Also, some species have lines with active transposable elements that can efficiently be used for the generation of large numbers of insertion mutations, while some other species lack such options. Mutant plants produced by Agrobacterium or transposon mutagenesis and having altered expression of a polypeptide of interest can be identified using the polynucleotides of the present invention. For example, a large population of mutated plants may be screened with polynucleotides encoding the polypeptide of interest to detect mutated plants having an insertion in the gene encoding the polypeptide of interest.

[0091] Polynucleotides of the present invention may be used in site-directed mutagenesis. Site-directed mutagenesis may be utilized to modify nucleic acid sequences, particularly as it is a technique that allows one or more of the amino acids encoded by a nucleic acid molecule to be altered (e.g., a threonine to be replaced by a methionine). Three basic methods for site-directed mutagenesis are often employed. These are cassette mutagenesis, primer extension, and methods based upon PCR.

[0092] In addition to the above discussed procedures, practitioners are familiar with the standard resource materials which describe specific conditions and procedures for the construction, manipulation and isolation of macromolecules (e.g., DNA molecules, plasmids, etc.), generation of recombinant organisms and the screening and isolating of clones.

[0093] Arrays—The polynucleotide or polypeptide molecules of this invention may also be used to prepare arrays of target molecules arranged on a surface of a substrate. The target molecules are preferably known molecules, e.g. polynucleotides (including oligonucleotides) or polypeptides, which are capable of binding to specific probes, such as complementary nucleic acids or specific antibodies. The target molecules are preferably immobilized, e.g. by covalent or non-covalent bonding, to the surface in small amounts of substantially purified and isolated molecules in a grid pattern. By immobilized is meant that the target molecules maintain their position relative to the solid support under hybridization and washing conditions. Target molecules are deposited in small footprint, isolated quantities of “spotted elements” of preferably single-stranded polynucleotide preferably arranged in rectangular grids in a density of about 30 to 100 or more, e.g. up to about 1000, spotted elements per square centimeter. In addition in preferred embodiments arrays comprise at least about 100 or more, e.g. at least about 1000 to 5000, distinct target polynucleotides per unit substrate. Where detection of transcription for a large number of genes is desired, the economics of arrays favors a high density design criteria provided that the target molecules are sufficiently separated so that the intensity of the indicia of a binding event associated with highly expressed probe molecules does not overwhelm and mask the indicia of neighboring binding events. For high-density microarrays each spotted element may contain up to about 10⁷ or more copies of the target molecule, e.g. single stranded cDNA, on glass substrates or nylon substrates.

[0094] Arrays of this invention can be prepared with molecules from a single species, preferably a plant species, or with molecules from other species, particularly other plant species. Arrays with target molecules from a single species can be used with probe molecules from the same species or a different species due to the ability of cross species homologous genes to hybridize. It is generally preferred for high stringency hybridization that the target and probe molecules are from the same species.

[0095] In preferred aspects of this invention the organism of interest is a plant and the target molecules are polynucleotides or oligonucleotides with nucleic acid sequences having at least 80 percent sequence identity to a corresponding sequence of the same length in a polynucleotide having a sequence selected from the group consisting of SEQ ID NO: 1 through SEQ ID NO: 5544 or complements thereof. In other preferred aspects of the invention at least 10% of the target molecules on an array have at least 15, more preferably at least 20, consecutive nucleotides of sequence having at least 80%, more preferably up to 100%, identity with a corresponding sequence of the same length in a polynucleotide having a sequence selected from the group consisting of SEQ ID NO: 1 through SEQ ID NO: 5544 or complements or fragments thereof.

[0096] Such arrays are useful in a variety of applications, including gene discovery, genomic research, molecular breeding and bioactive compound screening. One important use of arrays is in the analysis of differential gene transcription, e.g. transcription profiling where the production of mRNA in different cells, normally a cell of interest and a control, is compared and discrepancies in gene expression are identified. In such assays, the presence of discrepancies indicates a difference in gene expression levels in the cells being compared. Such information is useful for the identification of the types of genes expressed in a particular cell or tissue type in a known environment. Such applications generally involve the following steps: (a) preparation of probe, e.g. attaching a label to a plurality of expressed molecules; (b) contact of probe with the array under conditions sufficient for probe to bind with corresponding target, e.g. by hybridization or specific binding; (c) removal of unbound probe from the array; and (d) detection of bound probe.

[0097] A probe may be prepared with RNA extracted from a given cell line or tissue. The probe may be produced by reverse transcription of mRNA or total RNA and labeled with radioactive or fluorescent labeling. A probe is typically a mixture containing many different sequences in various amounts, corresponding to the numbers of copies of the original mRNA species extracted from the sample.

[0098] The initial RNA sample for probe preparation will typically be derived from a physiological source. The physiological source may be selected from a variety of organisms, with physiological sources of interest including single celled organisms such as yeast and multicellular organisms, including plants and animals, particularly plants, where the physiological sources from multicellular organisms may be derived from particular organs or tissues of the multicellular organism, or from isolated cells derived from an organ, or tissue of the organism. The physiological sources may also be multicellular organisms at different developmental stages (e.g., 10-day-old seedlings), or organisms grown under different environmental conditions (e.g., drought-stressed plants) or treated with chemicals.

[0099] In preparing the RNA probe, the physiological source may be subjected to a number of different processing steps, where such processing steps might include tissue homogenation, cell isolation and cytoplasmic extraction, nucleic acid extraction and the like, where such processing steps are known to the those of skill in the art. Methods of isolating RNA from cells, tissues, organs or whole organisms are known to those of skill in the art.

[0100] Computer Based Systems and Methods—The sequence of the molecules of this invention can be provided in a variety of media to facilitate use thereof. Such media can also provide a subset thereof in a form that allows a skilled artisan to examine the sequences. In a preferred embodiment, 20, preferably 50, more preferably 100, even more preferably 200 or more of the polynucleotide and/or the polypeptide sequences of the present invention can be recorded on computer readable media. As used herein, “computer readable media” refers to any medium that can be read and accessed directly by a computer. Such media include, but are not limited to: magnetic storage media, such as floppy discs, hard disc, storage medium, and magnetic tape: optical storage media such as CD-ROM; electrical storage media such as RAM and ROM; and hybrids of these categories such as magnetic/optical storage media. A skilled artisan can readily appreciate how any of the presently known computer readable media can be used to create a manufacture comprising a computer readable medium having recorded thereon a nucleotide sequence of the present invention.

[0101] As used herein, “recorded” refers to a process for storing information on computer 20 readable media. A skilled artisan can readily adopt any of the presently known methods for recording information on computer readable media to generate media comprising the nucleotide sequence information of the present invention. A variety of data storage structures are available to a skilled artisan for creating a computer readable medium having recorded thereon a nucleotide sequence of the present invention. The choice of the data storage structure will generally be based on the means chosen to access the stored information. In addition, a variety of data processor programs and formats can be used to store the nucleotide sequence information of the present invention on computer readable media. The sequence information can be represented in a word processing text file, formatted in commercially-available software such as WordPerfect and Microsoft Word, or represented in the form of an ASCII file, stored in a database application, such as DB2, Sybase, Oracle, or the like. A skilled artisan can readily adapt any number of data processor structuring formats (e.g., text file or database) in order to obtain a computer readable medium having recorded thereon the nucleotide sequence information of the present invention.

[0102] By providing one or more of polynucleotide or polypeptide sequences of the present invention in a computer readable medium, a skilled artisan can routinely access the sequence information for a variety of purposes. The examples which follow demonstrate how software which implements the BLAST and BLAZE search algorithms on a Sybase system can be used to identify open reading frames (ORFs) within the genome that contain homology to ORFs or polypeptides from other organisms. Such ORFs are polypeptide encoding fragments within the sequences of the present invention and are useful in producing commercially important polypeptides such as enzymes used in amino acid biosynthesis, metabolism, transcription, translation, RNA processing, nucleic acid and a protein degradation, protein modification, and DNA replication, restriction, modification, recombination, and repair.

[0103] The present invention further provides systems, particularly computer-based systems, which contain the sequence information described herein. Such systems are designed to identify commercially important fragments of the nucleic acid molecule of the present invention. As used herein, “a computer-based system” refers to the hardware, software, and memory used to analyze the sequence information of the present invention. A skilled artisan can readily appreciate that any one of the currently available computer-based systems are suitable for use in the present invention.

[0104] As indicated above, the computer-based systems of the present invention comprise a database having stored therein a nucleotide sequence of the present invention and the necessary hardware and software for supporting and implementing a homology search. As used herein, “database” refers to memory system that can store searchable nucleotide sequence information. As used herein “query sequence” is a nucleic acid sequence, or an amino acid sequence, or a nucleic acid sequence corresponding to an amino acid sequence, or an amino acid sequence corresponding to a nucleic acid sequence, that is used to query a collection of nucleic acid or amino acid sequences. As used herein, “homology search” refers to one or more programs which are implemented on the computer-based system to compare a query sequence, i.e., gene or peptide or a conserved region (motif), with the sequence information stored within the database. Homology searches are used to identify segments and/or regions of the sequence of the present invention that match a particular query sequence. A variety of known searching algorithms are incorporated into commercially available software for conducting homology searches of databases and computer readable media comprising sequences of molecules of the present invention.

[0105] Commonly preferred sequence length of a query sequence is from about 10 to 100 or more amino acids or from about 20 to 300 or more nucleotide residues. There are a variety of motifs known in the art. Protein motifs include, but are not limited to, enzymatic active sites and signal sequences. An amino acid query is converted to all of the nucleic acid sequences that encode that amino acid sequence by a software program, such as TBLASTN, which is then used to search the database. Nucleic acid query sequences that are motifs include, but are not limited to, promoter sequences, cis elements, hairpin structures and inducible expression elements (protein binding sequences).

[0106] Thus, the present invention further provides an input device for receiving a query sequence, a memory for storing sequences (the query sequences of the present invention and sequences identified using a homology search as described above) and an output device for outputting the identified homologous sequences. A variety of structural formats for the input and output presentations can be used to input and output information in the computer-based systems of the present invention. A preferred format for an output presentation ranks fragments of the sequence of the present invention by varying degrees of homology to the query sequence. Such presentation provides a skilled artisan with a ranking of sequences that contain various amounts of the query sequence and identifies the degree of homology contained in the identified fragment.

[0107] Having now generally described the invention, the same will be more readily understood through reference to the following examples which are provided by way of illustration, and are not intended to be limiting of the present invention, unless specified.

### EXAMPLE 1

[0108] A cDNA library is generated from the desired tissue. Tissue is harvested and immediately frozen in liquid nitrogen. The harvested tissue is stored at −80° C. until preparation of total RNA. The total RNA is purified using Trizol reagent from Invitrogen Corporation (Invitrogen Corporation, Carlsbad, Calif., U.S.A.), essentially as recommended by the manufacturer. Poly A+ RNA (mRNA) is purified using magnetic oligo dT beads essentially as recommended by the manufacturer (Dynabeads, Dynal Biotech, Oslow, Norway).

[0109] Construction of plant cDNA libraries is well known in the art and a number of cloning strategies exist. A number of cDNA library construction kits are commercially available. cDNA libraries are prepared using the Superscript™ Plasmid System for cDNA synthesis and Plasmid Cloning (Invitrogen Corporation, Carlsbad, Calif., U.S.A.), as described in the Superscript II cDNA library synthesis protocol. The cDNA libraries are quality controlled for a good insert:vector ratio.

[0110] The cDNA libraries are plated on LB agar containing the appropriate antibiotics for selection and incubated at 37° for a sufficient time to allow the growth of individual colonies. Single colonies are individually placed in each well of a 96-well microtiter plates containing LB liquid including the selective antibiotics. The plates are incubated overnight at approximately 37° C. with gentle shaking to promote growth of the cultures. The plasmid DNA is isolated from each clone using Qiaprep plasmid isolation kits, using the conditions recommended by the manufacturer (Qiagen Inc., Valencia, Calif. U.S.A.).

[0111] The template plasmid DNA clones are used for subsequent sequencing. Sequences of polynucleotides may be obtained by a number of sequencing techniques known in the art, including fluorescence-based sequencing methodologies. These methods have the detection, automation, and instrumentation capability necessary for the analysis of large volumes of sequence data. With these types of automated systems, fluorescent dye-labeled sequence reaction products are detected and data entered directly into the computer, producing a chromatogram that is subsequently viewed, stored, and analyzed using the corresponding software programs. These methods are known to those of skill in the art and have been described and reviewed.

### EXAMPLE 2

[0112] The open reading frame in each polynucleotide sequence is identified by a combination of predictive and homology based methods. The longest open reading frame (ORF) is determined, and the top BLAST match is identified by BLASTX against NCBI. The top BLAST hit is then compared to the predicted ORF, with the BLAST hit given precedence in the case of discrepancies.

[0113] Functions of polypeptides encoded by the polynucleotide sequences of the present invention are determined using a hierarchical classification tool, termed FunCAT, for Functional Categories Annotation Tool. Most categories collected in FunCAT are classified by function, although other criteria are used, for example, cellular localization or temporal process. The assignment of a functional category to a query sequence is based on BLASTX sequence search results, which compare two protein sequences. FunCAT assigns categories by iteratively scanning through all blast hits, starting with the most significant match, and reporting the first category assignment for each FunCAT source classification scheme. In the present invention, function of a query polypeptide is inferred from the function of a protein homolog where either (1) hit_p<1e-30 or % identity>35% AND query_coverage>50% AND hit_coverage>50%, or (2) hit_p<1e-8 AND query_coverage>70% AND hit_coverage>70%.

[0114] Functional assignments from five public classification schemes, GO_BP, GO_CC, GO_MF, KEGG, and EC, and one internal Monsanto classification scheme, POI, are provided in Table 1. The column under the heading “CAT_TYPE” indicates the source of the classification. GO_BP=Gene Ontology Consortium−biological process; GO_CC=Gene Ontology Consortium−cellular component; GO_MF=Gene Ontology Consortium−molecular function; KEGG=KEGG functional hierarchy; EC=Enzyme Classification from ENZYME data bank release 25.0; POI=Pathways of Interest. The column under the heading “CAT_DESC” provides the name of the subcategory into which the query sequence was classified. The column under the heading “PRODUCT_HIT_DESC” provides a description of the BLAST hit to the query sequences that led to the specific classification. The column under the heading “HIT_E” provides the e-value for the BLAST hit. It is noted that the e-value in the HIT_E column may differ from the e-value based on the top BLAST hit provided in the E_VALUE column since these calculations were done on different days, and database size is an element in E-value calculations. E-values obtained by BLASTing against public databases, such as GenBank, will generally increase over time for any given query/entry match.

[0115] Sequences useful for producing transgenic plants having improved biological properties are identified from their FunCAT annotations and are also provided in Table 1. A biological property of particular interest is plant yield. Plant yield may be improved by alteration of a variety of plant pathways, including those involving nitrogen, carbohydrate, or phosphorus utilization and/or uptake. Plant yield may also be improved by alteration of a plant's photosynthetic capacity or by improving a plant's ability to tolerate a variety of environmental stresses, including cold, heat, drought and osmotic stresses. Other biological properties of interest that may be improved using sequences of the present invention include pathogen or pest tolerance, herbicide tolerance, disease resistance, growth rate (for example by modification of cell cycle, by expression of transcription factors, or expression of growth regulators), seed oil and/or protein yield and quality, rate and control of recombination, and lignin content.

[0116] Polynucleotide sequences are provided herein as SEQ ID NO: 1 through SEQ ID NO: 5544, and the translated polypeptide sequences for these polynucleotide sequences are provided as SEQ ID NO: 5545 through SEQ ID NO: 11088. Descriptions of each of these polynucleotide and polypeptide sequences are provided in Table 1.

[0117] Table 1 Column Descriptions

[0118] SEQ_NUM provides the SEQ ID NO for the listed polynucleotide sequences.

[0119] CONTIG_ID provides an arbitrary sequence name taken from the name of the clone from which the cDNA sequence was obtained.

[0120] PROTEIN_NUM provides the SEQ ID NO for the translated polypeptide sequence

[0121] NCBI_G_L provides the GenBank ID number for the top BLAST hit for the sequence. The top BLAST hit is indicated by the National Center for Biotechnology Information GenBank Identifier number.

[0122] NCBI_GI_DESCRIPTION refers to the description of the GenBank top BLAST hit for the sequence.

[0123] E_VALUE provides the expectation value for the top BLAST match.

[0124] MATCH_LENGTH provides the length of the sequence which is aligned in the top BLAST match

[0125] TOP_HIT_PCT_IDENT refers to the percentage of identically matched nucleotides (or residues) that exist along the length of that portion of the sequences which is aligned in the top BLAST match.

[0126] CAT_TYPE indicates the classification scheme used to classify the sequence. GO_BP=Gene Ontology Consortium−biological process; GO_CC=Gene Ontology Consortium−cellular component; GO_MF=Gene Ontology Consortium−molecular function; KEGG=KEGG functional hierarchy (KEGG=Kyoto Encyclopedia of Genes and Genomes); EC=Enzyme Classification from ENZYME data bank release 25.0; POI=Pathways of Interest.

[0127] CAT_DESC provides the classification scheme subcategory to which the query sequence was assigned.

[0128] PRODUCT_CAT_DESC provides the FunCAT annotation category to which the query sequence was assigned.

[0129] PRODUCT_HIT_DESC provides the description of the BLAST hit which resulted in assignment of the sequence to the function category provided in the cat_desc column.

[0130] HIT_E provides the E value for the BLAST hit in the hit_desc column.

[0131] PCT_IDENT refers to the percentage of identically matched nucleotides (or residues) that exist along the length of that portion of the sequences which is aligned in the BLAST match provided in hit_desc.

[0132] QRY_RANGE lists the range of the query sequence aligned with the hit.

[0133] HIT_RANGE lists the range of the hit sequence aligned with the query.

[0134] QRY_CVRG provides the percent of query sequence length that matches to the hit (NCBI) sequence in the BLAST match (% qry cvrg=(match length/query total length)×100).

[0135] HIT_CVRG provides the percent of hit sequence length that matches to the query sequence in the match generated using BLAST (% hit cvrg=(match length/hit total length)×100).

[0136] All publications and patent applications cited herein are incorporated by reference in their entirely to the same extent as if each individual publication or patent application was specifically and individually indicated to be incorporated by reference.

[0137] Although the foregoing invention has been described in some detail by way of illustration and example for purposes of clarity of understanding, it will be obvious that certain changes and modifications may be practiced within the scope of the appended claims.

What is claimed is:

1) A recombinant DNA construct comprising a polynucleotide having a nucleic acid sequence selected from the group consisting of SEQ ID NO: 1 through SEQ ID NO: 5544.

2) A recombinant DNA construct comprising a polynucleotide encoding a polypeptide having an amino acid sequence selected from the group consisting of SEQ ID NO: 5545 through SEQ ID NO: 11088.

3) A method of producing a plant having an improved property, wherein said method comprises transforming a plant with a recombinant DNA construct comprising a promoter region functional in a plant cell operably joined to a polynucleotide encoding a polypeptide associated with said property, and growing said transformed plant, wherein said polypeptide is selected from the group consisting of:
a) a polypeptide useful for improving plant cold tolerance, wherein said polypeptide comprises a sequence identified as such in Table 1;
b) a polypeptide useful for manipulating growth rate in plant cells by modification of the cell cycle pathway, wherein said polypeptide comprises a sequence identified as such in Table 1;
c) a polypeptide useful for improving plant drought tolerance, wherein said polypeptide comprises a sequence identified as such in Table 1;
d) a polypeptide useful for providing increased resistance to plant disease, wherein said polypeptide comprises a sequence identified as such in Table 1;
e) a polypeptide useful for galactomannan production, wherein said polynucleotide comprises a sequence identified as such in Table 1;
f) a polypeptide useful for production of plant growth regulators, wherein said polypeptide comprises a sequence identified as such in Table 1;
g) a polypeptide useful for improving plant heat tolerance, wherein said polypeptide comprises a sequence identified as such in Table 1;
h) a polypeptide useful for improving plant tolerance to herbicides, wherein said polypeptide comprises a sequence identified as such in Table 1;
i) a polypeptide useful for increasing the rate of homologous recombination in plants, wherein said polypeptide comprises a sequence identified as such in Table 1;
j) a polypeptide useful for lignin production, wherein said polypeptide comprises a sequence identified as such in Table 1;
k) a polypeptide useful for improving plant tolerance to extreme osmotic conditions, wherein said polypeptide comprises a sequence identified as such in Table 1;
l) a polypeptide useful for improving plant tolerance to pathogens or pests, wherein said polypeptide comprises a sequence identified as such in Table 1;
m) a polypeptide useful for yield improvement by modification of photosynthesis, wherein said polynucleotide comprises a sequence identified as such in Table 1;
n) a polypeptide useful for modifying seed oil yield and/or content, wherein said polypeptide comprises a sequence identified as such in Table 1;
o) a polypeptide useful for modifying seed protein yield and/or content, wherein said polypeptide comprises a sequence identified as such in Table 1;
p) a polypeptide encoding a plant transcription factor, wherein said polypeptide comprises a sequence identified as such in Table 1;
q) a polypeptide useful for yield improvement by modification of carbohydrate use and/or uptake, wherein said polypeptide comprises a sequence identified as such in Table 1;
r) a polypeptide useful for yield improvement by modification of nitrogen use and/or uptake, wherein said polypeptide comprises a sequence identified as such in Table 1;
s) a polypeptide useful for yield improvement by modification of phosphorus use and/or uptake, wherein said polypeptide comprises a sequence identified as such in Table 1; and
t) a polypeptide useful for yield improvement by providing improved plant growth and development under at least one stress condition, wherein said polypeptide comprises a sequence identified as such in Table 1.

The application's sequence listing, which the Patent Office published only in electronic form, follows.

SEQUENCE LISTING (11088 sequences)

SEQ ID NO: 1 - DNA, 2241 bp, Arabidopsis thaliana
  Clone ID: ARATH-23APR03-CLUSTER0_1
tatttatattttttttttttttaagaagagggacacaaaacagtagagagagaaagagatatagagatagagagagatagggctttgagattattctcttccacgcaaagaagaagatctaaagatgtcgtcatcatcatataacacaagcgttattccttcatcatcatcctctgctcagcctttcttcatcaccagctccggcaccgatgtctcatcgtcaacacaattgctttgtcctccactccgaccttcctcctctcaagtgccgctgccggacccggaccaaacaactttaaccgtcaagaggctgtccatgtcacaacaacccactcgctccaccacccaagaagcgaaggaaccaacccggaaacccaaatccagatgctgaagtgatagcgttatcgccaaagacgataatggcgacgaccagattcctatgtgaagtgtgcaacaaagggttacaaagagaacagaatctgcagctccacagaagaggacacaaactcgatggaaatcttaaacagcattacaaagaagaagtgatggggaaacactatcatagtccgaagccctcgtgcaacctctattatttcgcacgtgtaccagaagatcgcaccgtatcgtgatttccagattcaaattaattgggtgattataagtgagaagacagttacatcacccacgaggggcattctgtgatgcactcatacaggaagtcagcaagaaacccccaccgtgagcttcacggcaatggcagctggtggtggtggtggcggccagacatggcttttaacggcggagcttcttccgctctctctcacaaccatttcggtaacaatccaaattccggtttcacccctctagctgctgcaggctacaatctgaaccgttcatccttccgacaagttcgaagacttcgttcctccaggccaccaaccctaatcccggtccgaccaacttcctcatgcaatgctctccgaaccaaggactgttagcccagaacaatcagagtctcatgaaccatcatggtctgatcagcctcggtgataacaacaacaacaaccacaactttttcaacctcgcatactttcaagacaccaagaattctgatcagacaggtgttccttctctgttcaccaatggtgctgataacaacggcccatctgctttgcttagagggctaacttcttcatcttcgtcaagtgtggtcgttaatgactttggagattgtgatcatggaaaccttcaaggactcatgaactctctagctgcgacaacagatcaacaaggccggtcccctagccttttcgaccttcatttcgcaaacaatcttagcatgggtggctcggataggttgactttggactttcttggtgttaatggaggaattgtgagcaccgtcaatggccgtggtggtcgtagtggtggacctcctctggatgctgagatgaagttttcacacccaaatcatccatatggcaaagcttgagatgatcgttatctatctacaaatcatccaaatcatcatcatctagatatgctattaagttccttggagattttattctagataaagctagatatccaaatttaagctttctttcttttgctgttttcgactattaagggtaaggattgagctttgggatttttcattataaatttcttaagctcttattttttttgcttaatgtcatggtgggaggctctagagtttttccttaataatatattgtaatcttgaatcataaatatatttcatgaaaagtaatttgttcactatccaaataaaaaaaaaaaaaaaaaaccatcaggagcgggggccacggttatcataattgaagctagagagccagatttaagttttcctttctttccgctgttttcgacagttatggataagaatagcggttttggtatttttcatacttaatttccttatgctcttcttcttgtgtgtttttaagaagataaaaggagtttcaaatgtgccatttttaaaaaaggtatttagtgcatcaaaaaacatgctatagcaaacaggtatgcatgtcgtcatcaaaaccccatttgaagtaattaaaattttagttgcaatttatctaaactcagttcttttttttttttcttttgtaaaagattttgcctttcattgtttatataaaatggattccctcctgaaaaaaacaaatttcagagttatagtttatggtttcacaatgaaaaaattttcatatt

SEQ ID NO: 2 - DNA, 1334 bp, Arabidopsis thaliana
  Clone ID: ARATH-23APR03-CLUSTER10019_1
tgggaagttggatttagagttcaaatttttattaatcatgtatagaattcacaagtaataatcgatatctccaaagcctactctaaaaaataaccacaagaatcactgccaaaactgccatgggagaactcgacgaagcttttatccaagctccagaacacagacccaacactcacctcacaaactccggtgatttcattttctccgacgagatcccgaccatcgacctctcttctctcgaagatactcatcatgacaagactgcgatcgccaaggagattgcagaggcatgcaagagatggggattttttcaagtgatcaaccatggcttgccttcagctttaaggcatcgtgtagagaagacagctgctgagtttttcaatctaacgacggaggagaagaggaaagtgaaaagagacgaagtgaatcctatgggttatcacgacgaagaacacactaagaacgttagagattggaaggaaattttcgatttcttcttacaagattccacgatcgttccggcgtcaccggagccggaagatactgagctccgaaagctcacgaaccagtggcctcaaaacccttctcatttcagagaggtatgccaagaatatgcaagagaagttgagaagttagcttttaggctattggaacttgtctccattagtttgggtctacctggtgatcggctaaccggtttcttcaatgagcaaactagttttttgcggtttaaccattaccctccttgcccgaaccccgagctagcattaggtgttggacgtcacaaagatggaggagctttaaccgtcctggcccaagatagtgtaggtggattacaagtgagtcgtagatcggatggacaatggatccccgtgaaaccgatctcggatgctttgatcattaacatgggcaattgtattcaggtgtggacaaatgatgagtattggagtgctgaacatagagtggtcgtgaatacaagcaaagagagattctcaataccattcttcttcttcccatcacatgaagccaatattgagccattggaggagcttataagtgaggaaaacccgccttgttataaaaagtacaattggggaaagttctttgtttcaagaaacagaagtgatttcaagaaactcgaggttgagaatatccagattgatcacttcaaggcttagttaatcacattataattaaaccttatgttgatttctattggttctttttatataagttagccaagttcatatttcccaaaataaaaaaaaaaaaaaaaaaaaaaaaaaaaaaaataaacggtcatcagaatgttgtgccaaaaaaaaaaaaaaaaa

SEQ ID NO: 3 - DNA, 1287 bp, Arabidopsis thaliana
  Clone ID: ARATH-23APR03-CLUSTER10033_1
aaaaaccaaaaatttccaaactacccaaaccccccacaaaacatcttcgaagagaaacaaaaaaaaacaccctgaaaagaaaggaaaagagacacagagagtcagaaacttacgagtaaaaaagagcacatcttaggaaaacgataataatgctggaaactaaagatcctgcgataaagctctttggtatgaaaattcctttcccgacggttttagaggttgctgatgaagaagaagaaaagaaccaaaacaagacattaactgatcaatcggagaaagacaaaaccctaaagaaaccaaccaagattcttccatgtccaagatgcaacagcatggagactaagttctgttactacaacaactacaacgtaaaccaacctcgccatttttgtaaagcttatcagagatattggacctcaggtgggaccatgagaagtgttccaatcggagcaggacggcgcaagaacaagaacaactcaccaacttcacattaccaccatgtgactatctccgaaacaaatggtccggtccttagtttcagcctcggagatgatcaaaaggtctcgagtaataggtttggtaatcaaaagctagttgctaggatagagaacaatgacgagcgctctaataacaacacttcgaacggtttgaattgttttccgggagtttcgtggccgtacacgtggaatcctgcgttttacccggtttacccttattggagcatgccagtgttgtcttctccggtaagttcaagtcctacttctactcttggtaagcattcgagagacgaagacgagacggtgaagcaaaaacagaggaatggatctgtattggttccaaagactttgagaattgatgatcctaatgaagctgcaaagagttcgatatggacaacacttgggatcaagaacgaagttatgttcaatgggtttggttcgaagaaagaggttaagctcagtaacaaagaagaaacagagacctcacttgttctttgtgcaaaccctgctgcgttatcaagatcaatcaatttccatgagcagatgtgattgtatacatatgatatatacgtgtatgtatgtatagatgtggtggaagattaagttagatccatcaaaatctgacttttttgttctttcgttgtggcttacatgaagctttataatagcttttgtaccatatactttttagtcttttaagtttgatttttgttgtaagattaaatacgatgaaataaaagttctttttgaccgtaaaaaaaaaaaaaaaaaaaaaaaggggggccctttt

SEQ ID NO: 4 - DNA, 1002 bp, Arabidopsis thaliana
  Clone ID: ARATH-23APR03-CLUSTER10034_1
aaaaattcagaggaaaaaaaacacgatcgagaaatggagaataatccaagaagctcatcgtctctccctctagccgggcgtgtagctatagtgaccggagccaccagaggcatgggccgtgaaatcgcgattcacctccactctcttggtgcaagagtcaccatcaattatgtctcgagctcatcaaaagctgaactcttggtttcagaactaaacgactcatctcaattaaagtcagcgatcgcagttaaagcagatgtgtcagacccggaccagatcaacaacttgtttgatcaaacagaacaagagttcggatctaaagttcacatcgtcgtgaattgtgcaggtgttttggatccaaagtatccatctttatccgagacgacactagaagatttcgataacacattcacaataaacacaagagggtctttcttgtgttgcaaggaagcagctaaaagggttatgagaggaggtggtggaagaatcattatgatgtctacatcaatggttggtggtctcgccccgggttatggagtttacgcagcatcaaaggccgccgttgagacaatggtgaaagtgttggcgaaggagcttaagggaagccggataaccgcgaattgcgtggcgccagggccggttgcgacggagatgttttatgctggaaagagtgatgaaacggtgaaaatgcttgcaggggcttgtcctatggggaggatcggtgagtcaaaggatataaccgagattgtagggtttttggccggtgatggtggtgaatggattaacggtcaagttattagagccaatggaggctttgttgtctaataaatgaagaactaacattggaatttgatgttgtcttcttcttttcgtgtgttgatctacttttatgtcaatgatgatgagttgtttattgggcaaaaaaaaaattaaaacaaaaaaaagtacattcaataaaacttaaaaaaattgattgaaaataaaaagacaaccaacactcca

SEQ ID NO: 5 - DNA, 2717 bp, Arabidopsis thaliana
  Clone ID: ARATH-23APR03-CLUSTER100486_1
gtttcagagattaactttgaaaaatgagtatcgctttgatctcctgctaaaatcgccattgcaaaattcaaaacctgtagagattgaaactgtaaaaaaatggcactacctccatcgtctccttcaccatcatctccatctcttcaacgtctctccaccttcaaaaaccctcctccttcttcactctcctccggcgcaccaccaccacaaacaccgtcatcttcctcttcttcgccgctcgattcttttgccaccgatccaatcctctccccattcctctcatcttccttctcctccgcatcattctcctccgccgctctcgcttctggatctccggcctccaccgccgaacgtctccaccaagcaatccgcctcctcgattcacagctccgtaatgacgtcatctctcgtcaccctgaattgctcgctcagctctcttctctctcacacgccgatgtatctctctcttctctccgatcctccgtctcttcactccaatcttcaattcgccgtgtcagatccgacctctctgaaccgatcaaatcgatccgatctaaatctgttcagctatctaatctccatacagctactgagttactatctcactccgttcgtacgcttcgtctctctaagaagcttcgagatctagcggattttcctgatccagataagatcgatctcactaaagctgcacagttccatttcgagatcttaacaatgtgtaaagagtatgatctctttggcattgatgtgattgatgaggaaatcaagtttgttactgagattggagagaaattgagatctgaagctatgaaggtgttggagagaggcatggaagggttgaatcaagctgaagttgggactggtttgcaagttttctataaccttggagagcttaagtctacggtggatcaattggtgaataagtataagggaatggctgtgaagagtgtgagtgttgctatggatatgaaagctattacttctggctcaggtggtggcttcgggcctggtgggattaggtctagcggatcaccgcatattggtggtggtgctaaagttagggaggcgttgtggcagaggatggctagttgtatggaacagttgtgttcacttgtagttgctgtgtggcatttgcagcgtgtactgtctaagaagagggatccatttactcatgtccttcttcttgacgaagtcatcaaggaaggcgattctatgttaaccgatagagtctgggatgcacttgtgaaggcttttactagccaaatgaagtctgcatacacagcttcgagttttgtaaaagaaatattcaccatgggatatccgaagcttgtgtctatgatagaaaatcttcttgaaaggatttctcgtgatacagatgttaaaggagtgttacctgccattaatttagaaaggaaagaacaaatggttgcatgcattgctatattccagactgctttcttatccctatgctttggccgcctgtcagaccttgtaaacgcgatattccctatgtcgagccgtgggagtttaccttcgaaagaacagatttcacaggtattatcacacattcaagatgagattgaggctgttcatccagatgctcgtttgactcttctagttttgcgtgagataggcaaggcccttagtaacctagctcaacgagctgagtgccagatttctacaggccctgagacgcggcagatatcaggtcctgcgacttcaacacagatcaggaacttcacattatgtcagcatctgcaaggaatccacacacatatctcatccatggtagcggaccttcccagtattgctactgatgtattgtctccttatctggctgcaatctatgatgcggcatgtgagccagttacacctttgtttaaagcaatgcgagacaagctcgagtcatgcattcttcaaatccatgatcaaaactttggtgctgatgacgctgacatggacaacaacgcttcctcatacatggaggagttgcagagatcgattcttcacttccgcaaggagttcctatctagactattgccttccgcagcaaatgctaacactgcaggaacagaatcgatctgcacaagactcacaagacaaatggcgtcaagggttttgatcttctacatcagacatgcatcccttgtgcgaccactttcagaatggggaaaactcagaatggccaaagacatggccgagctggaactagcagtgggacagaatctatttcccgtggaacaactcggagcaccgtacagagctcttagagcgtttaggcctttggttttcctggaaacatctcaaatgggatcatctcctctcatcaatgatctaccaccgagcatcgtcctacatcatctctacacaagaggcccagacgagttagagtcaccgatgcagaagaacagactaagtcctaaacagtactcactgtggcttgataaccaaagagaggatcagatctggaaagggataaaagcaactttggatgattatgcagtgaagatcagatcgagaggggacaaagagtttagtccagtttatcctctaatgcttcaaattggttcatctttaacacaagaaaacttataagctgtgctttgttaccgaatcaatattcttctattgcgaacttttttgtctcatggatttttcattcagttgtagttactatatctctcacataaaaaaaaaaaaaaaagggcggccgc

SEQ ID NO: 6 - DNA, 2355 bp, Arabidopsis thaliana
  Clone ID: ARATH-23APR03-CLUSTER10048_1
gaatttagttaaggatgaggaagatgaagatgatgatgattcgaaaatgaaggtggtggatactgcaaatggctgctgagtgctgagacactctcgaaccccacaaaccctaaggatctcctccgaagatttccactattactggaagtgatatagatacgttgcaacaaagaagaccacacaaaaacgttattgagcagccgtgaaatcgatttaccaattgaagcttccccccatgatttgactttccctgatgctcgtttgtgggaaagggtttctaaagtgcagagcacctggagttccattcttttgtgacaaaagaaaatccttcttcactaaaactaagaggggctttcacagtttacctttgggcactggggtccgtgtttatttcaacaacaatcttaggtactcaagcaattcaatagaagttgtggagaaagctgccattaatatgggttcaaaggaagacaaggcagataatccagctttatcttcatatgatgatgccatggaagctctgtcgactcttatttctcgtcgaaaccgtggggatcgcacacctactaaaggaaatcgtgacaagcttgaacaagtcgtcacatatctcaagattttggacctggaagacaaaataaaagaactaaaagttattcatgtcgcaggaacaaaaggaaagggttcaacatgtgtcttcagtgaggcaattttacgtaattgtgggtttcgaaccggaatgtttacatctcctcacttgattgatgtgagggaaagattccgaatagatggcttggatatatctgaggaaaagtttctacagtacttctgggaatgttggaagttactgaaggagaaagctgtagatggtcttaccatgcctcctctttttcagtttctcacagtattggcatttaagatttttgtttgtgaaaaggttgatgttgctgtcattgaagttggacttgggggaaaacttgactcgacaaatgtgattcaaaaacctgttgtctgtggcattgcttctcttgggatggatcatatggacatattgggaaatacgctagctgatattgcctttcataaggctgggattttcaagcctcaaatccccgccttcacagtaccacaactctctgaagcaatggatgttcttcagaaaacagctaataatctcgaggttcctctagaagtagtagcgcctcttgaacctaaaaagttggacggagttacgcttggcttgtctggggatcatcagctagtaaatgcaggtcttgctgtttctctttcaagatgctggcttcaaagaaccgggaattggaagaagatatttccaaatgaaagcaaggaaactgagattcccgtggcattttgtcgtggtcttgcaacggcacgtcttcatgggagagctcaagttgttcatgatgtagtttcagatccgcaggactcatcagactcgatggaaactccatgcggtgatctgatcttttacttggatggtgctcacagtccacagagcatggaggcttgtggtcgatggttctcttctgcagtcagaggagacaaaagcttatccactgctgtcaatggttacatgagacatggggagtatggtacagacttaaacagagtctccaaacagattcttctgttcaactgcatggaagtgagagaccctcaagtcttacttccaaagctggtcaccacttgcgcttcctcaggcactcatttctcaagagcgctttttgtcccgagcatgtctacttacaacaaagtcatttcgggtgcatcagcgattccttcagatacacgtagaaaggatttgacttggcaattcagactacaaagactatgggagaaatcaatccaagggactgatgcggggcttgaccatacactgaaacccgatggaataaccgccttaccacctcatgatttcctgtgcggagatgcacctcaatgtggtggacctgcagggacaccggtcacttccagtgccgtaatgccttcacttccattgactataaactggctaagagactgcgtacgccgaaacccttcactgaaactagaggttctggtcacaggatcgctacatcttgttggagatgtgctcaggttgctaaagagatgattttatttttcaccaacaaatcttcaaaaagactccttaagagtaatcttacagagcttcaattgttctttacttcactgtttttttctcatagttactatttgattctttggtccattttatctaacatgagaagtgagaaccctccacttaagctgtatttttctgctaaattttaatttatatttcctctcatttctcaaaaaaaaaaaaaaaaaaaaaaa

SEQ ID NO: 7 - DNA, 941 bp, Arabidopsis thaliana
  Clone ID: ARATH-23APR03-CLUSTER1004_1
acctcttattttcatctgcttttgaatttcaaaccttcacataaaaaaaatacttttgaatccgtgtttcattcatcgaatctttttccgataactatggctgaggaaatcaagaatgttcctgaacaggaggtgccaaaggtagcaacagaggaatcatcggcagaggttacagatcgtggattgttcgatttcttgggaaagaagaaagacgaaacaaaaccagaggagactccgatcgcttcagagtttgagcagaaggttcatatttcagagccggagccagaggttaaacacgaaagtcttcttgaaaagcttcaccgaagcgacagttcttctagctcctcaagtgaggaagaaggttcagatggtgagaagaggaagaagaagaaggagaagaagaagccaactactgaagttgaggtaaaggaggaagagaagaaagggtttatggagaagttgaaagagaagcttcctggacacaagaaacctgaagacggttcagccgtcgctgcggcaccggtggttgttcctcctcctgtggaagaagcgcatccagtggagaagaaagggattcttgagaagattaaggagaagcttccaggataccaccctaagaccaccgtagaggaggagaagaaagataaagaataagaagattatcattaaagatattaagaataatgatggttgatttgctttgtttttttttttttttattgtgatgattgatcatcttttgcttttgtgatgtgtaagtttgttggcttttttgttgattacaatttcttattttctcttgtatatggtttttaaaaacaaaagatctcaaggtattttaatggtatgaatattttcatttgattaaaagaaaaaaaaaaaaaaattttatgcaaaaaaaaaaagaacctcgtgcaaaaaaaaaaactcgagggggggcc

SEQ ID NO: 8 - DNA, 1032 bp, Arabidopsis thaliana
  unsure (1)..(1032): unsure at all n locations
  Clone ID: ARATH-23APR03-CLUSTER1005_1
ccgtcttacactgatttaattctcctaccaatctcaacttccgacgtctattcatcatgggtttgaaggaggaatttgaggagcacgctgagaaagtgaatacgctcacggagttgccatccaacgaggatttgctcattctctacggactctacaagcaagccaagtttgggcctgtggacaccagttaatatttttgtctgaatattaacatcctctatttttgcttcttagttcacttttctgtaatgttgttaatatatatatctcacgcgttgtcctcgtcttctccgtcttacactgatttaattctcctaccaatctcaacttccgacgtctattcatcatgggtttgaaggaggaatttgaggagcacgctgagaaagtgaatacgctcacggagttgccatccaacgaggatttgctcattctctacggactctacaagcaagccaagtttgggcctgtggacaccagtcgtcctggaatgttcagcatgaaggagagagccaagtgggatgcttggaaggctgttgaagggaaatcatcggaagaagccatgaatgactatatcactaaggtcaagcaactcttggaagttgctgcttccaaggcttcaacctgatgaatcaaatcctcatctgcagtaactttatcttaagcatcaaaataacattgcataagacttgttcttgctcttgtgtttctatcatatttaagctatctactttgtgacatggtgtgatctcttaaaaatgcttgatattggttaaaacagagaatcatgatgcaaactaaatccataagttatttttggtccgtcctcgataaggtcttagtcaaaacagttgaattcaagatgatacactcgctctcggccccttcacggggggcgcgcgaccctgcgcgcccggtccctcgcgggcccgccgccctttcccaatgcccccgcgtgggccctgcgacaccctcccgtgggcgctgnnggaaggcaatnacntattttttnaanncnnaanttgtaanncnttt

SEQ ID NO: 9 - DNA, 2716 bp, Arabidopsis thaliana
  Clone ID: ARATH-23APR03-CLUSTER100610_1
gagattcaccaatctcgaatccattctctcgccgtctttcaattctccgccatcgaacgaaacacagaatcttcaggatgggacaacactggattcctccgccgtcttctccttcggtggagaagcgattcgatttggatgaatcggttggctggaccttgtttcaacgatgaggctccttcaagctagttcggggacgtagacgctgcattgaaaatgaaaggcagggtttgttgtagatcaaggcttatattatctcggttatctctggtcaagatgtagacacttgtcgtaaattgacgtgctctgagcagtcttgttgaccttgaagaaggcttatggtcgacctcccctccagccccgggatcggaaacgaccatgactatgaaagccatttgctccctatggtggtattctgctagagaaccgggacgtcttactatccgtttgagatggggtatttggtgtttctctgctttgattctccatggcgccgagcagggttctgccttgttgatacttttatcgaccgcgtaaaagatgtactgggagttatctagagagggctcagtggaacgtggagggatgaaacaataaaatgtaatagttgaatcttgcaaatattttgatcatattgtcaaatctctccaccgtataatactttcgtgaagattaacacatcatagattttgaccatacttcgtcagtgcctgctaccccggggaacccttatctcttctcgctaagggcgttgaaggcttcctctcgttgggtctgcccacggaattaaccgggcgcaaggtttttattctcgcttccagggctgccacgccgcaactagggcagactaacgtttccggtggtctgcaatcgcagctaagtagtattatgttgtcacactgcaaccttggaaaaatccctggttttctttggtatcagcaggaattgcgggtcatcgatctctccaacaatatattatccggagtgttccccacttggctgctggaaaataacacagagcttcaggccctgttgttacagaacaactcattcaaaacacttacacttccaagaaccatgcgcaggctgcagattttggacctttcggtgaataatttcaacaatcaactccctaaggatgtcggtttgatacttgcgagcttgagacatttgaatctctcaaacattgagtttctagggaacatgcccttctctatggccaggatggaaaatattgaatttatggacctatcttacaacaacttgtcagggaaattgccaaggaatcttttcacaggttgctactcattgagttggcttaagctctcgcacaacagattcagtggcccgattattcggaaatcgagtgatgagacctctttgagttacgctgatcatggacaataacatgtttacagggaagatccctcgtactctactcaacttaaggatgttgagtgtgatcgacttatcaaacaacttcctcactggtacaattccaaggtggttaggcaatttctttttggaagttctgaggatctccaacaaccgtctacaaggtgccataccaccgtctttgttcaacattccttacctctggctcttggacctttctggaaacttcttgtcgggtagcttacccctgcggtccagctcagattacggttatatattggacttgcacaacaacaatctcactggatctattccagacacgttgtggtacgggctacggttgcttgatctgagaaacaacaaactgtctggaaacattccactgttcaggagcaccccgagcatcagtgttgttctgttgagagagaataacttgacaggaaagattcctgttgagctgtgcggtttaagcaacgtaaggatgttggattttgctcacaatcgattgaatgaatccataccttcgtgtgtcaccaatctatcatttggctcaggaggacatagtaatgctgattcagattggtatccggcgagcttgctctcaaactttatggagatatacaccgaagtatattacgagtctttgattgtgtcagatcggttttctctagactactcggtagattttaatgtccaagttgaatttgcggtgaaacagagatatgacttgtacatgagaggaactcttaaccagatgtttggcctggatctgtcgagcaacgagttaagtggtaatatcccagaagagctaggagatcttaagagagtacgctcgctgaatctctcacgcaattcattatcgggttctatacctggaagcttctccaacctaagaagcatagagagcttggatctttctttcaacaagttgcatggaaccattccctcacaactcacattgttgcaatctcttgtcgtctttaacgtgtcatacaacaatctctcaggtgtgattccgcaaggaaaacagttcaacacctttggtgagaagagttacttaggtaattttcttctctgtggatcacccaccaaaagaagctgtggtggtaccacaatcagctcaggaaaagaatatgaagatgacgatgaaagtggattactcgatattgtggtattgtggtggagcctcgggacgacctacgtaacggttatgatggggtttttggtgtttctctgctttgattctccatggcgccgagcatggttctgccttgttgatacttttatcgaccgcgtaaaagatgtactgggagttatctag

SEQ ID NO: 10 - DNA, 967 bp, Arabidopsis thaliana
  Clone ID: ARATH-23APR03-CLUSTER101244_1
tcaatcccgtcttcaagtatcgccgacgccgcagcacaaaggaggagaagaaggatcaaaggcgcgacaacaatggcgacaggtaaaacagtgaaggatgtctctccacacgagttcgtcaaggcttacgctgcccatctcaagcgttccggcaagattgagctgcctctgtggacagacatcgtcaagactggtaaacttaaggagcttgctccatatgaccctgactggtactacatcagagctggtatgtatatataacatctggtcaaatcttctacatattggatttagcattgtctttatctgttctatttagcttccatggctaggaaggtttacctgaggggtggtcttggagttggtgccttccgtagtatctatggaggaagcaagaggaacggaagccgtcctcctcatttctgcaagagcagtggtggtgttgctcgtcacattcttcagcgtctccgggccctcgaccatggcgctgcttggacaccaagggtggaatggaagatcacatcaagtggtcagagagatctcgaccaagtcgctggaaggatcgcagctgctgtctaaatcatagcgactgatggtcaactccaagtttaaggtttatgtttgagatttagtaatggaatgagttgcatttgatgaaaaccagtagtagaattccctctcatttttgttttgatgagttttcgtttacaaattgcctctctttttattctcagcgacttatggcttatatatttgatttcatcattaaccaaaaaaaaataaaagaatcagctacataagaacataacggggacgaacatactaactgaaatcaagtctaagaaaagaaaacctacaaaaataaaaaaggggggggcgcttttaggggtcccaaatttacgatcccttccttgcccggtggtggtttttttatatggtgccctaaattaaattatttggcctgggt

SEQ ID NO: 11 - DNA, 846 bp, Arabidopsis thaliana
  Clone ID: ARATH-23APR03-CLUSTER101596_1
aattccagtgttgccttgtgggaatcatgcaattataatttttacctctcaacggatttttcccaaattcagactctcacaataaaacccctacaaaatccctaaattccatcgaatttgctcattctcgtctaaagcaagacgaagatgacgactgctgtcaacacagtttctggtgatgaagatcgttcggacaaaaagattcagggtgatattgatgagagtaaggtcaaagcaccaaacatgttcgaacgagctaaagaagagcttgatgctgttatcggagctattcatcaacgcaagagttcaaaggataaaatggaattcaaatcagataaaccagaagatggaaagaaaaaaccgaatatgttgaaaaaggcgagggaagacctcaaatctttattcctgaaggaaaaacctcctcgccatcttcatcatcatcacaaagaaactcatggaaggagtgatgatatcagtgagaacacaccggtggatgaagtgaaggctcctaatgttttggacagagccaaggaagaaatcgaagccgtcatcgacaccatccattccaagaagaaggagaaagacggttctggttcaccttcgcgttctcggtctctctcaccggaaaaggagagagctggattcgcatgctctattggaaaggggttggaaaagatatgttctccttggagtgatgataaaaaggattaatttattcttatgattgatgatcataaaacttgtttgttaattgtcatgatagacttgcttttaagcttcaatcagtttgttgattattattaggtacaaagttgttaaattcgtaagcaaaaaaaaaaaaaaaaa

SEQ ID NO: 12 - DNA, 2066 bp, Arabidopsis thaliana
  Clone ID: ARATH-23APR03-CLUSTER10166_1
gaccataggtcaccaaagactttataaataacccatacattatcatatacatataggcatacaaagtgagagaactctactctagattgtgctaaactcaatttgtattaatgatggatagattttggtcatggagattgtttgttgctctctctctttttctccattctccaatttgttcttctgacaaagctccgaactactccttcatgcgggacgcgacaggaagtcctacaacgtcgtactacgactatatcatcatcggtggtgggactgccgggtgccctctagccgcaacgctgtctcaaaacgccagcgttttgctgctcgaacgcggtgactcaccgtacaataaccccaacatcacgaggctctcggctttcggagccgctctctctgacctgtctgagtcctcaccatctcagcgttttgtatcagaagatggtgtcattaatgcacgtgctcgggttctcggtggcggaagcgctctcaacgccggcttctatacacgtgccggcactaaatacgttaggaacatgggttgggacggagcgctagcgaacgagtcgtaccagtgggttgaagctaaggtggcgtttcagcctccgatggggcggtggcaaacggccgtgagagacggcttattggaggctgggattgtccctaataatggtttcacctatgatcatatcaatggcaccaaatttggcggtactatttttgaccgcaacggcaatagacacaccgccgccgatttgttagagtatgccgatcctaagggtattaccgtccttttgcatgccaccgtccaccggatcttgtttcgtactcgaggtacgaccaagccaatagccaacggagttgtgtaccgagaccggaccggtcaggctcacagagcttacctaaaggaaggcgccttgagtgagatcatcctatcggccggaaccctagggagcccacaacttcttatgctaagtggtgttggcccatcggctcaattacaggcccaaaacatcacggtggtgatggaccagcctcatgtgggtcaaggcatgtatgacaaccctatgaatgccgtgttcgttccttctccagtccccgttgaggtctcactcattgaggttgttgggattaccggggaaggaacatatgtcgaagccgccggtggtgaaaattttggcggaggtggtggtggttctagtggatcgtcctccactagagactactatgcaatgttttcaccaagggcaacattattagagtcaaattcaatgaccaaattatcatcagcccaaccttttcaaggaggcttccttttagagaaagtaatgggcccattatcaacgggtcatttagagctcaagacccgaaacccaaaagataacccgattgtgactttcaactatttccaacatcctgacgacctaaaacgttgtgttcgaggaatccaaaccatagagagagtcgtgcaatctaaagctttttcgaggtataagtacgcagatgtgtcatttgagtatttacttaacctcacggcgagtactcctgtcaatctaaggccgcctcgcagtggtcctggagcctcgttgcctccatccgcagaggaattttgccaacatacagttacaaccatttggcattaccatggaggatgcgttgtgggcagagtggtcgatggggattataaagttattggtatcgaccggcttagagtcattgatatgtcgaccgttggttattgtcccgggacaaatcctcaagccacggttatgatgcttggcaggtatatgggtgtgaagatcttgagagagagactcaccaagaagtagggttttgaatcggatcaggggttttgggaaaacgttatattaaaaatgaaatgaatcaagatattactaatcgatgttattaatagctgaatatgtattgttcttggtaatttctgtttggtacttattattagaccaaactgagatgtatacggaaatatatgtatagactcattcccaattttcaaaactctgttccaaattttggttcaagacctttaatttgttttcttcgcc

SEQ ID NO: 13 - DNA, 2409 bp, Arabidopsis thaliana
  unsure (1)..(2409): unsure at all n locations
  Clone ID: ARATH-23APR03-CLUSTER10182_1
gagagagagagaactagtccccccccccccccccggtcgacttttttttttttttttgnccnaaatcgttcgagaaacccaaaatccaatccctggtctaattcatcgatgcccaaaccaaaattgaaaactttatcctcaagagattaggaaaatctcattcattatgttaaaaatcccttttggggattatatttatcagagaaaaagattcgaattgagtgtcttcatgatttgggcaaagctaatctgatcttgcggagacaacaacaaaaattgtctgttttttttaccaattcgtaacggaaagtgttcaaagttccaatctttggatcctccgagcaaaatctctatcttttcaatggcggatcatcaagaagacgaagatttgaaattggctcttaagatgagtatgcaatacaatcctcctgagccaaaacggagcaaacccattgaagaagaagaaactggatccggatctcaatctggtggtgaatcaccggaggcgaaatctcgtcggttgcagagagagcttatggctgctgctgctgagaagcgtatggttttgtttcctaagagtccttctcctgttaacaaagctagggttttgccaattagtgttgttggtggtgataaggatgaggaagttgtgggatcttgtttggggaaggagttgtctgtggaagagtctgatcagttgttttcgattgtgtttgggaatgaggtttcgaaaagtgttcttgctcaatggactaatcaaggcataagatttagccctgatcctgaaactactataggattagtgcagcatgaaggtgggccctgcggtgttttagcagcactacaagcatttgttcttaaataccttctttactttccgggtgacagagtagcttccccctgtatgggtgtctggacattatctaaagatcgtcatgttgtgtctgactccttctcttctgtaactgaagaagcaaaaacaaaggcccttgtcagaagtatgtgtgagattctatttatgtgtggagacaacaaccgcgctgtaatagcaagtttcactaattttgaggattccagtagtaatcaaaaagatgaggcaatggctggtgggctccccattgaatctgcttcagatttgcagaagatcttaaggttcgagacattcacaactcaagccagtgcccaaaataagctagaaggcacaataactgcttttcaaagtcgcatgggtgctttgctgttcctaatttctgctttactctcccgaggactggattcagttcaagccgacagggatgatccaaacctccccctagtaactgcaccatttggacatgcctcccaggaaattgtaaacctgctgctgtgtggagaagcggttcctaatgtatttgatggacggatggatcttggaggcggcatgtttctgaaaggcatatctaagaatgtagatgtgggcttcctcacgttgctcgagtctctcaacttctgcaaagtcggtcagaatctcaaatgtcccaaatggccaatatgggttattggcagtgagtctcattacaccgtcttgtttgcacttgacccatccgtccaagaagaaaacgaacttgagctgagagagtctcagataagaagagctttcgatgcaagagaccaaagcggaggaggaggtttcataactgtggaggcctttcaccaagttgctcaggaaacaaacatcagactcccaatcaagaagctcgacgacatctgcgccacgggtttcatcgtgtggagcgagttatggcaagttatcttggaactagaccaaaatttgggagggataaaagatgcaacaggactgatgggaaagaaagtgtttgatatctatcacttcaacggaattgccaagtccgatataaacggtggtggtcaagcaatggctgtggaaggtgggatggttcctatgcaaaggccaaggctgacaaaactaaacgtatcggttcctccaaaatggacaccagaagagtacatgacatgtgcactgccgccgagcagctctgagaaagactcagaagtgaatcagccaaaaccggtccaacatgcaccactggtggattgtatcagaactcggtggtcgcgtgccgcttgtagctggtctggagatcctccaagtatagtctgaagaatgttgtattatgagaaagcttgagcgtttattctggctcattggattctaaagaaagaaaacggaaactgctgatctgatttggcggttaacacgcgtctgaactttctttgcgttgtccgtttttttcatgttgtgtattgatgtagaatttttgttatctattattgaacattattgagacaaatgaatatttcaattgttggataaaattgctttcaataacatcgctcatattctgatct

SEQ ID NO: 14 - DNA, 1235 bp, Arabidopsis thaliana
  unsure (1)..(1235): unsure at all n locations
  Clone ID: ARATH-23APR03-CLUSTER10189_1
cgntcctntccnnnnnnnnngaccnaccttntctncncnnaccgaccnannanncngntncnntnntcnnantcnccacnggacncccggncncccncngtccgtnctcgtcccagcgnctcgncggtcggcgngacgccngntaatccncngcanggnaccgnacgattctcccgccaccacaccacagctttttgcttcatctccttcttactctctgtgtctctaactcctcgtgcactcagacatcacagatatggcttgtgttcggtcgattggttctttaacttctgtcaaccattctcaacgaaatgttcctcgctcaggcattgtcttatcttcatgctctgttcttcccatcaaaagctcatctttcactggatcccctgtttctctcccgcgggctcaaccatcatcccgaacagctctaagaccgatgaaacccgtctctatcacgatgatggtaaagccggcgctccaattcatccaagggacggatgagatgacaatccctgatgttaagctgactcgatcaagagacggaagcaacggaatggcactgttctctttcgaccaaccatccgttttcgactcgagcggtgaagtcggagagattacaggattgtacatgattgatgaggaaggtgtgattcagtcgacggatgtgaacgcgagattcgtgaatgggaaaccggaagggattgtggcgaagcacataatgcgatcgccgaaagaatgggacaggttcatgaggtttatggagcgatactcggaccagaatggcttgcagtttgttaagaagcaatgaggttggagagaattttcaatgagcaaaacaaaatgtgtatgttacattaaattttttcactcttttgatttataatcttgtactctcctagttttgatctttacttgagtttcaacttacaatggcaaactaaacaattgttctaaataaatttggtttaatctaaacacacccacgaattcgctaaaggtatgatcataatttcattatgcgttcccgtgnggtggncngagggggnaccacctcgcgccgcgtcgcctacntgcaggcgcgttgaccatcaancgcaactncgtngaagcgctgcggaaccnacgcccagtacgcgatnggcnagacagngnagccggnnnagnantgngagtnncgtnngntgaatagcgngaagaantgcngcgggtagagaggcngagggggnnnagnttcg

SEQ ID NO: 15 - DNA, 2355 bp, Arabidopsis thaliana
  Clone ID: ARATH-23APR03-CLUSTER10194_1
cgaaggagatttacacttatcacatcgagactctttgatcggagtttcccaaaatccccgatggcgaaggaaactccggcgtcgtcgtcgatgccttctggtctcaaagcctacacggttcctatcttcctcttcgtcctcgctatgttcttccagcttttccttcttcctcgttcctttcctccttctcattacgacgttttgggtgtaaagatgtacagctcagtggatgacgtgaaagatgcgtatcagactgttgcttctaagtgggattcgggttcaggagtttctcttccagctgattttgttaagatacaatacgcctatgagctgttaacaaatctagtatggaaaagggactatgacttatacgccattgatgaatcagtacatattatagaggaacttgaaaaacaatatgctgtggaagattttgcaaaaataaaacttcccctactggaagttgtttcttatgagcctgaacgtgaaggttttatgtcaataacatctcaagactttgcgtccaagttccaagattctaagccatggctcattcaggtgtattcttctggtagcaacagctctgcccagttcgctacggtttggagaaggattgttgctttgttggatggggttgctaaccatgcgatgttagagcttggcgatgttcaacttgtgacctaccttgctgagaaaaaaccaacaggacaagtatttttcagaaaaggccttccttcaatcttctctttccccccaaattgtaaaaccgcagactgcctcatcaggtttgaaggagagctgtcagcagatgcaattaccgattggttcgcgaccactgtactgggtttacctagagtattctatcacacaaaagaaacactggtatctaagttcctctccaaagttccacctaataaggtgaaagtcattttattctcacaaacaggagagcgagctactcctattgttcgccaggctgccaaagattattggaattttgcctctctatctcacgtgctttggagagaagaggatgcatctttctggtggaatgcgttggaggtagaatctgcacctgccattgtgattatgaaggatcctggttcaaaacctgttgtttatcatggatctggcaaccgtacatggttcctggacattttggagcagaacaagcaattactgcttcctcaactaagaagcacaacatcaatggaacttggttgtgatgcacggggatactctcgagctggttatgataaagtgacgtggtactgtgccatccttgttggaagacaaagcgttgaactcaataagatgagggaaaccatgtgcagggtacaagatgctttgtcaaagtatgacgattcagatgacgcttccaaggatccatcaataacgccagcagcttctgcacacaaaagcaagcgactctcatttgcgtggctcgacggagaagcgcagaataaatactgtttcttctatgttcaatcggaaaccagctatgacacgtgtggaactaggagggcaccgattgatgtccctaggatattgatcgttcggtaccatagaaatgctacagaaactgctaatgcagagcaaaaatcaagtaaatggcccaaaactgtatggcaatctgaagctgacgatgttgatcctgctgcacagcttgttgttagttatgacggaacagctgaaattccccagatcattaagtggctatcgaaaatggttgatgatggtgacaacagaaacctacctttctatagagctaaaactccagaacttgttccagaaagcgctgaaccgatgagatcaggagtcccaaagaccgtaaaagcaactcagaaattgttgagcttatggaacagaatcaaagactacctagctgatccaagaatggggcctacattgcttctaggagcgttgttatctgcaggcaatgtttggtggatgagaagccgatcatcaacacaacaacctgctcagacaaatcagccatcaccaaatcaaccagccgataacgtggaggagaagaagaagaaagagagaaagagagaacaacgaaggaggaatgcaaaggaagaagaggttcctgcttcgatcactgataacgaacctaaagatgctgtccaaattctgtcttcaggttccgattctgactaatatattaagccttaggattcttctgactttctttttttttgacatttacgttttttattttttcttttctttgtgaaagtcataggtttcaattttaagttactaaatagagtaatttacctttatcaaaaaaaaaaaaaaaaaatgatcgatccccttttgcttatacagtaccacattttagatttcctt

SEQ ID NO: 16 - DNA, 2363 bp, Arabidopsis thaliana
  Clone ID: ARATH-23APR03-CLUSTER10199_1
attttttggcttcaatttttgcgttttctctgcaactcgccgtcaagggtagaagaattaggggttcctgttcttaactgcttgaagatgacgtcttatggagatagactgaagtcgacctccattaatggagttaagttatacaatgtttcttctgctcccaatgttcctacttggcttaatcctaagaagcaacgagctctccgcaaaaatcctcattatatgcaaagagtggagctgattcaggagttgaagtttgagactgccactactagaatcaaagcgactccagacggagagtatctgattgcttcaggcatatatccaccacaggtaaaagtttatgagctaaatcagcttgcattgaagtttgagaggcatttggactcggaaatagttgatttcgagatattggatgatgacttctcaaagcttgccttcttatgtgctgatcgttctattaatttacacgccaaatacgggaaacaccacactttacgaattccaaggatggggagagatatgacatatgattcctggtcttgtgatcttctttgcgctgcttcctcacctgatctatatagaatcaatttggagcagggaagatttctttctcctctcagcactcaatccccagcgcttaatgtcgtttctcgaagcaacctccatggattagttgcttgtggtggtgaggatggtgctgtggaattttttgatatgagaatgaaatcatctgctgctagaattaacgcggtcacacatggtggtgatgctgctgcggaggttactgctatagagtttgatgacagtgaaggtcttcaagtagctgtcgggagtagcgcgggaaaggtattcatatacgacttgcgtacttcaactcccataagagtgaaggatcacatgtacgagagcccaattttgaatattaagtggcaacggactcttaatactcaacaacctaagttgattactaccgacaaacacattgttagaatatgggatccaaacacgggagaaggtatgaccagcattgaaccgactcaaggaggaataaacgacatttgtgtgttccgtggaagcggacttatgcttcttgctttagactctagcctaatcccatcttacttcatacctgaactcggtcctgcccccaaatggtgttctcctcttgaaaatctaacggaagagttggaggaaagtgcacagacaactatttatgataattacaaatttttggcaatggaagatctggagaagttgcagctaactcatttgattggaacagatcttttgaaagcatctatgcatggatattttattaattaccatttgtacaaaaaggctttagcagtgattgaaccttttgcatttgatgattacttagaacgtaggaagcaagagaagttagaagagcagcgtacgcagagaatcacaaaaaagagacggttgccaaaggttaaccgagaccttgcagcaaggcttcatggggacgaatcagaggaggaaaataaaactgccgaggatggggaggccaccaagaaagtgctgaaaaagaagaaacccatacttactgacgagcatttcgtagatggtcggtttggttcgatgttccaaaatccggacttccaaattgataaggactcatatgaatatggtgtcctacaccctgttgcttcttcgaagaagcaaccttctctgttagatgaacactttgaagctgtatcagatgatgacgagaacagtgattctgatgcatcacagccttcagatgacgaggccgacgatggagacgcaactaggccaagcaagaaagcgagaactccgaagttgtatgaagtgaaagatgagcggcatgccgcagcttatcacaaccgcacttcactggctaaagaagatagtcttcctatgggcgagcgtgtcaaggctatagagaaccggcgtggcaactttggaggctcgaaagatatcaaattcggtcctggaggatcacgggagttttctttcaaggcgagagggtcatcaaagtacaaagaagatagagacgatgagtatgaagatgggcaaagaaacaagaggagaggagttcagtctcttggactgaaatcaacaaatattagaggcggtttcagaggtagaggaggtggtggttttagagggagaggaggcggcggttcccggggaaaaggtggccgtggtggtgggcgtggaagaggccggcaatgataaatgtagcttttcaggggctttattagatttgaaaaatgtgtcacctactattgagaatcttgaaacttaattgatcacatatacaattttggaatatttttgacctggtcttcaatcagcacaacagaatttgctta

SEQ ID NO: 17 - DNA, 6377 bp, Arabidopsis thaliana
  Clone ID: ARATH-23APR03-CLUSTER102017_1
gcccggccagaggcttagttctgggccagctcttgcccctcctggggccgccctgcccctgctcctacgtcactctctctcaacgggttcgtgatcctcaactgaaggattacgctgacggcgttccgctccacccctcacgccatattcggttcgcagaggactatacggaggagcaagccaccgcgcacatacggcggctcctcgacatcgtcgcttgcaccaccgcatttggtccgtcgaaacccccggtgtctcgtacgcttcctaaggattctgaaaagaaggagtcaggctcgacggatggagattctccgaccgaaaaagatgccggtgattcaaattccggtctcagccctaaacctaaggaatcagagaagaaatccgtcggcgcatgtgaggctcagtcagcggtaaagggagcaaattgaagttacaagttgaagacgcaactgtctgttactgaagtattaacattgaggctaaaggaatgcggagacattttggctccattgatgaggttaaaggtaaacaatcatcatagtcgagaaaagcatttttacatgtgaatgttttgtgttgtagcgcaggaccaaggctcgtcactcctgctttaacaacttttctcctgctttcagtttttggtttcatagctgaaaactagatatattcaactccttaataaaaaatttgtccctttgtttttcaagataagaaaggaattaaaaaaaaaaaaaaactcgagggggggcccggtccctgtccacaataagtttggcaaccttccttatggtttccgggcaaacacttgggtagttcctccggttgttgcagatagtccatctacttttccgtcacttccagtggaggatgagacatggggaggggatggtggtggggtaggccggtctggaaagtatgacaaaagaaagtgggctaaggaatttgccattttggcagcaatgccttgtaaaacacctgaagagagacaggttcgagataggaaggcctttctactccacagtttatttgtcgacgtttcagttttcaaagcagtggaaataataaaaaagatagtagagaataatcaatgctcacttaaggatcctgctgcattgggtttccatgaagaaagaataggtgatttgatcgtaagggtggctagagatgatcctgacgccagtgccaagcttgaccggaagagcgatgggacccaggttctggagatttctcaggaagagcttgctcaaaggaatttgcttaaagggatcactgctgatgagagtgcgacagttcatgtaattttgctagcttcagctgcttttcttagctttgctcttactggaattgttactgagatttaccttgatcatataggatacgtctactttgggggtggtggttccattgtaaaggttgcttctgaatttaagttgaatgatggccatatcctacaggatattgacattgaagaccaatccgaaggaggtgcaaatgcactgaatgtaaatagcttgagaactctattgcacaagtcgtcaacgccttctagcttagcacagagatcaccaaatgcagactcggaacaaatacgtgtggctaagtctcttgtgaggaaagtaatcgaggatagtttgaagaaattggagattgagccctcaagatatagtaagccgataaggtgggaattaggagcctgttgggtgcaacatctgcaaaatcaagcttcaagtaaaagtgagtctaagaaaactgaagatcccaagcctgaaccagctgtcaagggtcttggaaagcaaggtgcactgctgaaggagataaaaaggaagatcgatgtgaaagctaacaagactgaacagggcaaagaggcccctgctaatgacactgacaatacatcagagactgaggatcaaaaggaactcgagaaacaaaacgaggaaatagaaaagatgtggaaagaactggtgacagaaactgcatatcagcgccttaaagaatcagaaactggtttccatctcaagtcacccaaagagctgattgaaatggcccgcaaatattacactgacactgctcttccaaaactgggaaaatcctcagttcctcataaatttagacttgatatgttgcaggtggcagactttggatctcttgaactctcacccgtcgatggaagaactctgacagactttatgcacaccagaggcttgcaaatgcattccttgggaagagtggtcgagctggctgaaaagcttcctcatgtgcaatccctctgtgttcggacgcgtggggttcgggcgtacaagcatatactgcaggctgttgtagcagctgttgaaaacaccgctgatgtggccacctcaatagcaacatgcttaaatgtcctattggggacaccgtctgacactgagagtgtatacgatgaaaagattaagtggacctgggtggaaacgttcatttccaagaggtttgggtgggattggaagcatgaaggctgccaggaactgagaaaattttccattcttagaggactgtcacacaaggttggactggagcttgttcctaaagactatgagatggacacgtcttatccttttaagaagtttgatattatcagtatggttcctgtgtataagcacgtagcatgttcatccgcagatgggcgcactttgttggaatcatccaaaacctccttagataaaggcaaactggaggatgctgtcaattatggcaccaaggcattggccaagcttgtagctgtgtgcggcccatatcatagaatgaccgctggagcgtatagtcttctcgctgttgtgctgtaccatactggggattttaaccaggctaccatttatcagcagaaagcactcgacataaatgaaagggaacttggacttgatcacccagacacaatgaaaagctacggcgacctggctgtcttctattatcgtcttcagcacacagagttagccttgaagtatgtcaaccgtgccttgtatcttttgcatctaacatgtggaccatcacatccaaatacagctgccacttatataaacgtagcaatgatggaagaaggtatgaagaatgcccatgtggctttaagataccttcatgaagcattgaaatgtaaccagagactacttggagctgatcatatccagactgctgcaagctaccatgccattgctattgctctttctctgatggacgcatactccttgagcgttcaacatgagcagaccactctacagattctacaagcaaaactaggccctgaggatcttcggacacaggatgcggctgcgtggcttgaatatttcgagtccaaagctctggaacagcaagaagctgcacgaaatggtactcccaagccagacgcctctatttccagcaaaggccatctcagtgtatcagacctgttggattatataaccccggattctggtattaaagcaagggacgctcaaaggaaagctcgcccaaaggtcaagggaaagccaggtcaaagtccaggaccagtgtcagaagaaaatcagaaagatgatgaaattttgagtccggctcatctcactggggagagttcaagtgataaagagaacaaatccgaaacaaaatctgaagaaaaaaaggttgaaaattttgatttggaacaatcaaaacctcaagaccagctgaagctggttaagcccgaagccacggtccaagaagatgatgattctgacgaaggatggcaagaagctgtccccaaaaatcgtttttcttctgggcgtagaacacggcccagcctggcaaagctgaacaccaacttcatgaacatgccccagcagccatcaagaagcagaggaaaatccaccaatttcacatccccaagaaccagttctaatgagctttcaatttctgttgctggttccacttcttccccagcctcgaagatgtttgtaaagagcccattgaacaaaaagcaaaacaattccagtgtggtgggagaaagaccagtcaacgataaatcagccctggcaagctcggcttgcactgaacagatcaacaagccaactccgatgttgagtcctgtgagtgtcaaagctggaaaactgttttcctataaggaggttgcactggctccccctggaacgattgtaaaaatagttgcagagcagttgccagaagaaacaaaggccccacagaatttggatgcggcaaaaattgcagtagatggtcctgaaaaagttaatgctcaggatgctgagagcgagaataagcatgtggctacagaaacggaagcggaaaacactgattgcaatgaacaaggaagagttgttgttggtggatcggagttgactagttctccaaaggaaatcaagaatgtggaggtcgaaaaggcagctgaaaaagcatttccaatagaaacagccgtatcaaatgcaagaccaggaaaatctaagagtgcacaaatggctgaggattcagatacatgtctcttgaataagtcaccaacagcaaatgattcaaatggcagtgaatcagttattggagtgaagcttcaaaaggatttatgtgatgctgaactgaaaacagtagatggtgaaaccgaaaatctgcccaatggagactcaagcccaaagtcatcagtagctgcagatggagaaaagcaagatgcatgtgaggcacaaaaagagatgagcaagaagctctctgcttctgcaccgccgtataccccaacaaccattccaatatttggatcaattgcagttccaggattcaaagaccacggtggaatcctcccctctccattgaatatgccaccaatgcttcctattaaccatgtccgcagatcaactcctcatcagtctgtaacagctcgagttccttatgggcctagactctctggtggtggttacaaccgatctggaaacagggttccgcgtaacaaaccaagcttccccaatagcaccgagtccaatggtgaggctaatcaattcaatggcccaagaataatgaacccccatgctgctgagttcataccgagtcaaccttgggtttctaatgggtatccagtgtcaccaaatggctatttagcatccccaaatggtgcagaaataacacagaatgggtaccctttgtcaccagtagcaggtggatatccgtgtaacatgtccgttacacagcctcaggatggacttgtttcagaggaattacctggtgctggaagctctgaggagaagagcggaagcgaagaagaaagcaacaacgacaaaaatgctggagaggatgacgaagccgttggacaagaaactacagatacacctgaaaatggacattcgacagtaggtgaagtggaaaccacatcacatgagacttgtgatgagaaaaatggagaacgacaaggaggcaagtgctggggagattacagcgataatgaaatcgagcaaattgaagttacaagttgaagacgcaactgtctgttactgaagtattaacattgaggctaaaggaatgcggagacattttggctccattgatgaggttaaaggtaaacaatcatcatagtcgagaaaagcatttttacatgtgaatgttttgtgttgtagcgcaggaccaaggctcgtcactcctgctttaacaacttttctcctgctttcagtttttggtttcatagctgaaaactagatatattcaactccttaataaaagatttgtccctttgtttttctttcgatttactatggagtatagacatcaatagtaagatacagctcatggccaccaaaaaggagaaatccctgaatgttcattccctgtatttgatgtcttgagggttagattttgtaaaaatctttactgatgagaacatgatcaacttgcaagaaaactatgggtctgtgctcaaacacagagagtaaatacattatgaggccttgtgttcagtaacaatggttccaacaggtttgacagcatctttaatcacattgtagtaatactaagaagaaggctgcttctcctgcaacattctggaatgttgttctaagtattctttgctgttcatctccgttaatctgctaatggggcggtctttagcaaaaccaagctcgttgtccacgcaaaggtcgggatcatcactcttccttgatcttgaagaggttctaggtgctatttgctgtgcatcaaagattgtcactattctctccagcagttctagagggctaccttctgccgtgcatagaagcctggccttgttctcatacattacatcaaccagtgtcacaaagcggtaagctgcagtcctattatggagcccgaagaagggtacaccttccagagccaaagtatgaaatttcttgaataatccgagataatcggctgcgcctaggggtctatcacac

SEQ ID NO: 18 - DNA, 1707 bp, Arabidopsis thaliana
  Clone ID: ARATH-23APR03-CLUSTER102079_1
gaatgatagtttaacaaaaaaaataagaacttaagaaaaaaaagcttcgttctctcccagacacggtaatcaagatatcttctgtaatcatgcttaccggcgccggtgagactcatgttcgccggcgtcgggacctgcaaaatcttcttagtctgtttcagtctttcttaagcttctggtcttggtttttctctccgttaagttcttctctctcgcaaaatccaaaactttcctttcctttggtcttcttctctgagggtcttctttgcgacggaagagtgaatgtttactctacaagccctgccccgaatcataactcagacgcagatccgcctttgaacccgacaagagaagaatcgcacttctccatcatcgccctttccaaatttctagagcagtttttcatcgacacatcctttggctccagatctgccgtattagcagtaacgcctttagttccttctcaccggatttcgttgatggcaagagattctcttggaccatcagttgtgccttttccggtgagaacgtcgacgacacacgacgagcttcattgctggcaggtgtttttcccaggtgcttcaccgtcgaccatcacttccgatctttacgacggcggcgctctcccttcccttctctcaaccgtaacaactctagggtttggtgggatgggcctcaattttcttgacggcccagttgcaacaatccatgcttttggtggtttgggcctctctcaattcggcggcccaaaaactctaaacctaatttggcccatatccaggtttgctttactcagagttttgtcgactctctctctgaaccattgcttcacgataacggatggtcgtggactccattcaatcgttggaaccttagtcttagaggatccttgcaatcacaatactagaaacctgttacatagagtagattggttgccaacagatgtaagtttagtcttgaagcttagtggattagttttgatctcgaaccataggctatgtgatgcggctcacgcctttgtttttatatgtgatcatataatgagtctgaaccttcccactatcatgcttactcatcccgtcccatgtcgtttgttggacgatgcatcacaaccctcttggaattgttggctaaaactgcttcggcctgctctatcaaccctcttctcaagccccatgaatccggtttatctctgtcatttgattagaagattatctgtgctttggacttgtaatctttgttgccgattgcattatgtttattcctctaaggagataccttccctgaaaccttactcctctaaggagatatcctctttgaaacttgaacccggagaaaagtctcacaccgcagcctcctctttggagcatttcaacaaaagcttttatgcgtcgatcgcacgagcttactatgatcacaagttgatccgagatttctcgaagctagtcttcaagcttgaatctctgcaggtcccaatagatctaccatcccttgcaaccttctcgaagttatgcattttggaagactcatggaatctttatctctatctttcatgtaatgctttaattttactttgtataaacccacctctcttgaggagttagattaatgaaagcttcctttgcccaaaaaaaaaaaaaagattaacaaaaatgagaacaatgtgggcggccgctctagaggtccggccgctctaggagggtgcaa

SEQ ID NO: 19 - DNA, 2529 bp, Arabidopsis thaliana
  Clone ID: ARATH-23APR03-CLUSTER10207_1
acctccaagtcttcgtcagtcgtcaccgtgtggtaagtgtaaatccttaagtctggaaaattagggtttttgggacttgggtgtgtttccatagcagagatatggggaagaagaaaggaaacaaagcagcagcttcaacagatgattttttacaaaccctcgaagatttcaccagcaaagagaattgggacaaattcttcactctcagaggcaacgacgactctttcgagtggtatgctgagtggcctcagctccatgactcgcttttacctctcctccaagattcttcatcttcttcttctgattcgcttcagattctggttcctggatgtggaaactcccgccttactgagcatttgtacgatgctggattccgtgacatcactaatgttgacttctccaaagttgttatctccgatatgcttcgtcggaacattcggactcggcctgaactgcgttggcgagttatggatataacaaagatgcagttggctgatgagtcttttgatacggttctagataaaggtgctcttgatgctttgatggagccagaagttggtaccaagctgggaaatcaatacttatcagaggccaagcgggttttgaaacctggggggaagtttatttgtctaacgttggcggagtctcatgtcttagcattgcttttttcaagatttcgttttggttggaagatgaatgttcattcaattgctcaaaaacgctcgaagcttaagacatatatggtggtggctgaaaaggaaaattccgttttgttgcatgagataacctctgctttcgaacttgtatctcttggccgcaatgatagtcagggttctggcatgcgtgaagccgtcgagagcgagaacaaaatacgtagagactgcaataatggctcagacttattgtactcgcatgaagatttgaaacttggtattaaaggagatttggcagagcttactgaaggtcgccgtataaaatttactttgggtggccaaggaagcaatttcagttatagggccgtgcttcttgatgctcagaaacaaactgagccatttgtatattattgtggtgtttttcttgtccccaagactcgtgctcatgagtggctgttctgttcagaagaaggacagtggcaggttgtcgagagttctcaggccgctcgtctcataatggtttttctcgacagtagccatagtggagccaccatggaggatatccagaatgatttatctccaatggtgacacaactagctcccagaaatgatgatgaagctcgcattccgtatatgatggcaagtgatgggataaaaaagcgtgatactgtccacgaggttacatctcctatgactgggaaagtggttgttgaagatgtggtttatgaaagcgctcctagtaatttagaagacttgtctacttctagtgatttggcatttcgacgacttgtattcaaaaggactgagggtttgatacagtctgaagctttgcttgtagaggatggtgagattcttgaacagtctcagaaagaaaaaactaaaaatgtttcccaatcgaagcgaaagggaaataaaaagcaaaaccaagaaccgagcaggcctcttatgagggtctctcatgattatctggctagctcttaccacactggaattatttctggattcacattggtatcttcctacttgaagaaggctgagtcatgcggaacgatggttaagactgttgtaattggtcttggagcaggattacttcccatgttcctccatggatgcttgccatttttcagtattgaggcggttgagcttgacccagtaatgcttagtgttggcaaggattactttggtttcacacaaaatgatcgcttgaaggtgcatattgctgatgggatcaaattcattagagatataacaaactctgaagcttcgtctgaggaatcgtcaaacattggctcaaatggagattcaaccactcacaatacacaaggtggaatttgtcctgacattttaattatagatgtggattcagcagattcaagcggcggattaacctgccctgcatctgattttatcgaagagacatttcttctttcggttaagcaagctctccctcagcacggtcttttcatagtgaatttggtcacgagatcacagtccgtcaaagatatggtagtatcaagaatgaaaaaggttttcgatcatttatttggcctgcaactagaagaggaagatgacgtaaacgtagtgctctttgggctttgctctgaatctgtaatcagcgagaacgatattccagaatctgcagttatactggagggattgctcaagtgccagagattggaaacgaagcaaagcatcatagacgctacaaagaagctgaaatgctggaaataaaaacattctttattatttcgttttaaaaagacgtgtgagatatatttctgttataagttaagattgaaatttttgagactatattatatacaatacacctagtttcgtccgaaaaaaaaaaaaaaaataagcgtggagttttttt

SEQ ID NO: 20 - DNA, 9286 bp, Arabidopsis thaliana
  Clone ID: ARATH-23APR03-CLUSTER102107_1
atggaagacgatgatgaaagaaagctccctgaagctgatatagctaatcctttgcacaataggatagaggcatttgatacgactttgcaagggatcagttcagctgatagagcctttaaggatgatgattttgaacaagtttctctgggagatcaggaaaaggctgcgaatgaatctcagggtgaccttcaggaacctggaagcttttcaaattctgatcatgggaggtcttcatttggtggcactgaagtagttacttatcaattatccgggactcaggagatgtatgatctcatgcctatggacgatgtgcaaagtgaccgactttctagccctggacctgagagagaggcagcttattccatgcagcagtccctttctgaaactagtctggattctgtccaccatccagaatctggatattcccctgttcattccccgcagaagcccaagccaaaggccactgttccaaatgtttctccagagctactgcatcttgtggattcagccatcatggggaagcctgaaagcttagacaaactaaagaatgttgtatgtggtattgagaattttggctgtggagaggagtcagaggccactgctttccttgttgttgattcacttattgccaccatgggtggagttgagagttttgaagaggatgaagatagcaaccctcctagtgtcatgttaaattcccgtgctgctattgtttctggggagcttattccttggcttcctggtttaggtgataacgtaaattttatgtcccccaggactcgcatggttcggggtttgcttgttattttacggtcatgcacgagaaatagagctatgtgttccacggcagggttattaggagttttgttgcgatcagtggaagcgataatttccaaggacgttgatatgaaatggaatgctgctgctattttgctactatgtattcaacatttagccgggcactcccttagtgtcgatgatttacacaggtggcttcaagttataaaagccgcaattacaacagcctggtcaagtccgttgatgcttgctttggagaaggcaatgagtggaaaggaatcaagggggcctgcttgtacttttgaatttgatggtgaaagctctgggttacttggtcccggagaaagtcgttggccctttaccaatggctacgcatttgcaacatggatctatattgaatcatttgctgacacattaaatgctgcaactgcggcagctgcaattgctgctgccgcagcagccaagtcagggaaaacatccgcaatgtcagctgcagcggctgcgagtgcgcttgctggtgaaggcactgctcatatgccacgtttgttcagctttttgtccgctgataatcagggaatagaagcatatttccacgctcaatttctggtggttgagagtggtagtgggaaaggaagaaagtcttcgctgcattttactcatgcatttaagcctcaatgttggtattttattggtcttgagcatagctgcaagcaaggacttctggggaaagcagagagtgaactacgattatatattgatggatccttgtatgaaagtcgtccttttgattttcctcgtatatccaagcccctttctttctgttgcattggcacaaatcctcctcctactatggctggtctacaacgtcgccgtcgtcaatgtcctttgtttgcagagatgggaccagtttatatatttaaggaaccgattggtcctgagagaatggcgcgtttggcgtctagaggtggagatgttttgccttgttttggcaatggggcaggccttccttggctagctacaaatgactatgtacgtaataaggcagaagaaagtagtattttggatgcagatattggaggatatacccacctgctttaccacccttgtctgctaagtgggagattttgtccagatgcttcactttctggagcagcaggcactctaaggcgaccagctgaggtccttggacaagtccatgttgcaacgagaatgaagccagtggagtctttctgggccttagcttatggaggacccatgtccctgcttcctttgaccgtaagcagtgtgcataaagatagcttggagccatgtcttggaaatcttccactgtctttgtccacagttacacttgctgcacctgtatttagaattatgtcagtcgctattcaacatcctgggaacaatgaagagttgtgtcgtactcagggacccgagattcttgctagaattctgagttatcttctacactcacttgcatcccttgacaggaagcatgatggagtaggagaagaggagctagttgctgccattgtttcgctttgccaatctcagaagatcaatcatgttctcaaagtgcagctctttcgtacgcttttattagatttgaaaatatggagcctgtgcaattatggactccaaaagaagctattgtcatcccttcaagatatggttttcactgaagcaacagctatgagggatgccgaagctattcagttgcttctagatggctgtcgaagatgctattggatgatttctgagaaggattctgagaccacttttcctcttgatgggaatacgcgtcaaatgggggaactcaatgctctgattgatgaacttctggtgattattgaacttctaatgggagcagcatctccttctttagctgctgatgacctccgtcgattacttggtttcataattgacagcccacagccaaatcaggttgcgagggtattacaccttatgtataggttggttgtacagccgaatgctgcaagagctcagatgtttgcagaggtatttataacgtctggtggtatagaaacacttcttgttctgctgcagagagaagctaaaactggtgaggataatgttttagctatgggtaggagtggaaaaaggtcatcgactgatccaagtgaaaagagtccgtacaacgagtctggttcggtaaaacagttggattccaatccacacgataatgagattggctttgaccttcctggtcctgatggaaattctgttgaggatgataatgttgggtctctgaatgtaccagagtcagttcgacaagaaaaggagcatggttccacacctgtcgtttgtgatagtgactcagtttccatctccaattccataaatactgagagactatcagctgaaattggtggtataagtctttcaataagtgctgatagtgcaagaaataacgtgtacaatgttgacaatagcgatgctgttgtggttgggatcatcagattgattggtgctttaatttctagtgggcacctaacatttgatttcgatgcccgttctgatgtgacaagtaacatcctgggtagtgggctccatgaaaatggtggaacaatgtttgatgataaagtcgcattgcttctatttgctttgctgaaggcatttcaagctgctccaaacaggctgatgactgacaacgtctatacaactttgcttggggcctcgatcaatgcttcgtcaacagaagatggccttaacttttacgattcaggtcatcgctttgaacattcccaacttttgttagtcctcctgcggtctctaccatctgcatctaaggctctacaaagccgagcacttcaggatcttctttttttggcttgcagtcatccggaaaatagaagcagtctgacaacaatggaagagtggcctgagtggatcttggagatactgatctcgaactatgagaaggatgcagggaagcagtctgcttcagtgggttcttgtgaggtagaagatatgattcacaacttcttgatcataatgttggaacattcaatgcgccagaaagatggttggaaggatatcgaggctacaattcattgtgcagagtggctttctatcgttggtggttccagcactggagagcaaagaattaggcgtgaggagtcactaccaatttttaaaagacgactttttggtggattgctagactttgctgccagagaactgcaagctcagactcaagttattgctgcagcagctgctggtgttgctgcagagggtctagcaccaaaggatgcaaaagcaggagcagaaaatgctgctcagctttctgtttttctggtggaaaatgcaatcgtgattttgatgcttgtcgaagatcatttgcggtcacaaagcaaacagacttgtgcaaccaatgcagttgcttctccatcccctcttaaaaaacgtacaagcacactgacagcgatcggagaatcatcagagatttctagcagccgtgcttcactgtcaagtgattcagggaaagtccctttagatatactcgcatcaatggctgattcaagtggacagatttctgcagtcgcaatggagcgccttactgctgcttctgcagctgagccttatgaatctgtttcatgtgcttttgtttcatatggcagctgtgccatggatttggctgagggttggaagtacaggagtcgattgtggtatggtgttggccttccctctaaacccagttcacttggtggtggtggcagtggttcagactcctggaaatctactttagaaaaagatgctcatggaaactggattgaacttccattggttaaaaaatctgtatccatgcttcaagctttgctattagatgagtctggactcggaggtggccttggaataggtggaggatctggtacggggatgggagggatgacagccctctaccagttgctggacagtgatcagcctttcttatgtatgctgcggatggtgcttctgtctatgagggaggaagactatggcgaagataatatgttgatgagaaatctaagttctgaacgctcctcagggaattcagttacattagatagtggttctcagatgtctatgcgacaatcccgatcagctttattgtggagtgtgctatctcctatcataaacatgccaatatccgattcaaagaggcagagagtactggttactgcatgtgttctctattctgaggtatggcatgctatcagcagagacagaagaccacttcgtaagcagtatatagaggctattgtaccaccatttattgcagtcctccggagatggcgaccacttttggcgggcattcatgaacttgccactgctgatggtatgaatccccttgtcgttgatgatcgtgccttggctgctgatgcgctccccgttgagggtgctctttctatggttactccggagtgggctgctgcttttgcttcaccgcctgctgcaatgtctctggcaatgatagctgcaggggcagctggttgggaagcaccaccacctcctacaccttcacatcttaggcgagactcttcaatgcttgagcgtaagactgcgaaacttcagaccttttcaagcttccagaaaccactggagcctccaaacaacaatgcaccacctcgaccaagagacaaagctgctgcaaaggcggcagctttggcagccgcacgagatcttgaacggaatgcaaagattggttcaggaagaggtctgagcgctgttgcaatggcaacatctgcacagcggaggaatatcggtgacatggagcgtttacagagatggaacacttctgaagctatgggagtggcgtggatggaatgtctccaaccagtggatacaaaatcagtttatggaaaagattttaatgctttgtcctacaaatttattgctgtacttgttgcgagttttgcattagcacgtaacatgcaaagatcagagattgataggcgtatgcaagatgatatcatagcggcaaaccgtctatgcttgggaagccgtgcttggcgaaaactaattcgttacttggcagagatgcgatgcttttttgggccttttggagatggaatatgcagtcctgaacgcgttttctggaaacttgattctatggaaagcttttcgaggatgagacagtctataaggaggaattattctgggactgatcatcacggggcagcagcagattatgacgatcagacagaaacaaaaagtgataatggtagcaagggttctcaatcaaatcctcctgttgttgctgctgaagtaatattaatggaaatagcgtatgaagaggatgaacatggagagggtgatcagcttgatgtcaaaggtaatgctgaagaacataaaagggatgaagggagaatatctgggtcacatgagcatgcatccagaacttcagcaggaaacagtgatcctcgaacatcaaatgaccttgaaatggtccgagattcttcagtagtagcacctggctttgttcccagtgaacttgatgaaaggatccttcttgaacttccaacatctatggtccggccactaagggttgtgaaaggaacctttcaaattacaacaaggagaataaattttattgttgacaacagagaaagccagaatttggctgatcactcagatgagtcccaatcaggtgatcaagaaaaggatcgtagttggccaatgtcttctcttcatcagatttatagccggagatatctcctgagaaggagtgccctggaactttttatggttgaccgttcaaacttcttctttgattttgggaatactgagggaagaagaaatgcatatcgagctatcgtgcaagcaaggcctcctcacttaaacaatatttacctagcaactcagaggccggaacagcttttgagaagaactcagttaatggagcgctgggctagatgggagatcagcaattttgaatacttaatgcagcttaacacgttggctggccgtagttacaatgacattactcagtatcctgttttcccgtggattatttctgacaacagttcagaaagtctggacctttcaaatccatctaccttcagagatctttccaagccaattggtgcattgaacccagagcggctcaaaaaatttcaagagcggtattctagcttcgaagatccagttattcccaaattccactatggctcacattactcgagtgctggagcagtgttgtattatcttgccagagttgaacctttcacaaccctatcaattcaacttcaaggtggaaagtttgatcatgcagaccgcatgttttcagactttccaggcacttggaatggagttcttgaagacatgagtgatgtgaaagaattggttccagagttgttttacctccctgaggtgctgaccaacgaaaattcgattgactttggtacaacacagttgggagaaaagcttgatgctgtaaaacttcctccttgggccaaaaacccagtggattttgtacacaagcaacgaagggctcttgagagcgagcatgtatctgctcatttgcatgaatggattgatctcatatttgggtataagcaacgtggcaaagaagctataatggcaaataacgttttcttctacattacctacgaggggactgttgatattgataagatcacggacccggtacaacaacgtgccacacaagaccagatagcttattttgggcaaacaccatcccagctgttgacagttcctcacatgaagaggatgccgttgaaagatgtcctacatatgcagactatttttcgaaatccaaaagaaataaaaccatatactgttcaaaccccagagcgctgcaacttaccagcctcagccattcaggcatcttcagatagtgttgtgattgtggacatgaatgtgccagcagctcgtgttgcacagcacaagtggcaaccaaacactcctgatggccaaggtactcctttcctcttccatcacgggaaggcaacaacaacttcaactagtggatcattgatgcgcatgttcaagggtccagctagttctggaactggtgactggcaatttcctcaggcacaagcatttgcctcatcaggaatcagaagttcgtccgtgattgctattactagcgatggggaaataatcacaggtggacatgcggataatagtatcaagctagtctcatctgatggggcaaaaactctggaaacagcttttgggcactgtgcccctgttacatgtctggctctttctccagacaacaacttccttgtgacgggttcacgggacagtactgttttgctatggagaattcacaaggcgtttacttctcgaacaagcgtgtctgagccatcaactggctctggagcgccttcctccacaagcaacacgaatctggccaatacgttggcaaacaaaggcaaaaaatgtcgccttgaagggcctatacaagtgctccgaggccatcgaagagaattagtttgttgttgtgtcagctcagaccaaggagtcgttgtttcgtcttctgagtcctcagatgttctattgcattccattagaaaaggacggctgatcagacgattagttggtgtgaaggcagattctctctgcatttcatcggatggggttataatggcgtggagtagttcagaaggttctattagcgtgttcaccattaacggtgttctgattgccaaagcaaaatttcccctcttttgtagcgttggttgcatggaaatatccatggatggtcaaaatgccttgatagggatgaactcatgttccaactcggattattcgagtagtaatgatacatcgaaagatagcaaagaaattgaaagactggatgttccatctccttcaatttgcttcctcaacttatacacactacaggtattccatgtgctaaagcttggtcaaggccaggatataaccgcactggctctgaacgttgacaacacgaacctcttagtttccacagaagataaacaattgataatcttcactgatccggctttaagcttaaaggtggtggatcagatgctgaagctcgggtgggaatgagagaaaagaatcaaacctcactgatacagaatggcggaaactcacggcaaggaaaatctcatgtttgaatactcggggaagtcaaaggtgtagcaagccgtggaaatcttaaaatcagattgtggacatgtttgttcgtctgtaacatatgtaagtttggttagtcccagtaaagtgaacccgtttcatatttttgtttgttctgatttcgtcggtccatagtttttgtgaagatggtttacagatatcaaaggcttgttgagtttgttgaggtatacacacaccgaagcttcctttttctctcccccattgagtttgtttgttgggttatacgtgtgtgataaatggtgtctcactgatgattttaatataaattcatttattcatagcagcaaaaaaaaaagggcggccgctctagagggtcgacgcgctcgagcgcgtgcat

SEQ ID NO: 21 - DNA, 2207 bp, Arabidopsis thaliana
  Clone ID: ARATH-23APR03-CLUSTER10213_1
aaagtaatgctgtctctcttctcttcaaaattattgttaacctctcgtaactaaaatcttccatggtagtagtaacaaagaagaccatgaagattcaaattcatctcctttactcgttcttgttcctctgtttctctactctcactctatcttctgagcccagaaaccctgaagttgaggcgttgataagtataaggaacaatttgcatgatcctcatggagctttgaacaattgggacgagttttcagttgatccttgtagctgggctatgatcacttgctctcccgacaacctcgtcattggactaggagcgccgagccagtctctctcgggaggtttatctgagtctatcggaaatctcacaaatctccgacaagtgtcattgcaaaataacaacatctccggcaaaattccaccggagctcggttttctacccaaattacaaaccttggatctttccaacaaccgattctccggtgacatccctgtttccatcgaccagctaagcagccttcaatatctgagactcaacaacaactctttgtctgggcccttccctgcttctttgtcccaaattcctcacctctccttcttggacttgtcttacaacaatctcagtggccctgttcctaaattcccagcaaggactttcaacgttgctggtaatcctttgatttgtagaagcaacccacctgagatttgttctggatcaatcaatgcaagtccactttctgtttctttgagctcttcatcaggacgcaggtctaatagattggcaatagctcttagtgtaagccttggctctgttgttatactagtccttgctctcgggtccttttgttggtaccgaaagaaacaaagaaggctactgatccttaacttaaacgataaacaagaggaagggcttcaaggacttgggaatctaagaagcttcacattcagagaactccatgtttatacagatggtttcagttccaagaacattctcggcgctggtggattcggtaatgtgtacagaggcaagcttggagatgggacaatggtggcagtgaaacggttgaaggatattaatggaacctcaggggattcacagtttcgtatggagctagagatgattagcttagctgttcataagaatctgcttcggttaattggttattgcgcaacttctggtgaaaggcttcttgtttacccttacatgcctaatggaagcgtcgcctctaagcttaaatctaaaccggcattggactggaacatgaggaagaggatagcaattggtgcagcgagaggtttgttgtatctacatgagcaatgtgatcccaagatcattcatagagatgtaaaggcagctaatattctcttagacgagtgctttgaagctgttgttggtgactttggactcgcaaagctccttaaccatgcggattctcatgtcacaactgcggtccgtggtacggttggccacattgcacctgaatatctctccactggtcagtcttctgagaaaaccgatgtgtttgggttcggtatactattgctcgagctcataaccggactgagagctcttgagtttggtaaaaccgttagccagaaaggagctatgcttgaatgggtgaggaaattacatgaagagatgaaagtagaggaactattggatcgagaactcggaactaactacgataagattgaagttggagagatgttgcaagtggctttgctatgcacacaatatctgccagctcatcgtcctaaaatgtctgaagttgttttgatgcttgaaggcgatggattagccgagagatgggctgcttcgcataaccattcacatttctaccatgccaatatctctttcaagacaatctcttctctgtctactacttctgtctcaaggcttgacgcacattgcaatgatccaacttatcaaatgtttggatcttcggctttcgatgatgacgatgatcatcagcctttagattcctttgccatggaactatccggtccaagataacacaatgaaagaaagatatcatttttacgatggatcaaacaatccaatgaaaaaagctctacacttttataatatagacatgtatatggtggtgaaaattgatgaaaaatatctctacagtttgagattatgtgttcgttatgttgatgatgtatatattaacttttaattgtgagtttcgaaaaaaaaaaaaaaaac

SEQ ID NO: 22 - DNA, 1803 bp, Arabidopsis thaliana
  Clone ID: ARATH-23APR03-CLUSTER10220_1
ggaaacgccttttgtgagagagagaagagaagagaagagaagagaagagaagagaagagatcgcaccacacaaaaactacaattttgttttggaaattactctcacccacctgaattttgttgctagagagacaacacttaggttttgggcggagttctgatgtgaaatgaatcggcgtagaaaattttcaggatcctccaattcgtcagagagtgtagcgaggagtgtctgatccgttcgctgattctaatggctggacgggtcttcgaagcctggaagggaagtaataagtttctgtttggtgggagattgatatttgggccagatgcttggtctattccttttaccttcctgctcatcataactcccgtttgtttcttttctgtatttgttgcaacacatcttcgccgcgagctcttaccaaacaatgcgggacatgtgttcttagtggcaggagttctatttactgtctttgtactgatccttctcttcctcacttctgcgcgggatcctggaatcgttccaagaaattcgcatccgccagaggaagaactatgctatgatacaactgtatcaagtgatggaagacaaacacccactgttcaaattcctaggacgaaggaagtcatggtttatggcgtttctgttagagttaaatattgtgatacatgcatgctttatcggcctcctcgatgctcccattgttccatttgcaacaactgtgttgagcgctttgatcatcattgcccttggagaaactataggtacttctttatgtttgtttcttcggcaactattctctgcatctacattttttcgatgtcggcattatacatcaaggttctgatggataaccatcaaggtactgtgtggagggcaatgcgagaatcaccctgggcggttatgctgatgatatattgctttatttccctgtggtttgttggagggcttactgggtttcacttgtacctcattagcacaaaccagacgacctatgagaatttccggtacagatcagacaatagaatcaacgtttataaccgtgggtgttcaaacaatttttttgagacattttgctcaaaagttaaaccctcaaggaatgacttcagagcgttcatcaaagaagaacctccaaggaatattacattggctaccacatgggaacgaccagaagaagcagatgaagaaaacagggaggaacggcgccagaaggtggaagacgatctagacatcgatgaagatgttatgaaactgcagcagcgtttaaatgacgaagagggcagcgatacagcgcatcacaagatcgatattgaccaaatgagaatcgggtctaatgagagagcgccaacaattcgatcagaagccaggcatggaaactggggagcaagaagcaatgcacaggaggaggacgtaattgctggttcttcagtaagagaaagtagaagctatgcagctgcagaggagggacggtgatgagtgaacgatggtagtagggtaattattttgaagctttttctttcttactaagtttttattgttttcaatttttcattattttgtgggtttggtttgatttgggagttgtgaacactatttgtgaataagtttagtgtaagcttgggtagaggtcgaattaagttataagtaatcaactttttgaatgttttgccgtgatgatgatttctaatgatgatttaggttactctggtttttgccttaaaatagacagaaccacagttttattttactgtttttctttctaaataaagaaaggcgataagatcgaaaaaaaaaaaaaaaac

SEQ ID NO: 23 - DNA, 2350 bp, Arabidopsis thaliana
  unsure (1)..(2350): unsure at all n locations
  Clone ID: ARATH-23APR03-CLUSTER10227_1
gatgaatccgacgatttcgtggaggttcgcgtcttcgacctctcttctctccattcctcgaacaccaaaaagtgcctttatcttcgccatgaccttctcttcttcttcttcttcttcttcttctatgtcgaatcccagacagaggaaaggagaagcaatgatgaatccgacgatttcgtggaggttcgcgtcttcgacctctcttctctccattcctcgaacaccaaaaagtgcctttatcttcgccatgaccttctcttcttcttcttcttcttcttcttcttcttcttctgtggaaaaccctaacaaggacgattcctcctcttcgcttgaattggtcctcaagtaccacaaccagacgaagcactccttgaacggttacgcgagaggtcctcgtggtctcgactgggccaatcagcctaatcccttccgccggtacctctctgctcctcttcttcctctccaacaccccaatcacgacatcgacgacgactccgactctcctctctactctactctattcgactcgcttcctccgcccaaacccatctctcttcctacaatctctcaccttttctaccattctctcgctctctccgcctggaagaccaccggatcctccacgtggcccctccgcgtcaaccccagcagcggtaacttgcatcccaccgaggcctatctcattgctcctcccatcccttccctctcccaatccgctttcgtctcccactatgctcccaaagagcattctttggaggttagagctcacatcccctcttcctttttccccaacttcttcccggagaattcttttctcatcggaatttcttcaattttctggcgtgaagcttggaagtacggagaacgagcgtttcgttactgtaaccacgacgtcggccacgccattgccgctctctccattgcagccgcagacctaggctgggacttgaagcttctcgacgctttcggagctgatgatctcaagaggcttatgggtctccccgaatttcagttacctgaaggtaaaggtaaagctgagctccctgagattgaattcgagcatcctgactgcttactccttgttttccccaacggaactagtagagaacatctcaacttagactacctcgcaattagctctgcccttagagacttcccaagcctagaatggactggaaaccccaatactctgagcaaagagcatttgtgttgggatatcatctacaggacagccaaggctgtagaaaagcctccattgatctactccacctcttcttcttcaattgatgttgcttccttcacaagcagtcgtgctctgtttagccacagttcatataataagttaacggtgaggcaagttgtaaggacgagaagaagtgctgttgatatggacgctgttacttgtatagacatgtcttcgttttaccagatgctgatgcactgtcttccttccacaggcgagtcccaaaaagagcaacttgcgctgccgtttcgagctcttccttgggatactgctgaggttcatcttgccttgtttgttcacagagtttcgggtttgcctaagggactgtatctcctagtcagaaacgaggatcatctcagtgatctcaagacagctacgaggcctgaatttgagtggactaaaccagatggatgtccggacaatcttcctctgtacaagctcgccgagggtgattgccagaggctggcaaaagggctatcatgtcatcaggacattgcaggggatggatgcttcagcttaggcatgatagctcggtttgaaccagcactgcgggagaagggctcatggatgtaccctcgactgttctgggagacgggtgttgttggacaagttttgtacctggaagcacacgcaatggggatctcagcaaccgggattgggtgctatttcgatgatccagtgcacgaggttctggggattaatgactctagctttcagagtctgtaccatttcactgtgggaggtccagttgtagacaagcggatcatgactcttcctgcttatcctggtcccaccaccaccgttgcctagatcatacatacatacccgttaatctgtgttgaatccgtaaacagccttcattttgtggtctgttaagtggttgatggtaaatatataatcgaattttatattcgttgtttttttattgggaaatggattttctttgtttggtgacattgctctaaaacgattttttaatgagcttccgctctatcatatttgcgttttgttgtccaaaaaaaaaaaaaaaaaaacaaaaaaaaaaaaaaaagcgtnnaanngtggggggnaaaataaatgcgttgtgnagaaagggagggcggagaa

SEQ ID NO: 24 - DNA, 767 bp, Arabidopsis thaliana
  unsure (1)..(767): unsure at all n locations
  Clone ID: ARATH-23APR03-CLUSTER102340_1
tcgannagcttagctaatgttgacgactcttcgatctcgttgttcgtctcttcttctagatcaatcatggaagctagctcccaatcgcatcttcgcttcctctccctctttttcttcaaccgccgggatctctaatgtctcagagattctcacacttcccgaagtggagaagattctcgccgacgtgaaagctgataacgtgactgtgattcctacacataatcattgtttctgggctgatttcactgtcatcgccaccggtagatccgattggcacttaagaaacatcgctcaagctttagtttatagggccaagcaaaagcagaaaggagctaaacatgtaatgttaccttctgtgcaagggtacaatagcaagtggattgtcatagactacggaaagtttgtagtccatgcacttgatgagaaagccagaggttatttcaatttggaaagcctttggtctgctgaatcctctggtactgatacttcagatcaggatctccaaaacgtttttgtaaaggtccgaccaaagaacaattcgaaaaggaaaccggctaaagtgagttcttgatcctgtccgatggatacaatttctcataaacttctcgagtctagacgagttaagaataggaggattttaaagcctattaagtatttatctccttaatatttttttttggtaagttttatctccttaatatttgtagtcatctatctattttttccttaatatctttgcttaaaaaaaaaaaaaaaaaggcggccga

SEQ ID NO: 25 - DNA, 2612 bp, Arabidopsis thaliana
  Clone ID: ARATH-23APR03-CLUSTER10239_1
gctcactagtcccccccccccccgactactaagtactaactctttctctctctaaaaatcaaattcaatttaatttttcttctgcaaatggaaccaccgccgtcttctctgtcctccaccgcggtggcttccacctccatctccgccgccactactcctgttcctcctcctctacctcctcacgtgacttcttcttaccccgaatctctcgactcctcccctcgttctcgcaccaccgatggctgggatgaccttcctgctccttctggcggcggcggtggcggtggtggtagcgccgtctcttctaaacttcgttttatgtgtagctacggcggtcatatccttcctcgccctcacgataagtctctctgctacatgggcggtgacactcgcatcgttgtcgtcgaccgtaactcctctctcccttctctcatcgctcgtctctccaacacgcttctcgacggtcgttccttcaccctcaagtaccagttacctagcgaagaccttgactctctcatctccgtcactaccgacgaagatctcgacaacatgatcgaagagtatgaccgtaccatttccgcttccaattccaccaaaccttcgcgtctccggttgtttctattcacctccaagcctgaggctactcaatctatgggtcagatccttgagagctctgccaagagcgacgattggttcctcaacgcactcaatagcgccggtcttctcaatcgaggattctcagattctgatactaacgtcaatcgtttacttggtttggatgatgctcttgctctccgttctaattccggtgacaacaacaatcgagatggtgatgatggctctgttaaaagcgccaagcaacagcaacctccaccgccgcagcagcaagaacaacagcaaggaggccaagatgtgaactgcttaccggattctccgatgttagatacatcctcttctttcggctccacttcttcgtctccctcgctcgccaatttgcctccgatccgtgtccatgtagaggaaccaggcggagtaaggactttgccagatcagagaaatctgggaattgaagaacagttcgcacgattcaacgtcgggaacaagcatcagctacatgacgacggatttgctgcgatctcttcaccaccgccgatgcctgtcacaatcgcccttcctgctgcgcctgtgactgcagccaccgtctctaatgagttccaggccagggtttactcagatgacgagagatccgatcacggcgtgcaggctggatacaggaagcctccgactccgcgatcgcagccgcagaatctaccgcctcagcaggctcatcagctgaaatcaaatagcggtggtggacacgagctgccatcacccaattccgtttccagtgatagcagtatgagcaacccaatgtttcaccaaagaccatctgtctatcaagaaccaattgctcagataccttctggctctaccgttgttactggtatgatcaatccctcagatccaagcacacttttgtcacagcatcagaatcaggacccagcctatatccttcacccccagtttgagcaacaatctgcacaatctcagccacagcagcagttcatacacactgctgctcctcctcaatacattcatcaccatccgtctagcggccttcctgtcccgacttacatccaggtttacccttcgcaacagcctcaacagtccttccatcaacacgcaggtcgactggatcagcagccttatcctgtttattatgtcactgctcctgtcccacctaggccctacagtatgcctgtgccacaatctccaagtgtgagcgatgctgcagggtctatcccctctaaccatcccaactctaccatgatgcctccacctcctaacaaccacatgagaagtgttagcagtggcaaacctgagatgggacaggctggggtttacacaacagccccaggtgtgggcggtgctcagatggttcaccagattcccacaaaccagcagcaattcatggggtattcgcagatccgtcaccctcctcagtctggttcagctgggaatccaaactatggatatgaatatgtcgacaatgctcatacacagatatactacactcaacctatgggacatgcacagtaccagacaatgactgggcctccacctgccatggtgatgcctgatggttctgctgctgctaagcttccagctgagaacatgactcaacagatccggagttcacagccattgtgacacacacaaggaacacatgaagatgaaccacaaaattttggaggaagaaaaccccgggttggtttttaaacgtataaatatataacttttacttcttttttcttctcttcttttacaagttgctgcatcaaaaaaagagtctggtgtcatgttaagtttggtattatgggttgtgtttaaaagtgttgtgtgagtaaattaaaaaaacaaataaatagtgcttcttggtgggattttacattatatagttgcaattgatacatgtagtgctttaccattttcctggatcttatatcatattattatcattcatttcattttgtaaatgtatcacttttttgaccaaaaacagtaataaaggg

SEQ ID NO: 26 - DNA, 2240 bp, Arabidopsis thaliana
  Clone ID: ARATH-23APR03-CLUSTER10248_1
gaaaacaacaaaaaccttcttccaactttctctgatcgtctatggcgattattactactactactgttcgtttcactgatggaacctctcccaccttcttctcctcagcttcgacaaaggcttataatctccattttctctactcgaattcaacccaacgacttacgaatccgaaattcggaatcggcgggaagttgaaggtgacggtgaatccgtattcgtatacagaggaagtacggcctgaggaacggaagagtttgacggattttttaacggaagctggagatttcgttaattcagacggcggagatggtggtccgccacggtggttctcaccgttggaatgtggcgcacgtgctcctgaatctcctcttcttctctacttacctgggatcgatggaactggattagggctcattcgccagcataagaggcttggagagatatttgacatatggtgccttcactttccagtaaaagatcgtactcctgctcgagatattgggaagctcattgagaagacagttaggtcagagcactaccgtttcccaaatagacccatttatatagttggagaatctattggagcttctcttgctctggatgttgcagccagtaaccctgacattgatcttgtcttgattctggctaatccagtcacacgttttaccaacttaatgttgcaacctgtattggccctactggaaattttgcctgacggagttcccggcttgataacagagaattttgggttttaccaagaaatgttcgagactatgctcaatgaaaatgatgccgcgcagatgggtagagggctattaggagacttctttgcaacttcatctaatctgcctactctgattagaatctttcccaaggacacacttctatggaagcttcaattgcttaagtctgcttcagcgtctgctaattctcagatggacacagtcaacgcccaaacactgatacttctgagtggacgtgatcaatggttaatgaacaaggaagacattgaaagactccgtggtgcattgccaagatgtgaagttcgtgagcttgagaataatggacagttcctcttcttggaggatggagtagatctggtgagtatcatcaagcgtgcgtattattatcgccgtgggaagtcacttgattacatttcggattacattctgcctaccccatttgagtttaaagagtatgaagaatcacaaagattgctaactgctgttacctccccagtctttctttcaactctaaagaatggtgcagtggtaagatcgcttgcaggaataccttcagagggaccggttctgtatgttggcaatcacatgttgcttggtatggagttgcatgcaatagcacttcattttttgaaagaaaggaacattctattgcgaggactggcacatccattgatgtttaccaaaaaaactggctcaaaactccctgacatgcagctgtacgacttatttaggattataggcgcagttcccgtctcgggaatgaatttctacaaactacttcgttcaaaggctcacgtggctttgtaccctgggggtgttcgtgaagctttgcacagaaagggtgaagaatacaagttattttggccagaacattcggagtttgtaaggatagcatctaaatttggagcaaaaatcattccttttggagttgttggagaagatgatctttgtgaaatggttttagattatgatgatcaaatgaagatccctttcttgaagaatcttatagaagagataacacaagactctgttaacttgaggaacgatgaagaaggcgaattgggaaaacaagatttacatctacctggaatagttccaaagatcccgggacggttttacgcatactttgggaaaccaatagacacagaaggtagagagaaagagctaaacaataaagagaaagctcatgaggtttacttgcaggtcaagtctgaggtagaaagatgtatgaactatttgaaaatcaaaagagaaactgatccttacagaaacattttgccgaggtccctctattacctcactcatggtttctcttcccaaatcccaaccttcgatctccgaaatcattaaatttagttactgtgttgtagctctatctacaagatatcttatttaactgtggtgattaaacacgtagatttgggtgtgttattgtaaaaaatggttggtatatataacttaagctttctcctaaaaaaaaaaaaaaaaaaaccc

SEQ ID NO: 27 - DNA, 1361 bp, Arabidopsis thaliana
  Clone ID: ARATH-23APR03-CLUSTER10261_1
aacttctcctttactctgtatttaacagaaagaaccaaaacaaacgaaacaaatggatttagggatttcgaaaagccaccatgcctttaactcgtcaacaatggcgacctaaattttctaattccagaaaatctgactgatttcatcgaagaaacaaatccgtgggtcattagaaaaatccgattttttgattaaaagatgtggtcggtgatgggtttagtgagacgtacggctatgtcctccaccgtgaataaagcttctccggttaggtctttgcttggtgggtttagatgtctcaacgttgagtctaaggaagaagatgagaaaaaggatatgactgtgttagaagctaagaagttaatgagattagtgaatgttgaagatatgaagaagaagcttattggtatgggtgataaagaaatggttacttacactacacttattgaagcatctcaaggtttaggtatcgctagatctcttgatgaagctcatgcttttgctcgtgttcttgatgatgctggtgttattttgatctttcgtgataaagtctatcttcatcctcataaggtggtggatttgattagaaaggcagtgcctttaggtttgaatccagatgatgagttgattagagaagagtttgataagatgagaagtatgaaggaagagattgatgtgttagctcatcaacaagtgaggaagattctatggggtggtcttggttactcagtggttcaaattggaatctttgttaggctaactttttgggagttttcttgggatgtgatggaaccaataacgtttttcactacagctcctgggatgtgtgcggaccaagttccttttgcgctacagctactgggattattgtgggttatgcttatttcttgatgacttctagagatccaacgtatcaagatttcatgaaaaggttgtttctttccaggcagaggaagttgcttaagagtcataagtttgatgctgagaggtttaaagaactggagaacaagtggaagataacgtcttgctcttcttcttcgtgccacgctaatgcatcgattcggaatcgtgttggtgttgatcttgatttggaggattctttgcagagtcatcacagagattgattggttctaaccatttttcacttttgatgatattacttaaccagattttcttctctctggaggttgatcaagtttgattatttggtgttgattgatccaaagagttggagtagtcatggtgatttttatttgataatcttgagctactcttatttaaatcagctcatgtgttaatcttttctatggttaaggattttgacggattataatagtctagtaactatgattttggctcttaaa

SEQ ID NO: 28 - DNA, 821 bp, Arabidopsis thaliana
  Clone ID: ARATH-23APR03-CLUSTER102994_1
atttgacgctaatttaaaatttagagcgtttggcgctgtgccactgcgtgcccatcgcggtcaacagtttagaaaattggcaaattcattttcgagatataaaaagataggatttaatgaagaagaataaataattaagagatgataacaaaaacaaaacaaaaaagaagcaatgactgtttgctttaataaataaagatattcaaaaattccatcacatgattgcaccgacgacagcgcaagccagcgaagcagcgacagtggagaaagcagaaatgagcgaggaggaagcagacgatttctgagagagaggaatggacccgaaggcgttttggtaagagggagcgtcggcggcagaagacggagacaaggcctctgcttcggcggagtaggtgccgacggagactaggagcttctggtacttggtacagtggccggggtttgcacttgtgaagtatagggttccgttttgggtgaggttgaagagagagttgccgtcgttcatgtacaagattgggtctttggtgttgcagctcttgaaattggagggcgtcacttgaatcagtgagtcttcgcttggtgggtacaagaacaagagggagtcaccgattttgaaagagtgagatttgggccatttggaatagaccttagcatcaattgggatgccccaagcgtccatgtccccaactttgtatagagtcgacgacactttaccaatctcttgtcctaacaatatcatcacctgtaataccaccaccaccatcgtcttgctcaaactcatcactcccatcttgattggtctactttcgcggacgcgtggg

SEQ ID NO: 29 - DNA, 1479 bp, Arabidopsis thaliana
  Clone ID: ARATH-23APR03-CLUSTER10319_1
tcggcgccgggggggggggggagagagggccctttttcccccccccccccccccccactagtttccttaagcgaccagagacacactgagatctctcctctttctgtcttcaccaatggcgttttcctcctcttcttcttctccggcgatgcagaaaggaatctttgtctccatgcctgtacttgttctcaccgtttcctttgtagctgctgtcttcttcctcctctcttcttctttctcctcttgctcctgtcctgaagctttatcttcttccccgaccgacgccgttgaagcttctgtcggtggaagcggtggtgatgtgagatttgaggacaggatatctccgacaaaggatgatattgagtgggttagagatctgattagatccaacggtttgcatatgcagaagaatgagcttcgtaaagggattaatcctcgcactagagatcaacaacttgcagatctgatacagtacaagggtatatcccattacgaaggagatgaagcaaacaaccacacagctcttccatgtcctggtgagttactagttgagcagcatcacagcaactatggtgaaccttgggcaggtgggcgcgatgtattcgagttcttagctgaatcatccagtcttaaaccaaactctcgtgttctagaaattggatgtggcacgttacgcgtgggtttgcatttcattcgctatcttagtccccaacattttcactgccttgaaaaggacgagctttctctaatggctgctttgaggtacgagcttccatcacaaggacttctacataaacgacctcttatagtcagaggcgatgatatggaattcagcaagtttggttcagatacaacctatgatctgatatacgcaagtgcagtctttctccacatgcctgataaactcgtgtggactggactcgaaagattagtagacaggttaaaaccttacgacgggagaatcttcgtgtcacataacgtaaagttttgttcacggttaggacaagacaagtgttctcagaagctagcaagtttaggacttgagtatcttggaaaacaaacacatgatagcttgctgtttaatcactatgagatctggttcgggtttagacggtttaaaacataaagccgccagttgaagtattatcttgagtgtgtttcgcttttctctacacgccattgctctccattgtctgtagattggatcaagacttgaagaaggttcagaagttgttttggtgaacaaaaggaaagaatctctacaaaagctgtggattagaaagtttgttctgtatcagttactttaatttttctgtttgtggtcagagagatacatgtattgttaatatacagtagtagccaaatgatataagagatgaggctagattcttttgtttgtaaccaaagacaaattctttttcaaaaaaaaaaaaaaaaaaaactcgagggggggcccggtacaaaaaaaaaattatagtg

SEQ ID NO: 30 - DNA, 3054 bp, Arabidopsis thaliana
  unsure (1)..(3054): unsure at all n locations
  Clone ID: ARATH-23APR03-CLUSTER1032_1
gagtcagaacgcaaccaaataaagaaagctctcaaactcagtcttgaagcttcaactttatatctaccatatcatcaactaactaattctttttaaaatggctttagctaatgagataatgggttctcgtctaatcttcgagagatcatcatcacttgcgtctccgtttcattcgcgtttctccatcaagaagaagacacagagaacacagttctccatcaacccttttgatccgagacctatgagagccgttaactcaagcggcgttgtagcggccatcagcgaggatttggttaaaacgctgcgtattagcactgtcggtagaaaacaagagaaggaggaagaagaggagaagtcggtgaagtttaaggtgagagcagttgcgacggtgaggaacaaaaacaaagaggattttaaagaaactttggttaagcatttggatgcttttactgataaaattggtagaaacgttgtcttggagcttatgagtacccaagttgatccaaaaacgaatgagccaaagaagagtaaagcggcagttttgaaagattggtcaaagaaatcaaattcaaaggcggaaagagtccattacacggccgagttcacggtggattcagcctttggttctccgggagccatcaccgtgaccaacaaacaccaaaaagagttctttcttgagagcatcaccatcgagggtttcgcatgtggccctgttcacttcccctgcaactcttgggtccaatctcaaaaagaccatccatccaaacgaattctcttcactaatcagccttacttgccgagcgagacaccgtccggtctaagaacattaagggagaaagaattggagaatctaagaggaaatggtaaaggagaaagaaaattatcagacagaatctacgattatgatgtgtacaacgacataggaaatccggacatatcacgtgaactagcccgtcccacacttggtggccgtgaatttccttaccctagacgctgtcgaaccggccggtcttcaaccgacaccgatatgatgtctgagaggcgggtggagaaaccattaccgatgtatgtgccaagagatgagcagttcgaggagtctaagcagaacacttttgctgcatgtagacttaaggcggttttacataaccttataccttcactaaaagctagcattttggctgaggacttcgctaactttggtgagatcgatagtctttacaaagaaggcttgcttctcaagttagggtttcaagatgatatgttcaagaaattccctttaccgaagatcgtcactaccctccaaaaatcaagcgagggcttgcttagatacgacactcctaaaatagtttcaaaggataaatatgcatggcttcgagatgacgagttcgcacgccaagccatagctgggatcaacccggtcaacatagaacgagtcacgtcttatccaccggtcagcaatcttgaccctgaaatctacggaccaggtcttcactccgctctcacggaagaccacatcatcggtcaacttgatggcttaaccgtacaacaagcgttagagacgaaccgtttgtttatggtggactaccatgacatatacttaccgtttctagatagaatcaacgcgcttgatggacgcaaggcttacgcgactcgaaccatattgttcttgacccgactcggtacactcaagcctatcgccatcgagctaagcctcccttctcaatcaagctcaaaccaaaagtccaagcgcgtggtcacacctccagtagacgcaacctccaactggatgtggcagctagccaaggcccacgttgggtccaatgacgctggtgtccaccagcttgtgaatcattggttacgtactcatgcgtgtttggaaccgtttatattagctgctcatagacaattaagcgcaatgcatccgatattcaaattattagaccctcacatgaggtacactttggagatcaatgccgtggcacgacagactttgattagtgcggacggtgtgatcgagtcgtgcttcactgctggtcaatacggtctagagattagttccgctgcgtataagaacaaatggcggtttgatatggaaggtctccctgctgatctcatccgaagggggatggctgttccagacccaacacaaccacatgggcttaaattacttgttgaagactacccatacgccaacgacggtctcttattatggtccgcaatccaaacttgggtccgaacctacgtggaacgttattacgcaaactcgaacctaatccaaaccgatactgagctccaagcctggtactctgagtcaatcaacgtaggtcacgctgatcaccgcgacgccgagtggtggccgaagctttccaccgtcgaagatctcgtctccgtcatcaccaccatcatctggctcgcctcggcacaacacgcggcactcaacttcggacaatatccttacggtggctacgtcccgaaccgaccaccgctaatgcggcggttgattcccgacgagtcagatcccgagttcacgagttttatcgaagatcctcaaaagtattttttctcgtcgatgccgagtttattgcaaacgacgaagtttatggcggtggttgatacattgtcgacacattcgccggatgaggagtatatcggagagagacaacaaccgtcgatatggactggagatgctgagatcgtagatgcgttttatggattctcggcggaaatcggacggatagagaaggagattgacaagaggaatcgtgatcctagccgtaggaatcgctgtggcgcgggagtgttaccgtatgagttgatggctccgagttctgaaccgggtgttacgtgtagaggagtgcctaatagtgtatctatttagaattattcaatttttcaaagtatagagaattttataagtatataattagattttgacgcagtatggtttatttgccgatattgtaaaattcttacaaggattttattatgttgatttattaaaatgtaggcgacacaaataattaaaaatcaaggctttaattggnatnnnnnnaa

SEQ ID NO: 31 - DNA, 1967 bp, Arabidopsis thaliana
  unsure (1)..(1967): unsure at all n locations
  Clone ID: ARATH-23APR03-CLUSTER103657_1
atgttggagaagatcggattaccgccgaagccatctctaagaggaaatagttgggtcgttgatgcttctcattgtcaaggatgttcttctcaattcactttcatcaatcgcaagcatcattgccggagatgtgggggattgttctgtggaacctgcactcagcaaaggttgtcactacgtggacaaggtgactcacctgtgcgtatatgtgaaccatctcagataatggagattgcacgaggcaagaatctatatgctgacagtgatcagccgaaaaaacgatccaatgatcttgccaccgacagtcggctcaatggaggagatgatagcgttacagaaaatgatatgaaggacccagcgttattgtcgactcttaagaatttgggatgggaggatgaagaaccaaagaaagaagaagcttctttcggctctgtgcagtcaagcggtccacggatagcagccaaaagcaagggacaaatccaaagagaacttcttgacttaaaaagaaaggcacttgccttcaagcgtcaagggaaaactggagatgctgatgaattatacagtaaggccagtgttttggaggcacagctagcagaactggaaacccccaagatggagatgaaaggctcagcttctgcaattaaacctgaaaactacatggatgttgatttattagttggatcgcaaatggaggataaagcgataaaatctgctagtgtttctcatgctcctcaagatagttatgacttgttaggagactttatctcccctgctaaatctggttcctctggcgttgtttctcaacctggccagcagcaaccaagtatgatggatttgctgactgggtccgcggacgcgtgggctcaaattcatgcagaaaaaggaaatgctgagactatgtcaggctttcgttcaggaaacaatcacggcgctgaacaaagagtggcacgtgaagagtcagagcccagtcatattcaatcagcttcgattcaaaatacatctcctcagaacacccttaaacaagagattctggctcataagaaaaaggcacttgccttaaagagagaaggaaacataagtgaagccaaaaaggcattgcaagaagcaaaattgttggagaggagactacaagaaggagaaaatccctctcctgaaaagctcggacgagatgatatggtttccacaacggaggatcctcctgctcgagagaaagagaatagtccttcaagttcagctccaaaggcaatgtcaggtcgtgaccgttttaagctgcagcaagagtcactaagtcacaaacgtcaagccatgaagcttcggagggaaggtaaaatgcaggaagctgaagctgagtttgaaatcgccaaaactcttgaagctcaattggaagattcaacatcctctaaaccagaaccggtggacgatgtagcggtggaagattttctcgatcctcaactcctgtctgccctcaaagctattggattagacaatcccgtgaatcctccaccggtaagtaaaacagacacaacacaagctgcggcaaaaccaaacccagtgaaggagagtaatagaaatactaataatcaagagagaagtcaattggaggaacgaatcaaagcagagaaggtaaaagctgtgaccttcaaacgtgcagggaaacaagctgaggcattagatgctcttcgacgggcaaaactatatgaaaagaagctaaacgctcttgcttcaagttgattcaactctccagttcattggatatttgtaacataaccttcatgttactcgagtgtttatcatctgatttgtaaactgacgagagtcggaagttttttcattagtcatattttgtcgatggaacaacccagaaggctcatatggacctttgaatcagagcctttttttttttgnaaaaaaaaaaaaaaaaaaaaaaaaaaaggaagggcggccgctttaaaggaacccagcgtacg

SEQ ID NO: 32 - DNA, 1924 bp, Arabidopsis thaliana
  Clone ID: ARATH-23APR03-CLUSTER10389_1
gcttcgatatcattacatttgaccactcaagatggagcaaatgaagccatgcgccgcaaactcgccgccgttgacgccgataggtttcttagagagagccgccaccgtttacggtgactgtacctccatcgtttatggaaaagagctaaagaaaatggaagatttgaagccaagtgccgctaactcgttaccattgacactgttaggctttcttgagagagcagccaccgtgtatggagactgtacctccatcgtttacggcaattccaccgtgtacacatggcgagaaacgaatcaccgttgcctctgcgtcgcgtctgctctgtcttccattggaataggaagatccgacgttgtctctgtcctatctgctaatactccggaaatgtacgagctccagttttccgttccgatgtctggcgcgatccttaacaacatcaatacccgcctcgacgcgcgaaccgtctctgttcttctccgccattgcgagtctaagctgctcttcgtcgacttcttttactccgatctcgctgtcgaagcgatcacgatgttgctcaatccgccgattctcgtcctaatcgccaatgaggaggaggaagaaggaggagctgaagtaacggagcgttcaaaattctgttacttgtacagtgatctaatcactagagggaatccggattttaaatggatccgacccggaagtgaatgggacccgattgtggtcaattacacatcaggtacgacgtcgtctcctaaaggagtggttcattgccacaggggtatattcgtcatgacgcttgattccctaaccgattgggccgtaccgaaaaccccggtttacttatggaccttaccgatatttcacgccaacggttggacctatccatggggaatcgccgccgtcggaggaactaacgtctgtgtgcgtaaactccacgcgccgtcaatataccatctaatccgtgatcacggcgtgactcacatgtacggcgcaccaatagtgcttcagattctatcggcgagtcaagaatctgatcagcctcttaagagtccggtcaatttcttaaccgccggttcttctccgccagctacggtgcttctccgcgccgagtctctaggtttcatcgtcagtcacggttacggattaacggagacagccggtgtgatcgtctcctgcgcgtggaagccaaactggaatcggttaccggcgagtgatcaagcgcaattgaaatcacggcaaggagtgagaaccgtcggatttagcgaaatcgatgtagtggatccagaatcaggtcggagcgtggagagagacggagaaacagtcggagaaatagtgttgagagggagttcaatcatgctcggatacttaaaaaatccgatcggaactcaaaattcgtttaaaaacgggtggttcttcaccggagacctcggtgtgattcacggggatggttacttagagattaaagatagatcgaaagatgtgattatttcaggaggagagaatgtgagtagtgtggaagtggaggcggtgttgtacacgaatccggcggtgaatgaagcggcggtggtggctagacctgacgagttttggggagagacgccgtgtgcttttgttagtttaaaacccgggttgacccggaaaccaacggataaggagattatagagtattgcaaatataaaatgccacgttacatggctcctaaaacggtctcgtttcttgaagagttaccaaagacttccactgggaagattataaagtcattgcttaaagagattgccaaaaacatgtaaaagtattgtaattttgatctaatatcagatatgtcatctctttcattaagattaaaaaaaaaaaaaagaaaaaaaaaaaaaaaaagtggttgaagcctagtttatatggtgcaccccaacaatcagccttagcca

SEQ ID NO: 33 - DNA, 2055 bp, Arabidopsis thaliana
  Clone ID: ARATH-23APR03-CLUSTER10400_1
ccaagcaaaagcataaaagcaaacacattacagcatcgtaagccaaccactcttaaactaaaagttgtctttctaatcaaaagccaaataatagaaagagtatggaagaagatgatggagacgcgtctacgccgttttggcttcaatcacgccgcaataacacttacttccgccgcactgcaagtctcggtggccgtacaaccaccatcgccactcaaatattcttcgccggaacagctgcaatcctcatagtcgtcttcattatccctcctttcttctcctctgtttctcagattttccgacctcatttagtccgtaaaagctgggattatctcaacttcgttctcgtccttttcgccgtcctttgcggcttcctcagccgcaacaccaataatgacgaatccaatcatcacaaagaagaagacattcgtaacaaattctcgacttcaccatcgattattgatcgaagaagtcgtgtatctaacagtggtacaacgccgcgttattggaacgatgatcgcggtggtggcggcggtgatcaaacggtgtacaagaggtttagtagattacgaagtgttagctcgtatccagatctgaggctccgggaatacgaagccgatgaacggtggagattctacgatgatacacgtgtaagtcaatgccgttatgaagatgtagatccgatctatccaaatcaaagttacagaaactggcatgaggaaggtaaaccaccgccggaagatgtagatcaaacagaggacggtgataatggagaaggaagtaaggtccgtaacggcggttcggaaactgagaaagttgaggtggttgcgacggcggaagctgaagtagtagaagagctaaaagtgccttctgctccgccgtatattccgtctcctccgccgtctccgccacgtcctccaccagcgaagcaagcgaagagaaagactaatagagtgtaccaagatgtttctccacaggaagagaagaaagaaagagatgattttgtagcgacgacgacgccgattccacctccggcgactgtgtatcaaaagagcaataaacaggagaagaagaaaggaggagcaacgaaagactttctgattgcgttacggagaaagaagaagaagcagagacaacagagcatcgatggcctcgatctcctcttcggctccgatcctccattggtctattcaccaccaccgccgccgcctcctccaccacctttcttccaagggcttttctcatccaaaaaaggtaaaagcaaaaaaaacaattcaaatccaccgcctcctcctcctccaccaccacctgaacggagatatgaatcacgcgcatcaacctcgaagctccgaaaagctccggtggaatcacggacatccaaaccaaatccgccagctaaagtaactcaatacgtaggcacaggaagcgaatcaccactaatgccgatcccgccgccgcctcctcctccgccgtttaaaatgccggcttggaaattcgtgaagcgtggagattacgtcaggatggctagtgacatcagcataagctccgacgaacctgatgatccggatgtagctcaatcagctggaagtaaggaggccgccgggagtatgttctgtccgagccccgacgtagataccaaagccgatgatttcatcgcaagattcagagccggactcaaattggagaagatgaactctgtgaaaagagggagatccaatttaggacccgaacccggacttcatgaatccggatcttcaacgggttataggcccagcccaagcgtatagaggctatttcttttagattttggatttttggattactactgtgttggttttttttaccttacttttgtttagactttcttatacgtaattttgtggtgtatacaattcctagtatccgtttttacagtttttagcccatcttgggatgaaccaaaaaaaatctctatacaactagtttttcttgtaaaaaaaaaaaaaaaaaagggcggccgcactatgtttggatggagaacttatagctttgaaaaatatattcaatatttttatc

SEQ ID NO: 34 - DNA, 2945 bp, Arabidopsis thaliana
  unsure (1)..(2945): unsure at all n locations
  Clone ID: ARATH-23APR03-CLUSTER10403_1
naaatctcctcccctccaagagaaaaaaaaaactttcattttattcgtcgtcagtttcatcttgttgcttcggagcgagcgagaattatcgtcggagaatttatcgtctctctctctgaaaattctgatcggtgaagaatcgtcggatcgaaagttcgtttatcttctcgtttacgtttccgtgatttaaatcctttggggtttttttttcttggtaatgtctgtgtttctgaatgtgtggttgatttttgttcgtacactttactttgatcgattaggtttatgtatagttaattgaaattttttggaagatttcagaagaagaagagaagaaacaatccgtaatctagacccttgaattgacctaataataggatacatatgatgactatgaagcagtctttgagtggcagggttcttaggggggtctttggtatctatctgtaggagggcttttaggtgctgtttcgggagattaaagccagattcaaggtgagtctgagagcttggttcttgtatcttcttgtttaccaatgggaatctaggtcactgagaaaccatccttcttgttgatctagtggaaaaaatcgattatttttctatcccaagtagttgctttttctttcttaaccttaacttgtgcaatcttcattctacctaagcatttccccttgataatgaaactctttaatcatctctgatttggccaagagtgttctttttttttgtcatctcatctatggtggattaacagaggttcctcttagttattcttcaagaaggcggcatgaatgctcactttgtttgtagtctgcttatctcagctatggtctccatagtgagtttcccttagagcatatctcgttgttgtccatgatgaagtttttgctccatgcggatcttgtgaacttgctagtagaatttttccgggtaacggcatcagaagatttttattccttcgattatggggttaccatttaggtcaagccaaaacaggtcagctttaaagatgggggtccattaactaggagtacccttcaagcctttgtttccttaaagaaatttctgattcgtatgttgactgaagagatctggtgcaaagtggcagtgggaggtaggtctatcctctttggacacttacccatctctttaaaacccggttatcccaagttttatgtcagtcccaaaccttgtttgatggtgtttgccttgcttttacgataggttggtcatatccggttgaaactggatagatttcccaagattgaaggactgaagtgaacactcaatgtgctaagcttttatttctctatgaaagctccatcaaccaagagggctgtttttagttgtttaacagggtatttgtagatcttcttgttttggtgattgttcctcttggagaaagctgattggagctgtttcaaaaatggattgtcttggtgtggtgcaatgtagatggaagcaacagttcatcgagtttttttgctggattttcaggtgactgataatgtttgcgaaatgaggaatagattttctaaatattttcttacttgcaggtttcataagctttccatcaactagcagtatctgccaatatcacagacagataattcgtaatgggagacgtatatttcaaccatttcgctcagcaactgcagatgtctgaccaagagaagggtgaaatgtcaagacattcacaccctcattcaatcaatgaagaatctgagtcgtcaactctggaaagggtagcagcagagtcattaacaaacaaagtccttgatagaggactaatggagtatgggtaggttttactccctatttgtatattcttagctttgagcttgtttcttggatgaatacccctatgttcttgcagatgtccacattacagaagaaggtgttgcattagagctccttgctgtaatgagatctttggttgccatcactgtcattatgaggcgaagaacaacataaatgtagatcagaagcagaggcatgatattcctcgccaccaagttgaacaggttatttgtttactttgtggtactgaacaagaggtgggccaaatttgtatccactgtggagtgtgcatggggaagtacttctgtaaagtctgcaagctctacgatgatgatacgtctaaaaaacagtaccactgcgatgggtgtcccacgcgtccgggaatttgcagaatcggaggacgtgaaaatttctttcactgttacaagtgtggctgttgttattcaatcctcctcaagaacggtcacccttgtgtcgaaggagcaatgcatcacgactgccccatttgctttgagtttctgtttgaatcacggaacgatgtgacggttttaccatgtggacacacaattcatcagaagtgcttggaggaaatgagagatcattaccaatatgcgtgcccactttgctcaaaatctgtatgcgacatgtcaaaagtgtgggagaagtttgacatggagattgcggctacaccaatgccagaaccataccagaacagaatggttcagattctctgcaacgactgtgggaagaaagcagaggtacagtaccatgtggtggctcagaaatgcccaaactgcaaatcatacaacactcgccaaaccagaggctgaagctttttttgaagttgatttgctatcaaatgcaattaagagcttttcacttgatccaatagtgtcattggatccttaacttgaggactgggtctctcgagtctatctcttctcactctcttcttcaatattctctgagtcgtctcttgttcactagtctatatgtttccttggtgttgtttgatggtctggttagtttccattgtgattcatctcctttgtaattctgcggctttattgaaaagtttcgtttaatctgttaaaaaccctaaaaaatttgaacttgtatgaataaaaaattttagctgctcgcct

SEQ ID NO: 35 - DNA, 2641 bp, Arabidopsis thaliana
  Clone ID: ARATH-23APR03-CLUSTER10406_1
gactcggaaaattcgaaaatcgagatcaaatgtcgatgatgacggtgtgggcacttcgacggaatgttcgtcggaaaaatcactcgatgctcgtgagatatatttccggctccgcatcgatgaagcctaaggagcaatgtattgagaagattttggtggcgaacagaggcgagattgcttgccggatcatgagaacggcgaagcgtttagggattcagaccgttgcggtttacagtgacgctgatagagattcgctccatgtgaaatctgcagacgaagcggtacggattggcccgccctcggctagacttagttacctcagcggtgtgactatcatggaggcagcggctcggactggtgcacaggcaatacaccctggctatgggttcttgtcagaaagttctgactttgcccaactctgtgaggattcgggtctaacattcattggacctccagcatctgctattagagacatgggtgataaaagtgcatccaagagaattatgggagctgctggagttcctctcgtgcctggatatcatggccatgagcaagatattgatcatatgaagtcagaagctgaaaagattggataccctataataatcaagccaacacatggaggtggggggaagggaatgaggatagtgcaaagtgggaaggattttgctgactcgtttttgggtgcccaacgtgaagctgctgcttcttttggcgttaacactattcttctcgagaaatacattactcgaccgaggcatatagaagtccagatatttggtgacaaacatggaaatgttcttcatctatacgaaagggattgcagtgtgcaaagaagacaccaaaagattattgaagaagctcctgcgcctaatatatctgaaaagttccgcgcaaacttaggccaagctgctgtctctgcggcacgggcagttggatattataatgctgggacggtggaatttatagttgacaccgagtctgatcaattttattttatggaaatgaacacccgtctacaggtcgaacatcctgtaactgagatgattgttggtcaagatcttgtggaatggcaaattcgggttgccaatggggaacctctccccttaagccaatccgaggtgccaatgtcaggtcatgcctttgaggccaggatatatgctgaaaacgttccaaaaggatttcttcctgcaactggggtcctcaatcattatcgccctgttgcagtctcaccatcagttcgggttgaaactggagttgagcaaggagacactgttagcatgcactatgatcctatgattgcaaagcttgttgtctggggaggtaatcgtggcgaagctttagtgaaactgaaggattgcttgtctaactttcaggtagcaggtgtacctacgaacataaatttccttcaaaaacttgctagtcataaggagtttgcagtgggcaatgtagaaactcattttattgagcaccataaaagtgatctatttgctgacgaaagcaatccagctgcaacagaagtggcatacaaggcagtcaagcatagtgcagcattggtggctgcttgtatctccacaatcgagcattctacttggaatgaaagtaatcatgggaaagttccatcgatatggtattcgaatcctccttttagggtccatcatgaagccaaacaaaccattgagctagaatggaataatgaatgcgagggaactggctctaacctcatatcactcggtgtaagatatcaaccagatggaagctatctcattgaggaaggcaatgattctccaagtttagaactcagagtaacacgagcaggaaagtgcgattttagagttgaagcggccggattgagcatgaatgttagtctagctgcgtacttgaaggatggttataagcatatccatatatggcatggttcagaacaccatcagttcaagcagaaggtaggaatcgaattctctgaagatgaagaaggtgtccaacacagaaccagctccgaaacatcatcacaccctccaggaaccattgtggcccccatggctggtttggtagtcaaggtccttgtcgaaaacgaagccaaagtagatcaaggtcaacctatattagtcctagaggcaatgaagatggagcacgttgtgaaagcaccatcctctggaagcatacaggacctcaaagttaaagcaggccaacaggtttcagatggcagtgctctattcaggatcaaagggtaaataacacgatttgcgattgatcaaccattcgctggcttacgcgaaacctgaactaataagcatttgggtgtgtatataaaccgaaatcttacaaaagataaataaatccaaagctttataaatgtttttactgcctctatatagatctgtgcggctagagattgaaggtaacttcttagtatacaaaatggtgattacattaataatcaagatagtccgagccatttcttgaatactaaaccagcttctctcttcttgagctgagactcgctctgaacttttggagctttgcctttataagcagtcttgtgatacttcaagaagagcatccgatacttgtacttatcaacaaacatattttttttaaaaaaaaaaaaaaaaagggcgggcgctcagaggaacaagct

SEQ ID NO: 36 - DNA, 2086 bp, Arabidopsis thaliana
  Clone ID: ARATH-23APR03-CLUSTER10417_1
aattacaacagcagcagtctcttctggtcaatccaactagtaagtaaaagacatcaattagcaaagactatgttttcaaattccataatatgatcttttgtttgttctaagaaggtatttcaaatgagaaaaaaaaaaaaaaaaaaaaaaaaaaaaaaacaaaaaaaaacaacaatctagaaggagttccagttaaaccaagagagggagcccaacatacaggacctgataatgtaggaggtgatttagccgggcactcaccaagcaacatcctcgctgctcaagcacaaggacctttttctgctgaacttgcatagaggttatgaaaaccccacaggcgaatgggacgagcattactcgtatctcaatgttgaaggcatggacgaagcatgtcaaggcgagttcaatgccaaatccacttacatcagccaaactctcttctggacactcccatcaataagcatatgacataattttgcacagactatgtgttcaaattccataaagtgatcgtttgtttgctccaagaacatattccgattgaagtggcaccaccgtattaccatcgggtagttccaacttagcccgcattatattaccttcttccgactcagccctagctcaccagccttgtcggtgtttgacctataagcagatttcaatggatcccccccttttctacgttcctcaacccattggatcttttaattgaagccagcaagaccttggatttcctgaatggcagcatggttttgacgggggaatatggtcggattggtccaagccttctgatatgcacaggcattcttcttctatttctccggctttatctcctcagccactcggctcatatggatcatatggccagaacatacccatggggtcacagcgacagagatcattttacggttttggatctggttcgaactcttataacagaggttatatgcatagtggtggtcgtggccagggttctaactatggaagtagactaatttctaatgtgggtatgggaaaccaaggctggattggggttgacaacagtcgagggcgtggaagggttagtgatccatctttgggtggtgcttataatggtacttttgatatcctcaatgagcaaaatcgaggaccaagggcttcaaagcccaagactcaggtcttagaggagcttgattctgctgctgattctaagaaaaataacaaaggcagtgcaaaggagcacgaggaatccaacaacgcagactttgtcaccgactacactaacgccaagttgttcatcatcaagtcttacagtgaagacaatgttcacaaaagcatcaaatacaatgtatgggctagcacccctaatggcaacaaaaagcttgacgctgcttatcgtgaggccaaggatgagaaagaaccgtgtccactttttcttctgttctcggtaaatgcgagctctcaattctgtggtgtagcagagatggttggacctgttgattttgagaagagcgttgattactggcaacaagataaatggagtggacagttcccagtgaagtggcacattatcaaagatgttccaaacagccagttccgccacattatattggaaaacaatgacaataagcctgtgactaatagtcgagacacccaagaagtaaaactggaacagggcatcgagatgctgaagatcttcaagaactacgacgctgacacgtcaatcttggatgatttcgggttttatgaagagcgggagaaaattatacaagaccggaaggcaagaagacagccaagcttgccatctgcaggagtagtagcaggagaaaatgaacataaacctgcttctgctgcattacccacagacttcatgaagaacatgtccaagagttttgcgcaagttgtccgcttggacgaaggcagcaaagaagcagtcaaggccagttcatctccagatgcaattacaacagcagcagtctcttctggtcaatccaagtctgaccgggtctggtttttgtgtaaagtaagcctctttcctccgcccttttctgcttcaggggtatttagccaaaatttgattcatttccctcttttcaatgttctataa

SEQ ID NO: 37 - DNA, 3422 bp, Arabidopsis thaliana
  Clone ID: ARATH-23APR03-CLUSTER1042_1
gatagagttgtgttgggagagcctatgtcactaacccctttgtctgcccctctttcggagcgattcttttctcattctttcgtcggactctctgtctccttttgacggcggcaccaacgacaaagcaagcaagcagtgataacatctatctatctctccgtctaaaccaattgattaggctagatcccaattcttcgagtatcgattcttcttcaatcctttttatgtgaatattctcctaaagcagcaacctcttgggttcttcttcttctggtaactgatggggaagaaagcgaagaagaaggcccgagctccaacaaaggagattcagaccatggaaatttccaagaaggtctcagaagagccgcctagtcaagccggggaaattgctgagggtgacgttaaagcagttaaggagacacaagcttgtgtgcatttcgataaggctcttaatttggagaaggtgttggataagattaagtcatcccggcagattaagtgtgcagaatgcaatgaaggagtgtatggaaagagaggaactaaagcaaagggcagtaaagggaagaaggatttttcttcttctgatccaaaatctaataacaaagccatttggctatgtttggaatgtggctgttatgtttgtggaggtgttggtttaccaaatggacctcagagccatgttttgcgacacagcagagtgacacgtcaccgattggtgattcaatgggaaaatcctcagttaagatggtgtttcccgtgccagttgcttctccctgttgaaaaagaagataatggcgagaagaaagatgtactgtcagaggttgttaaattgattaaaggacgatctttgaacaatttagcttcatccgatatcgaagatcagtgctcaggaagtggcagtatcactagtgatatcaaactagaaggtgctgtgaccagtgatatagaagcaagagatggttatgttgtgcgaggtttagttaaccttgggaacacatgtttctttaattcgataatgcagaatcttctttctttggatcggttacgcgatcacttcttgaaagagaatgggtctggggtcggtgggcctcttgcgtcttccctgaggaaattattcactgaaacgaaaccagaggcaggcttgaagagtgtgataaatcctagagccttttttgggtctttctgttctaaggcaccccagttccggggatatgaccagcatgatagccacgagttgctacgctgtttgctagattcgttgagcaccgaagaatcggccttgagaaagaagcgtggtgtttctgataatgatgagaaatctactactctcatagaatctgtatttggaggcgaaacgtcgagcattgttagttgtatggagtgcgggcattcctcaaaagtctatgaaccatttttggatctctccttacccgtaccattcaagaaaagccctcctaaaaaaccacaacctgtttctcgagcaaaaaagctaagcttccacctaagagagtcccaaagaatgtgtcaaaagtaagtaaggtttcaaaagttctcccaggtatggttctttcggaactgaactcttccggaaaatctatggctgtcacagctgattcggatacatcctgttccagtttagcaccccttgataatggtccggttttagaaactccttcagttctaacccttgacaataatcaggcctcagaaagtgcatcacaaagtgatactggtttcgatggctcctggttggattttatcggaccagaaacctctggagatgagacgaatttggatatgcaagaagatggtattgataatgtcattacagctgaggttaatcaaattgttcccagtccaaatattgtggcgaatagctcagtttcatcgggtgatcagactttggaaggtaatacagagaggctgatgcaagattatgaagaaattgcaaaggcggaagccaatttggatgaaaaagatgtacaagctatgcagtctgatgaatgcccagctacaagtggtatttctgctgaattcagtcaagctagttgcattggttgtgatcctggtataggggaaagttcttcctcggtgaatccttgggacgaggaagagcttcctttggtggttgcagattcgcaaattttgtacatgccatacaaagaaatatcctgtaatgataaatcagttgaaggtgagtgtgaagcatcatcttcatttgttactggtgatcatgaaccacaaaacagtgattttgttgattttggcggtttatttgatgagcctgagactactgagggacctgtttttggacctccttccaaggctgaagcctcgggagttggttttatggcgttcagcagcgagtctgatcctgaagaaatcgatgattcggatttaccggtgtctgtagagaggtgtttgggtcatttcacaaaacatgagatactgtcagatgacaatgcttggaactgcgagaactgttcaaagaacctgaaactccaacggttgagagaaaagcgaaaatccaatgaagatgaatcgagatcaagcaacaccagcaacggatgggtgaaagaaaatgaagatgaaggttttggagaaaccgaaattttggctgttaaacaagatccaaatgatactagttgtgtcaaggatcatagctctgatggaagaaaagctgcgaggattcactcagctgatgaaagtgaatccaaaggaactcaagatgaagacgaagattctgagaaggtgattacagtgaagagagatgcaactaaaaaagtacttataaacaaagccccacctgtcctaaccattcatctaaaacgattcagccaagatttgcgtggtaggctaagtaaattaaatggtcatgttgctttcaaagaggtcatcgatcttcgacaatatatggactcaaggtgtagcggagaagacccgcccgtttacagactggctggattggtggagcattcagggacgatgagaggaggtcattatgtggcgtatgttagaggaggtcagcgggttaaagagactgattcctcctccactgcgtggtataacgtaagcgatgcatatgttcgtcaggtttcattggaaaaggttctgcattctgaagcgtatatcttgttctatgaacggatcttctcacaagaatgagaaattattttgtttccattacgaaaggaaagaagaaaaccagttttgatcttcttccttacaatagcttttgctgggaaagtttttgacgatcacattagatcaaataccattaattttgttttttcttattatattttggagtcatgaaatttcattatatgtatcatcagaaacatttctgaaagtatttgagcctctccaatgagttacattcttttaaacagaaaaagagttggttctagattcgcaaaaaa

SEQ ID NO: 38 - DNA, 2611 bp, Arabidopsis thaliana
  unsure (1)..(2611): unsure at all n locations
  Clone ID: ARATH-23APR03-CLUSTER10479_1
tgtttattttttagaaagggggcccgccaagtcctctccctgtctcatttccgcgccgccggccgcccccccactcctcgggggggtgggccccccctccgcgcccccccccgcccctcgccattcacctttgggcgcccttccctttgccgacccgggggaacccgcaaacaatcttcccccccgccacatttctcgctcctgccttcccccaaccctgcttcttatccccccctcacgggaacaaacacccggaacccccccgccccgcgccggccgtcccccccaataccgcgatccccccgcctgcccggaattcgccccccgggagagcaaaaanacaganaaaaaaaannnagaattccaatagttnnnccccccccccccccccgtaaaaaatcactaactcatgactagtcataacctttaaatcacttctgctttttttctgtttctcttttgatttattcaaagacaacaaagttttgtttttgacaaaaaatctgatctttgtttgtttgtttgtttgttacatggggatgaagaaacaatggcaaccggagaaaacagaacggtgccggacaatctaaagaaacagctcgcagtttcagttcgaaacattcaatggagttatggaatcttctggtctgtctctgcttctcaaccaggagtgttggagtggggagatggatattacaatggagacataaagacaaggaagacgattcaagcagcagaagtcaaaattgaccagttaggtcttgagagaagtgagcagcttagagagctttatgaatctctctccctcgctgaatcctcagcttccggtagctctcaggtcactagacgagcttccgccgccgctctctcaccggaggacctcaccgacaccgagtggtactacttagtatgcatgtctttcgtcttcaacatcggtgaaggaatccccggaggagcgttatccaatggagaaccaatatggctttgtaacgctgaaaccgccgatagcaaagtcttcactcgttctcttctagctaaaagtgcttcgcttcagacagtggtttgcttcccgtttcttggaggagtccttgagattggcacgaccgaacatattaaagaggacatgaacgtgatacaaagtgttaagacgttgttccttgaagctcctccatatactacaatatcgacaagatcagactatcaagaaatttttgatcccttaagtgacgataaatacactccggtgtttataaccgaagcttttccaacaacttctactagcgggtttgagcaagaacctgaggatcatgattcgttcatcaacgatggtggtgcgtctcaggtacaaagctggcagtttgtgggtgaagaaatcagtaactgcattcaccaatcgttaaattcaagcgattgcgtttcccaaacgtttgttggaacaaccgggagacttgcttgcgatccaaggaagagtaggattcaacggttaggtcagattcaagaacagagtaaccatgtaaatatggacgacgatgttcattaccaaggcgtgatatcgacgattttcaaaacaacgcatcagctaatactcggaccgcagtttcagaacttcgataagcggtctagcttcacaaggtggaagcgatcatcatctgtgaaaacattgggagagaaatcgcagaagatgataaagaagatactcttcgaggttcctttgatgaacaagaaagaagagttgttaccggacacaccagaggaaaccgggaaccatgccttgtccgagaagaaacgccgcgagaaattgaatgaacggtttatgacattgagatcaatcattccctcaattagtaagattgataaagtgtcgattcttgatgatacaattgagtatcttcaagatttacagaaacgggttcaagagttggaatcttgtagagaatctgctgatacagagacacggataacgatgatgaagaggaagaaaccggatgatgaggaggaaagagcatcagcgaattgtatgaacagcaaaaggaaggggagtgatgtgaatgtaggagaagatgaaccagctgatatcggttatgctggtctaacggataacttaaggatcagttcattaggtaacgaggtggttattgagcttagatgcgcttggagagaagggatattgcttgagataatggatgtgattagtgatctcaacttggattctcactcggttcagtcgtcaaccggagacggtttactctgcttaactgtcaattgcaagcataaagggacaaaaatagcaacaacaggaatgatccaagaggcacttcaaagggttgcatggatatgttaaggattcaaggtttagatttgacaaaattagctttttctctggtttggtttcccaattttcggtaatcagtgattctaaccgagtttttgtgattttggaaaaaaaaaaaaaaaaaaaaaaaaaaaaaaaaatcgttccttttggctccttacgtaggggaaggcaataagaaaccccccaattttaaaaaaaaaaaaaaaaaaaaaaaaaaaaaaaaaaaaagaaaaaaaaaaaaaaaaaaanctcgagggggggcccggtacccaattg

SEQ ID NO: 39 - DNA, 1956 bp, Arabidopsis thaliana
  Clone ID: ARATH-23APR03-CLUSTER10484_1
gcatttggattgatgccactttaatactttgaggttctcactctctctttctctcttcgtctccttctccttctctctccgcctactttctcaggactactcctattcgccgactttttctcctctgttctctgcatttggattgatgccactttaatactttgaggatcaagacttcgtaaaagattgtttctgtaaaacgcaacaccatgcctctgtttgagcttttcaggctcaccaaagctaagcttgaatctgctcaagacaggaacccttctccacctgtagatgaagttgtggagctggtgtgggaaaatggtcagatatcaactcaaagtcagtcaagtagatcgaggaacattcctccaccacaagcaaactcttctagagctagagagattggaaatggctcaaagacgactatggtggacgagatccctatgtcagtgccatcactaatgacgggtttgagtcaagacgatgactttgttccatggttgaatcatcatccctcccttgatggatattgctctgatttcttgcgtgatgtgtcgtctcctgttactgtcaacgagcaagagagtgatatggcggtaaaccaaactgctttcccgttgtttcagagaagaaaggatggcaatgaatcagctcctgctgcttcttcgtcgcagtataacggtttccaatcgcattctctgtatggaagtgatagagctagagatcttcctagccaacaaaccaatccggatcggtttactcagacgcaggaaccactaattactagtaacaagcctagtttggtcaacttttcacatttcttacgccctgcaacttttgcgaagactactaataataaccttcatgacactaaagaaaagagtcctcaaagcccgccaaatgtgtttcagaccagagttcttggagctaaagactctgaagataaggttcttaacgagtctgttgcttctgctacgcctaaagataaccaaaaggcttgcctaatatcagaggactcatgtagaaaagaccaagagagtgaaaaagcagttgtatgttcttctgttggctcgggtaatagtctcgatggcccatccgaaagtccttcactttctttaaagagaaagcattcgaatattcaagacattgactgtcatagtgaagatgtggaagaagaatcaggagatggaagaaaggaagcaggtccatctcgaacgggtttgggttcaaagagaagccgctctgcagaagtgcataatctgtctgaaaggagacggcgtgataggatcaacgagaagatgcgtgccctgcaagaactcattccaaactgtaacaaggtggacaaagcttcgatgctagatgaagccatcgagtatctcaagtcactccaacttcaagtgcagatcatgtcaatggcgtctggttactatctgccaccggcggttatgttcccaccgggtatggggcattacccggcagcagctgctgcaatggcaatgggtatgggaatgccttatgcaatgggcttgcctgatttgagccgtggtggttcatcggttaaccacggaccacagttccaagtctcggggatgcaacaacaaccagtggcgatgggtattccacgtgtctctggtggtggtatctttgccggttcttcgacgattggcaatggctcgactagagatttatctggttctaaagatcaaacaacgacgaataacaacagtaacttgaaaccaataaagagaaaacaggggtcttctgatcagttttgtggatcgtcgtgacataaatacaaacttatgaactgatgtattgtttatttgtagcattcaaacaaatctattttataatcctaaacaaaattaatttgtgttcgttataacagtgaagagctttgtgcttattggtgggttctgttctgtttcttgttttgaattaaaaaatgtttttaatatt

SEQ ID NO: 40 - DNA, 1617 bp, Arabidopsis thaliana
  Clone ID: ARATH-23APR03-CLUSTER105052_1
atcaattaggaaagagagagagataagaagaaggagcgttgttgtctctttcactcgcatcgagaaagtagaaaactcatcgtcggagatgacgaagaagccacatctccgatcaaaggattcttctctcggagacgaagacgagaaactctacgagaagaagattctggatctggagtccgtaaacgaagctctcaagagtgatgtggaagagctaaggtcaaaattggctgatgtttcgataagctcatcggttgatacgttacagtcaagcagagagtttactcagaagtctattgctaacaaagaggagggtgtgagttcaaggagtaagtcaaatatgcggtctatttgctcgacaaagaagtataaaactgagagttctgttaagcagtttgatggtgaagttcagaaattgaaggcgcaaaaggttaagttgcactgcaagatcaagctagactctatgcagttcagactattgaaagcttcactagaaaaggaagttcttcagctcaaaaaagagctaaggaaaagtgagtttgagaaacatatcctgtcagctttgaacaatcgccagaagctgattttgcagctgaagaatacacaagctttgacagccctgaagcgcctaaaaatgctgcttcaatctaaaaagatttcttccaacaaaaagaaaggcccatcaaaaggaacaagctccgagattcaggactctagcaatgaatcaggcctactaatgaaactgaataaaattcattctgattacgaacgccaaatgaaagaaatggctgaagagatcaaaaggttcagcttagaggcaggtgtgctgaaggcagaatttgagggagagcaaagctcatgttctgcgtcttgtgacaaccaaatcaaccacactccaatggactcagaactaaaggaactcaaagaggaatttaacagactgagtactcttgtcagccagatggaaatgaccaaatctcaattcagtgaaactgataaagttcagagcgaaccagtggaacgctctatcaccagcaagaatatcgacgatgaatcaaactcggagccatttcaaccggaaacttctgaggaaacactttgcaaaaaggaacagagcaaagcagaagtgtgttgctcttgcactaaaaaatctttgtgcaagaccaaaagttgcaaatgcaaggcaaatggaagtggatgtggggactcttgtggctgcttagcttccaaatgtagcaacagagaagaaagtgcgaaacccgacaaaccaatggaaccaatagatgttaagaagcctgctggaattagccatgacgacaaaggcgcaaacaaacaaccattacgtgacatagggaatatacaagaagctgtaaaagttggtaagttgaggaaagtgcagaaacgggttggtaagaaataatgaaaatgataaaaggatatgaaagtaaacagagaaacactttaagaagcttaaacgtttttcttttggtttatataccaaaaccgctgcaatcattatctaaacgttgtaaaagaaaaggtgtctcagacatttggctatgaatcgtttgattttagagctattttgcaacttgaggtcaaaaaaaaaaaaaaaaa

SEQ ID NO: 41 - DNA, 1449 bp, Arabidopsis thaliana
  Clone ID: ARATH-23APR03-CLUSTER10537_1
actttgtaataattttctttaaaaaaatagaaacgttggtcacgaggcctcatcaatgcttttgatacgttccttcaccgcaatttctaactaacgaccaccgtcgaagctttctctttccgatctttcaatggcgattctcaaatctcacttcttcttactcttccctcttcttcttctccactttcacactgtctcctttgctcagacgctttttgtgttcggagatggtctttacgacgccggcaacaaacagtttctctctcagaaccgagttgacgcaagctttcctccttatggagtcactgtaggacaagccaccggacggtgttccgatggttctatcgttcctgattatcttgctaaattcatggggattcctaaaatctctcctattctcgtaaccacggcggatttttctcacggagctaatttcgccatcgccgacgctaccgttcttggctctcctccggagacgatgactttgtcacaacaagtgaagaaattctcggaaaacaagaataagtggacaaatcaaacacgttctgaagcgatctacttgatctacattggttctgatgattacttgagctatgctaagagtaatctaagtccatcagataatcagaaacaagcttttgttgatcaagtcatcactaccataaaagcagaaataaaggtggtttacgggtctggcggaaggaaattcgcattccagaacttggcaccgttaggttgcttaccggccgtgaaacaagcaagcggaaatgttgaagaatgtgtgaaattgccttcggaaatggctgctttgcataacaagaaacttttgcagctcttggttgaactatcaagagaactaaatggtttccagtactcgttttacgacttctttagctcgatccaaaacagagttatcaagtctaagacttatacattcgagacaggaaacgctgcttgttgtggaactggctctatcaacgggagtgattgctcagctaaaaatgtatgcgccaagcctgaagagtatatcttctttgatggtaagcatttgacgcaagaagccaaccttcaggtcgggcatttgatgtggggagcagatccggaagtgattggaccgaacaatatcagggagcttatggtccttcctctagacattacagtcatcttagctggtatacaagaagctatggctgccatgagaccgagacagagcaacattgagagtctctatgatatcaagaagatggagtcagagatggataatcattggctttatcaagttgacaaagctatctcctttatgatataagattgtggttacagtttgatttaagcgagagagtttaagagctagtgtaacaaagaactagcaagaaaactgaaacatccatttttcttgtttagtaataaaacaatcaaccttattaagtcgaaaaaaaaaaaaaaaaa

SEQ ID NO: 42 - DNA, 3291 bp, Arabidopsis thaliana
  Clone ID: ARATH-23APR03-CLUSTER10560_1
gaaaaatacatacagatacagtcgtcgttttgattagtgaaccgtcgaatagaaaaagagagaatcattcagagcactttaaaaaggttaaaaaagtcaagtattaaaaaaagatgatgcgctttcataaagcttgtcatcgtttctctctttcacctctctgccatttatctccgccgtctccgtcaccggcttcttctctccttctacttcccaagctttccggattctcgactctgagtacacgacgttgcgtaagagttcgccgattctccgaaaacccgttgaccactgtcatggcttcacgttctgcttctaggcttcgttctctcgcatctgcctgttctggaggtgctgaagacggtggtggaacctctaatggctccctatcagcctctgctactgcaactgaagatgatgaattggctataggcactggatatcgtctgcctccacctgagatcagagatattgtagatgctccaccagtcccggctttatcattttcaccacatagggataagatattgtttctcaagcggagagcattgcctccgctcgcagatttagctagaccagaggagaagcttgctggtgttcgaattgatggatactgcaataccagaagcagaatgtcattctatactggtttaggaatccatcagttattgcctgatggtacattgagtcctgagaaggagatcactggcattccagatggtggtaagattaactttgttacatggtccaatgacggtaagcatctggctttcagcatccgggtcgatgagaacggaaatagtagtaagccagtggtatgggtagctgatgttgagactggagtagctagaccattgtttaactcgcaagatatttttctgaatgcgatttttgagagttttgtttggattgataattccactttgttggtgagcacaatcccttcatctcgtggagaaccaccaaagaaacctttggtgccatctggtcccaaaactctgtcaaacgagacgaagactgttgtccaagttagaacattccaagatttgcttaaggatgagtatgatgctgatttatttgactactacgcttcatcacaactagtattggcttctttggatggtactgtgaaggaagtaggggttcctgcagtgtatacatcgttagacccttcgacagaccataagtacttgttggtgtcatcacttcacaggccatattccttcattgtaccttgtggtagatttccaaagaaggtggaagtctggacaactgatggtagatttgtaagacagctatgtgacttgcccttggctgaagatatccccattgcctccaatagtgtgcggaaaggaatgcgttcaataaactggcgagcagacaagccttcaaccctctgggcagaaacacaagatggaggtgatgccaaaatggaagtttcaccgcgtgatatagtttatatgcagtctgctgaaccattggcaggagaagaaccagaagtgttacacaagctcgatcttcgttatggagggatttcttggtgtgatgatacattagctctggtttatgaatcatggtataaaacacgacgaacaaggacgtgggttatctctcctggatctaacgatgtcagtccacgcatcttgtttgatagatcatcggaagatgtgtactcagaccctggctcaaccatgctgagaaggaccgatgctggaacgtatgtaatagcaaagataaagaaggaaaatgatgaaggcacttatgtattactgaacggaagtggggctacaccacaagggaatgtgcccttccttgacttgtttgacataaatacaggcaacaaagaacgaatctgggagagcgacaaggaaaagtatttcgagacagttgttgccttgatgtctgaccaaaaagaaggggatttaaaaatggaggagctgaaaattctgacatcaaaggagtctaaaacagaaaacacccaatattctctccaactttggcctgataggaaagtgcaacagattacaaactttcctcatccgtatccgcaattggcttcgttacagaaagagatgatcaggtatcaacggaaagacggggttcaacttactgcaacactatacctaccaccaggctatgatccatcaaaagacggtcctcttccttgtctgttttggtcttatcctggtgaattcaagagtaaagatgctgctggtcaagtccgtggctcgccaaatgaatttgcaggcattggatcaacttctgcccttctttggcttgctagaaggtttgctatattatctggacctactatacctataattggtgaaggtgatgaagaggctaatgataggtatgtagagcaactggtggcaagtgccgaagctgctgtagaggaagtcgtcaggcgtggagtggctgatcgaagcaaaattgcagttgggggacactcctatggagcttttatgactgcaaatcttcttgctcatgctcctcatcttttcgcctgcgggattgccagatctggggcttacaacagaacactcacgccctttggtttccagaacgaggaccgaactctgtgggaagccactaacgtctatgtagagatgagcccattcatgtctgctaataaaatcaagaagccaatcttacttattcatggtgaagaagacaataacccaggaactctaacaatgcagtcagaccgattcttcaatgcactaaaaggccacggcgctctttgccgtcttgttgttcttcctcacgagagccacgggtactcagcacgggaaagcattatgcacgttctctgggaaactgaccgttggcttcaaaaatactgtgttccaaacacatcagatgcagatacaagtcccgaccagtccaaagaagggtcagattctgcagacaaagtatccacaggcacaggtggtggtaatccggagtttggtgagcatgaagttcactccaagctcaggagatcacttctctgagttcccaaaagtggttcactagccacatgcagcatgcgagtgcacttgcagaaacagagagcacaaaaaaaggcagatgcaacacaaacttatttttcatacaaaacattgattcataataatatgaaaaaaagtttttgaattacttgaaatgctggaaacactctttcaagtgcaaaacttcgatcaataagtttcataaatattcaccttttgtaatttctcgaaacaaaacaaaagagattatgtctgaatgaacatcacatctgaatttgttacaaatcccaaaaaacaa

SEQ ID NO: 43 - DNA, 2423 bp, Arabidopsis thaliana
  Clone ID: ARATH-23APR03-CLUSTER10569_1
tacagttaggaccctggaacagacacgacactattcaaatcttgacgaagaatcatttgcgaactatctttcaacttctacaatcgtcattttgatcaagaatagtaaaaccgtctaagggattcagtgggattggttctagtatagtaacgaagaagctcgtgactctaggttcaagcaaaagggaaaggatggttatatctttaagcctgattctggaggaaagatttatgaggaacatagaccagtttttgaggaagggaatgaaatataagaataacaattttaatcactacaggtcaagttcactagagaagattttcaagggacaaggctgaatcattaagaaagatcagaacatttttgatttccaatttggtatgagggacatcaaagcaagaattgtatattatgcgagatagttcacttgtgttctgattccctattcaccacaaggctaaagacgtacattatttcgcattttcagcttcggaatctgataaggtccatatctaatcatgttagatattttatggaaaattattcactcatgcactggtcatctctactctagagagggtaggaagtagttaatgtcacctgatcagttacccccactctcaaactacctggattgttttctgagccactctctagggtgcaagttagcagcatggcagtcaaagaaaatctgatccttttaggagggttcgacggggagcttctctgcaagtgtgtaaatcagcctggggttgctttttgcacaagattatcaacggaagaaaatgccatcacaaacacagttgataatacctcagttagcccggatgggaagctactcgctgtactcggggacagtacagaatgcttgatctctgattcccattctgaaaaagttatttcaagcctcagaggccacaaagactactcatttgcatctgcttggcacccgaatggtctaatcttagcaacgggaaaccaagacacgacatgccgtctctgggacattcgtaacccgtcagaatcattcgctgtcctgaaaggaaacatgggagccatcagaggactgaagttcacaccagaagggcggtttcttgcaatggctgagcctgcagactttgttcacatcttcgacacgcagtccgggtttctacagtcccaagagattgatctgtttggagaaatagccgggatctccttcagccccgactcagaggcactattatgttgggggtcgcagaccgcacttatggaagcttgatggagtataagaggaagtaaggataatcactatatggactccttttactgagaaaaggtaaatggaaagtaaaaagcatctaatatgttgtcacaagttgggttttaccctattagtgtgtatatgtagacagaattggtagtttctttggttatgtatgttgtatgtaacccataatatatcttgccaaactttaagtatgttttgttaagtaaaatagctttaagtaaatatatgaaaaaaattatcaacggaagataatgccatcacaaacacagttgatatataccgagacccaagtggctcccttaggcttataaccgcaaataacgactgtaaaattcgtgtattcgatgctcagagctttacacgtgtcagtgaatttgctttagattggtctgtcaataatacctcagttagcccggatgggaagctactcgctgtagtcggggacagtacagaatgcttgatctctgattcccattctggaaaagttatttcaagcctcagaggccacaaagactactcatttgcatctgcttggcacccgaatggtctaatcttagcaacgggaaaccaagacacggcatgccgtctctgggacattcgtaacccgtcagaatcattcgctgtcctgaaaggaaacatgggagccatcagaggactgaagttcacaccagaagggcggtttcttgcaatggctgagcctgcagactttgttcacatcttcgacacgcagtccgggtttctacagtcccaagagattgatctgtttggagaaatagccgggatctcgttcagccccgatacagaggcactatatgtaggggtcgcagaccgcacttatggaagtttgctggagtataagaggagaaaggataatcactatatggactccttttactgagaaaaggtaaatgaaaagtaaaaagcatctaatatgttgtcacaagatgggtttaaccctattagtgtgtatatgtagacagaattggtagtttctttggtaatatctgttatgtacccataatatatcttaccaaactttaagtatgttttgttaattgtgattgtttttactatttaggggtccgagacttgtagattaaacaggccatatacggcattgtgcttgggtttgagactccacatttgtcaactc

SEQ ID NO: 44 - DNA, 2694 bp, Arabidopsis thaliana
  Clone ID: ARATH-23APR03-CLUSTER1056_1
ggtttgttgctgggcgggtctcttccctcggcagttaccttcatcgaattcgatcttcatcttcttccttccccaactctttcaaattcgtgaaaatcttcctttaatttcgactacaaattgattggaggaagcccccaaaacgtgaattagaagagaaagagaaaagcgaggaaaacgcgtggtgacaaaagatgcgatcgcagctgttggcttggccgcggcggcgagtcagcgatgagcggttgcttggttggttttctccggcggagaataaccgattttgaatgggatttaaactgcagatgagctggatgccgagtctactgagtcaaaagcgtaggaatggtcctcccttagggttacggaatctcggcaacacctgttacctcaatagtgtccttcagtgtctcactttcactcctcctctcgctaatttctgccttactcacaaacactcctctcactgcgacacatatgtggatggagagaggaaaagggattgtccattttgcatagttgagaaaagaatagcaaggtctcttagtgtggatctaactaccgatgcgcctaacaagatttcaagctgtctcaaaatttttgctgagcattttaagcttggtcgtcaagaggatgctcatgagttcttgcgctatgtcattgatgcatgccacaatacgtctctcagactcaagaagttgcgatacaacggtaacgagccctttaatggcaatagtgtcgtgaaggagatttttggtggtgctttgcagagccaggtcaagtgtttgtcttgtggtgcggagtctaataaagccgatgagattatggatatcagtcttgagattttgcagagtagctctgtgaaggagtcattgcaaaagttctttcaatcagagattttagatggcaacaataagtatagatgcgagtcctgtgaaaaactggtgacggcgaggaagcagatgtctatactgcaagcgcctaatatccttgttatccaattgaaaaggtttgggggcatttttggtgggaagattgataaagccatttcatttggtgagattctggttctctcgaacttcatgagtaaagcaagcaaggaccctcaaccggaatacaagctctttgggataattgtgcactcaggattttctcctgaatctgggcactattatgcatacgttaaggattccttgggtcgatggtattgctgcaatgattcgtttgtctcgctctccaccttgcaggaggttttatcagagaaagcttatatcctgtttttcagccgttcaaaccagaggccagcgtctgctaaaactctggtaacatccaatgggactacatctcatgaagttaatggctgtgagacatcaaatccccagaagtttattgggccccttaatggtttcaacatgaaacctcaagccgagcagtccttccagaagggtaacctggcttcttcaaagccccataaatttattaggcccaaaccacgagccgagcaggccccactagaggataacctgctttcttccaaagttgaaaaggcgcctttaaggccacatgcgaaagtcagtatatctgtcaaccttggtgccaaaagggtctctcctgtcaatggtagactttctttccaccaagatgagaacatagctccaaaggcaaacaaagagaatagtgtatcagttttgccgactaaagttaactctggtacggagagaaagtttggtactgaaaatggtggcaatggagttaaagaaaacggcagtgcaccaggtagtagtaatcataaagtggcattgcatcctcatgagcggagtaatggctccagcaatgggggtgatcaccacaaggataacttacatccatgtggaagtaatggctcacaaaatggaactgctcaccccgaaactgagaggaacggtgttagtaccacccaatccaaaggcttgtgttcttcaacaaaggaagacccctgcattttgctgagaaaagacgaatcatctcggaatgaacttgaagcaataaaagagagcctgaaaaaagacgcgctgtcacatctacgttcatgcggatggtatgacaaggttctcatctccatgcatgccaagaagagattgcgtacagagcaatcaggtggagaagatggtagcgacttgaaaaggaggttgattgaagatgtgaaatcaagtttgaaatcacagattccagaggagttgaaagcagatctggtaaatcgtatctgggagattagcaagaagaagtactcgtgaaccattgttttttgcttcaacaaaaatgactcgaatctctggaagcatgaagcctctacttggtcccttcacacacacactcctcattcctcatttcatcattgcttaacccatccggctagtctgattatacagagtgagcggatcgagattttttcctgcgactgtgatgatggtgaagtgagtttttttcttttctattattattacatttttggaagagagtaaaagtaattaccggaaaaaaaaagaaaaaaaaaacagatctcattctgtataatataacgccttcttgttttttgcctcttatcgatgaagctttacacaaatatacaaaaactgtggaaatttttagtataagaacgttcttgaatttgtgtattgtatttgtggtttttcgttaaacatattaacatcggac

SEQ ID NO: 45 - DNA, 2557 bp, Arabidopsis thaliana
  Clone ID: ARATH-23APR03-CLUSTER10585_1
ggaggtcctctttctcttctcctccggttgattcagtccttttaacactcctcttttgatctcgccggcaaatatcatcccacatccttcatgtctcaaaatctccgtcatcgttctcttccttcgttattactctcgtactttatcacctccgtcgttctataatactctcttccgtcaatcatatcatttgtcgacaatttcattctgatcagtttaaaaattgatccatggatgataatttaagcggcgaggaagaagattactattactcctccgatcaggaatctctcaacgggattgataatgatgaatccgtttcgatacctgtttcttcccgatcaaatactgtcaaggttattacgaaggaatcacttttggctgcacagagggaggatttgcggagagtgatggaattgttatcggttaaggagcaccatgctcggactcttcttatacattaccgatgggatgtggagaagttgtttgctgttcttgttgagaaagggaaagatagcttgttttctggtgctggtgttacacttcttgaaaaccaaagttgtgattcttccgtttctggttcttcttcgatgatgagttgtgatatctgcgtagaggatgtaccgggttatcagctgacaaggatggactgtggccatagcttttgcaataactgttggactgggcattttactgtaaagataaatgaaggtcagagcaaaaggattatatgcatggctcataagtgtaatgctatttgtgatgaagatgttgtcagggctctagttagtaaaagccaaccagatttagctgagaagtttgatcgttttcttcttgagtcgtatatcgaagataacaaaatggtgaagtggtgtccgagtactcctcattgtgggaatgccatacgtgttgaggatgacgagctctgtgaggttgaatgctcttgtggtttgcagttctgtttcagttgttcatctcaagctcactccccttgctcttgtgtgatgtgggaactatggagaaagaagtgctttgatgagtccgagactgttaattggataactgttcacacaaagccgtgtcccaaatgtcacaagcctgttgaaaagaatggtggatgcaatctcgtgacttgtctttgtcgacaatctttttgttggttgtgtggtgaagctactggaagggaccacacttgggctagaatctcgggtcatagttgtggtcggttccaagaagataaagagaaacaaatggagagagcgaaaagggatctcaagcggtatatgcattatcataaccgatacaaagcacatatcgactcctccaagctagaggctaagcttagtaataatattagtaaaaaggtgtctatttcagaaaagagggagttacaacttaaagacttcagctgggctaccaatggactccatcggttatttagatcaagacgagttctttcatattcataccctttcgcattttacatgtttggagatgagctgtttaaagatgagatgagctctgaggaaagagaaataaaacaaaatctgtttgaggatcagcagcagcagcttgaggctaatgttgagaaactttctaagttcttggaggaaccttttgatcaatttgctgatgataaggtcatgcagataaggattcaagtcatcaatttgtcagttgcggtcgatacactctgcgaaaatatgtatgaatgcattgagaatgacttgttgggttctctgcaacttggcatccacaacattactccatacagatcaaacggcatagaacgagcatctgatttttatagttcccagaattccaaggaagctgttggtaagtcttcggattgtggatggacgtccaggctcgatcaagctttggagtcagggaagtcggaagacacaagttgctcttccgggaagcgtgctagaatagacgaaagttacagaaacagccaaaccaccttactagatttaaacttgccagcggaagccattgagcggaaatgaacacttatccttcttcacctcccaataacaccctttttgtccaaataaagtgtgttacccggatatttatagctctaaacccaatcccctctgcttaatttgtcagtgaccttacctaaccctcttcagttctgaaagaaggggtcaagcatcgttacttacaaaatttcaatcagtttcggagtttacataggataatggttatagacttatagtggatcatatttgaagctgcctatgaactcaggcttctctcagtgcctcgaggtgtaaatttttaactaaacgtaggtggatcgtacctaattcatggatatgaatctcttgtacatatgcgttatatatttgagatggtatgaggtttttgttgtgacggtgagagagtgtcccgcaatctgaaaaattggctaaccttagtttttcactttttctggttgtaatttttttattgaatgcatcccctaaaaaattttgtttggtgagatacctattgaatctctcactaatataattttattatttttggttcacttaaaaaaaaaaga

SEQ ID NO: 46 - DNA, 551 bp, Arabidopsis thaliana
  unsure (1)..(551): unsure at all n locations
  Clone ID: ARATH-23APR03-CLUSTER106113_1
aatttttcccacatttttctctcatctgcctacggttgcagattttattttattaacacagaaaaacaaaaaaaagtataaacagagtccacgaatttgggaaagtttaagatcaagacatgaagaaaactggaatcatcgcagcctccatctctgtcgcggcttctgccacggcgatctccgccggctctaccaacacctccgtgtcattctcttcgccggaatctaatctctctcgtcaggaggcaaaggaaaaacagaggaagaagaagggttcgtcggaagatgggggagatgagaagtttgctccaaggtttgatgggttacgattcatcgagacgcttgttactgctcaccgataacatttgcattgttctgatttgtaagggttcttattgtttaccccatttgattaactacaaagatttactgattttaagtttcgttttttttctttctttcacatcactattgtaacttcggcttaaagtgtaccaccaagacaagaggcatgatttatgaggtcaaaaagatctacantttgggttccc

SEQ ID NO: 47 - DNA, 2223 bp, Arabidopsis thaliana
  Clone ID: ARATH-23APR03-CLUSTER10611_1
gcaccaggactgtgctcactgtccccccccccttgaagcgaggaatatgctgagcttatcattgagtaatcatgttcctccattaacgctcttgagccatgaacgaagaatcctcaagctccaaagtcgatcgtctattctctttcaccaactcttccacactaagttccttctcctgtcgaattcttcctctttgtcttcttcacatggagttgttgctatttcggcatctccgtcttcagtcgcagttccggaattagaagacgaggaccacttcgatgacgaattacgtcgtctattggcgctcgtaccggaggagatacgccagacactgaaggagcaccctgaaattagtgaactcatagagatagtgttggatttaggtcgtaaacctctggcgcgattcccttcaggtgactttgttatctccgacgatgctgttagagttaaagatctggaattcgctgtttctcaggttggtgagtttactaatgataatcgagctggaatcagccggacgttgcatcggattagtgcgataaggaatcggaaaggagaaattattggattaacttgccgtgttggtcgatctgttagaggaagcgctaatttgctgcgtgatcttgttcaagatgggaactcattgttgcttattggtcctccaggtgtggggaaaactacaatgattagggaggtagcacgaatgctaggaaatgactatgagaagagagtaatgattgttgatacttccaatgagattggtggtgatggtgatatacctcatccagggatcggtaatgctaggcggatgcaagtccctaactctgacacacaacacaaggtgctgattgaggcagtagaaaaccatatgccccaagtaattgtgattgatgagattggaactaaacttgaagcgatagctgcaagtactatagcagaacgtggaatccagttagtcgccactgctcatggagccactatcgagaatttgattaagaatccttcattagaccttctggttggaggtgtacagagtgtaactcttggagatgaggaagcgaccagaagaggtggccagaagactgtccttgaaagaaaaggtccttcaacatttaactgtggtgcagaaatagtttcaaagactgaagttcgagttcatcgtagtcttgaagcaactgttgatgctatcctcgcaggtcgcttaccaaacgttgaaatccgcaaaataaagtctcatggagtggaagtgattatggagaaggaacctttcatcgacgagaagactgtggataagaaacatgaagaggaaacattagatgtttcgaagctcaccaaggaggaaactgtctctgaagtccttcaaactaaggagataactgaagcagaatcttcagagaaagatacattgatgtatctatatgtctatgggattgcagaatcaactgttcttcaggcaatcaaacaactagagatggaaactgcggtagagttaactgacgacattagtgaagcagaagccttactcgcgttgcaagcaaagatcaggaagaatccccggattaaatcatttgctacatctcacggtatacctgtttatgtaacaaagactaactcaggtatccaagtggccaaggcgatacgggcattactaacagattacgaagacggactcggagagtttggatcagaagatcgtctaaaactatctgaaaaaatggacgccttagaagaagcgagattagcgatagagcggatagtgataccgaaaaaggaaacaaccgatttactcccgaggccacctaggattgtgtctcttcaaggaaagctagtcaggaagtataatttacgatcagaaagaaaatggagaggggatgagatgtatctacggattctcccttatagcacggaagaagatagagacgaccgtgaagatgaaggagagtttggagaagcgaacggggaagagcttgacgagttaggtttcgccaccggcgagtctaatgactcaccctctggcatcgataggttacctctattgcctgattagttttatttgttcatacattgttacagatacacttttgtgaatgagaaaagccgaaaaaaagaaaaaaatgcctcctgggtcgtttaaaaaagtagaactcgtgggggggcccggtgccctggcggggggggttgaagaggggggccgcaggtggccgccgcgcggcgggcgccgcc

SEQ ID NO: 48 - DNA, 4188 bp, Arabidopsis thaliana
  Clone ID: ARATH-23APR03-CLUSTER10625_1
tggatgttaaaagagagagaaagatacgagagaaaatggagagaaagtgagagagagagagagagataaagcagaggttgacttcgctttgctgagaaggcaaagagctcgaaagagagaagactaactctcatcagcgacgaatgtctgatccgttgaagatggcggccgagacggaggagattaaaccagttccagcagcaatgggagaaaagaaggatgtggtgttgtgtaagaagatagtggaaactctgggaggaggtggtgatcaaagagtattgctggttggcgaagctgggatcgggaagacaaggatggcacaaatggttgacaaagaagcctctaaggatgttctttgctaccagactctctggttgcatctcaacaggaagtttaaagtcaacgacaactatatcaaggagaagaagtttgaagacgaatggtctctttatgagaacatagcttcacagctatctttatactctgattttgaagagactgaagtcggtgaaagagatgaagatgaggaagaggagaagaaggttgaagatttgctcaaggatttgaagcccaagattgagaagtatctcttggaaaagaaggaagccgtcgtgaaaaaattggaggatgacaagaagaagaaggagaaggaagccgcagagaaactggaggctgagaaaaaactggtggatccggctgcgaaaaaagcaaaagaccatggaaacaagaatccaaccgatgccgcaaaggagaaaacgactcaagtagtagccggaggagaggataaagctcagacatcatctgaaagaaagccgtatcttcttttgattcttgacgatgaaggaatgaccagtgagtacgaggtgatggtgcatttaggccttgaggattttctgaaagatcacacacctcgaaaaatccttattacaagaagacaagaaactgaggaggctacaaaatctggtgagcatgctgagggggaggcaaatgattcgcaatccggggaaaagaaagaggacacagatggtgaagacgaaattagatcagctgataaggaggaacctgagtctcaagcccgggtcaaaacagaggagaaacatgaaaaagttgtacctcctaccatagatgacttatgggggagcacaaacacttatggtgaaattacgttccagaccacaaatgagtcacaagatttacttgaatcattcaacctaaaggaggcagaggctttatttacttcgtccatgtttttcaaggatatgccaaattttttctttgaccccgttcctgggactgatgagaaactgttaaaccacatgctgaaaaagagcaagagtttgccagctgcaatcaacgtgctcgccaagtccctagagtacactgtcaagagcaagtcctataagcttaataaggacgaagaagagaggttactaaaagaaaagatagaaatggttctctcggctgagcggggtaatccatccgaccaggaatctagttctgagagccctaagaaagcaagtggagaaaatccaatcctgcttcttgcatacaagctgttcaaaaccgatggtccattgaaggatacaatattggattgtttttggcatagcttggacttctttgagcattgtggctgtgtttactaccgtgacctgatcacacaatggatacttgaaggctactttgatcctgttaggtctgtcgaaaaggcgtaccaggatggtcattctatcttcatggagcttatagaccgcggaatgctgaagatacaagaaaacaatgtggtagtaccagagatggcgatgagaaatgtaattgatcctcgacgtggtgggcatttagggaaatctcggcttggattttctagagtctatggtggtaacaagagaaaaggaatagggaaaatcacccaacttgatgatatgattaaaacagtgcaagcaaagaaaggagacaagattaccacgattctggttagtggagatcgtctgcgtcgcgtaactcctaaaaagttcttcaagaatctgaaagagcttgaagtacttggcctttttgagcccacagtaaaaccatttgtcccgtctttttcagatcagctcaaactcctccgggttcttataatcagggactgtgatctcctgaaaagcattgaagagcttaaggctcttacaaagctaaatactcttgaagtttctggtgctagctccctgagcaaaatatctgaaaaattctttgagtcatttcctgaactccgaagtcttcacctctctgggcttaagatcgagtcttcccctcccagtatttctggcctgaaggaacttcactgtctcatcatcaaagactgccctttattgcaagatctgccaaacatacaagaactagtaaatcttgaggttgttgatgtttctggtgctagtgggcttcgaacttgtttcgacaacgcagatggtgccaagaaaaacaagagcaaaaacaaaaacttttatcttcttacaaaacttcagcatcttgacttctcggggagccaaatagagcgactgccaatattccaggattctgcggtggccgccaagcttcactccttgactcggctcttgttgcgcaactgtagcaaattgagaaggttgcctagtttgaagcccttgtcaggacttcaaattcttgatctttctggcactacgagcttagtggaaatgcttgaagtgtgcttcgaggataagcttgaactcaaaactcttaatctctcgggaactaatcttagcgagttggctaccaccatcgaggacctgtccagtctcaacgaactcctcctacgtgattgcatcaacctagatgccatcccaaacatcgagaaactagaaaatctcgaagtcattgatgtttccggcagtgccaagctggcaaagattgagggatcatttgagaaaatgttttacctacgtgtagtggatctgtctggaacccaagtggagacaccagagttgccagcggataccaaaatccattgtctgaagcgttttactcgggcagatggaaaatgttttgaacgtgacacatggagagaaataaaggaagacattgaacgtgataggtctgagaatgccagctcctctgatgcagttgttatatctcaagaaatcacagaaaagaagcctgtagaaataagagaggttgaatcgaatgcacctcgcgccagtgattgtaccgagaaagtagatgtcaacaaggaacgtcttcttaaagtccccatagatagggctctatatcagaaggcactaacatcacttgttgattccaaaattccacaagaagaagtcttggagatcaatgaaactaataagctagatgaggaagcactagctagtgctgagtttgtgtcttttgtggactgtactcctgaaagggtcaaatctatctttgagaaggccaaattggtgaagggttgctggctaaggatgtgctttgacataaaagaccctttcgatggtgtggatgaggagaacttgaaatcactggagactttatcaattacaaacctttaatcattggagactataagctttattgctaagttagagaatctgaagaacctaagcttagattgctgcccgaaaatcaaaacgattttcccggagatgcctgccagcctaccagtcctgaatttaaagcattgtgagaacctggagaaagttgttgtaggagttgaagtgtcaactcacactaatctggatttgaaagtggagaattgtccaaaattcggggactacgtaatggttgaccacagtgatgtacctccaccacatgaatgctgatcataaaagaggctggagcaagatctacttacacagtactaaacatctggatcgttgcctctttaatcattttcatacttttttcctacgtgtgcctgaagctttgcgtgttgaataacgaccggcattgaaacattatcttgcgggttttatttttactgtttcatgtttctgtttctgttttaagatattttctgctgtaaaatcccaggcatagtgttctgttcttgtctgggtgaataagaccattgttttgattgtttttcttttctcaaatattatttgaaatttctctgtttgaaagatcttataagacagtttaaggctttacgataaatatttaatttatacaagcaggaatgtgtgtatcttgtta

SEQ ID NO: 49 - DNA, 1528 bp, Arabidopsis thaliana
  Clone ID: ARATH-23APR03-CLUSTER10635_1
aacaaagctaaccccactttcctcttcatatttaatctctctttctctcctttcttcaacaaatatctcctgctcttacatctgagtctttttctttctaaccttctgattcatgagtaatcatatgtccattatgaagttcttgaatcaaatcctctgtctctctcttatcctctccatatccatgactactctttcctttgctcagacatgttctaaatacaagttctccagcaacaatgtctttgactcttgcaacgatcttccttttcttgattccttcctccattacacttacgagtcttccaccgggagcctccacattgcttatcgccacactaagctcacctctggtaaatgggttgcttgggctgtgaacccaacgtctacgggaatggtgggagctcaagccatcgttgcttatccacaatcagatggtactgtcagggtttacacttctcccatcagaagctaccagacgagtctactagagggtgatctgagtttcaatgtctctggtttgtctgcaacttaccagaacaatgagatcgttgtgttggcaagtctgaagcttgcacaggatcttgggaatggtggaaccattaacacagtgtggcaagatgggtcaatgtctgggaacagtcttctgcctcatccaacttctggcaacaatgttcgatcagtgtcaactctcaatctggtatccggtgtttcagcagctgcaggaggagctggaggaagttccaagcttcgcaaacgcaatattcatggaatattgaatggagtgagctggggaatcatgatgccactaggggcaatcattgctcgatacttgagagtagccaaatcagcagaccctgcttggttctacattcacgttttctgccaggcttctgcttacatcatcggtgttgccggatgggccactggtctcaaactcggtggcgactcaccagggattcagtacagcacccaccgtgccatcgggatcgctctcttctctctagcgacagttcaggtgtttgcgatgtttctgaggccaaaaccagagcacaagcataggctctactggaacatttaccaccacacgatcggctacacgataatcatcctaggggtggtgaacgttttcaaagggctaggcatattgagtcccaagaagcagtggaaaaatgcctacatcggtatcattgttgttctcgccattgtggccaccctactcgaagccttcacctggtatgtagtcattaaaagaaggaaactggaggctaaaacggctcagcatggagcatctaacggcactcggtctcagtatgcttaagattagcaacagacttgcttccttttctctttgtgcatagagacacagttatttatctgcttatctatctgttcccatatgcaatgatgattttttacattcatgatttaggatttataatgccatttttatttgatcagcaaaaaaaaaaaaaaaaaaaaaaaaaaaaaaaaaaaaaaaaaaaaaaaaaaaaaaaaaaaaagaaaa

SEQ ID NO: 50 - DNA, 1629 bp, Arabidopsis thaliana
  Clone ID: ARATH-23APR03-CLUSTER10646_1
aaaataaagaaccttgacaacttctctacaacactcactttttctctctaatggtggaagcaagaagcttgaagaaaccaatccaattgggtaataaagaagatcaaaaccctagaaaattctactctcgattcatctttaaagctcttatcctcaccgtgctctgcgccgtcgtacctgtcttcctttctcagacaccagagcttgctaaccaaacaagactcctcgagcttctccaccttgttttcgtcggtatcgcagtctcttacggtctcttcagccgcaggaactacgacggaggaggaggtggaggaacaagcaatagtgatcacaacaaagctgatcatagtaataataattcgcattcatatgtgcctaagattcttgaagtatcctctgtttttaacgtgggtcacgagagtgaatctgaaccgtccgatgattcctccggtgatcaacgtaagtttcagacatggaagaacaagtaccacatgaaaatccccgaggttgagactcgtttcgttgatcgagttagttcagaaaacagagagaagcctctgcttttgccggttcggagcttgaattattctcgtgtttctgattcttccggcgataattccggtcgatgggagaaagtgagatctaagagagaacttctgaagactcttggtgatgataatagtgatgtgcttccttctccgattccatggaggtcaagatcatcttcatcatcatcatcatcatcaaaggaggttgaatctctaccgtccgttaagaatctgactacagttgaatcacagccgttgatcaagaatctgacaccatcttcttctttctcttctccaagaaagtcgaatcctatacctaatctcgcatctgagttccatccatctccgccaccgcctcctccgccgccgccaccactaccggcgttttataactcctcgtcgagaaaagatcatcccggaatttacagggttgagaggagagaatcatcagttcacaagacgaaatttgcaggaggtgagtttcatcctccgccgcctcctcctccaccacctccggtggagtattataagtcacctccgacaaaattcagactaagtaacgaacggagaaagtcctcggagcaaaagatgaaaagaaacgctcctaaaaaggtttggtggtccgatccaatcgtggaatcgaaggaacaagacacagagaagaatgatcaaagaagtaacttgggaagcaaggcagtggaagaatccgagaatggagaacagagaagaggagaaaatgaaatccacgacgaggttgagaagaagatagtagaggaagaaggagttagtgagatcaacaatggaagtgacgtggacaagaaggcagatgagttcattgcaaagttcagagaacagattaggttacaaagaatcgagtctatcaagagatctactaataagatctctgcaaattcttcgaggtagaactcattatttattaataataggtatacattttaagtatgttttggtaatcatcataaggttgtaatattaaggggaacaaatatttttgttacatttattcagccacaaaaacaggattggagatctatatgaagtataaacagattgatactct

SEQ ID NO: 51 - DNA, 967 bp, Arabidopsis thaliana
  unsure (1)..(967): unsure at all n locations
  Clone ID: ARATH-23APR03-CLUSTER10656_1
tctctccttgttctccaactcgtccaggctgatgtcgaaaactcacagaagaaaaatggttacgcaanngaagatcgattgttggagtgcgtgtgtagcacggtgcaggctttcgaggaggccgaggctgtgtcacagagcgtgcgggacttgctgctacaggtgcaactgtgtgcctccgggtacgtacggaaaccacgacaagccggcgggatgaccacagaagggcacaacaactaaaaccacatttatcattacagtctgatttgagctaagttctctcatcataaactctccttggagaatcatggctatttcaaaagctcttatcgcttctcttctcatatctcttcttgttctccaactcgtccaggctgatgtcgaaaactcacagaagaaaaatggttacgcaaagaagatcgattgtgggagtgcgtgtgtagcacggtgcaggctttcgaggaggccgaggctgtgtcacagagcgtgcgggacttgctgctacaggtgcaactgtgtgcctccgggtacgtacggaaactacgacaagtgccagtgctacgctagcctcaccacccacggtggacgccgcaagtgcccataagaagaaacaaagctcttaattgctgcggataatgggacgatgtcgttttgttagtatttactttggcgtatatatgtggatcgaataataaacgagaacgtacgttgtcgttgtgagtgtgagtactgtattattaatggttctatttgtttttacttgcaagttttcttgttttgaatttgtttttttcatatttgtatatcgattcgtgcattattgtattatttcaatttgtaataagattatgttacctttgagtggttgtttatcatacttttttacaaaaaaaagaggttttggcaaagtaaaaaaaaaaaaaaaaaaagggcggccgcaaaagggcggccgctnnnnnnnnnnatc

SEQ ID NO: 52 - DNA, 2213 bp, Arabidopsis thaliana
  Clone ID: ARATH-23APR03-CLUSTER1066_1
ggaacgtttctcttcctggctacgaagagtacattgtgagaggaggaagagacttgttcaagcatctcccagatgctttcaaggggattaagcagattgacgtgactgggcgcgggtcaactgtgtgcgcttattaacttctctcacactgactctgcgaccctaattggtgagctctcttctctttgcgcagtcaatttgctacaacttagaaaatggcggcggctacttcatccatcgctccttctctttcatgcccatctccttcttcttcatccaaaaccctttggtcttccaaagccagaaccttggctctacccaatatcggtttcctctcgtcttcttccaagtctctgaggtcgcttactgccaccgtcgctggaaatggcgccactggatcctcccttgccgctcgcatggtttcttcgtctgcggtcaaagcccctgtttctctcgattttgagacatctgtcttcaaaaaggagaaagtttctcttgctggttacgaagagtacattgtgagaggaggaagagacttgttcaagcatctcccagatgctttcaaggggattaagcagattggtgtgattggctggggatctcagggacctgcccaggctcagaatttaagggattcacttgtggaggcaaagtctgacattgttgtcaagattggtctcagaaaagggtctcgctcatttgaggaggcacgtgctgctggcttcactgaagaaagtggtactttgggtgatatatgggaaactatcgctggcagtgatcttgtattgcttttgatctctgatgctgctcaagctgataactatgagaaaatattctctcacatgaagccaaacagcattcttggtttatcacacgggtttctactagggcatttacagtcctcgggactcgatttcccaaagaacatcagtgtggtcgctgtatgccctaagggaatgggtccttctgtgaggaggctttacgtccaaggaaaagaaattaacggtgctggaatcaacgccagttttgcagtccaccaggatgttgacggtagagccgccgatgttgcattgggatggtcagtagcacttggttctccgtttacttttgctactactcttgaacaggagtacaggagtgacatctttggagaaagaggaattttgcttggtgctgttcacggaatcgtggagtctctgtttagaagatacaccgaaaatgggatgagtgaagacttggcttacaagaacacagtagaatgcatcacaggaacaatttcaaggactatctctacccagggaatgttggctgtgtacaactccttgtctgaagaaggtaaaaaagattttgagactgcatacagcgcatccttctatccttgtatggagattctctatgaatgttacgaggatgtacaaagtggcagcgaaatccgaagtgttgtcttagccggtcgtcgcttctatgaaaaggaaggcttgccagcattccctatgggaaatattgaccagacaagaatgtggaaggtgggtgaacgcgtcaggaagtccagacctgctggtgacttgggtccattgtatcccttcaccgctggagtttatgtagcacttatgatggctcagattgagatcttgaggaagaaaggtcactcttactcagaaatcatcaacgagagtgtgattgaatccgtggactctctaaacccatttatgcacgccaggggagtgtccttcatggttgacaactgctcaaccacagcaagattgggttcgaggaaatgggcgccacggtttgactacatcctgacccaacaagctcttgtggctgtggacagtggtgcagcaatcaacagagacctaatcagtaacttcttctctgatccagtccatggtgccattgaggtctgcgcacagctcaggcctaccgttgatatctctgtgcctgctgatgcagactttgttcgacctgagttgcgtcaatctagcaactgagtgaagggttgaaagtttgtcagtctcttatttgtaatcggagtattaagtcgagagtttgtgatgttttcttaggcgtgactgtttgttttgtttgaaggattatgtctctttgctttggtcttaaaatctacttaaatcaataaaatagtttaacgaaaaaaaacaaaaaatattaacataacgagaaaaaaaaaaaaaagtctataaaatagtttaacc

SEQ ID NO: 53 - DNA, 1264 bp, Arabidopsis thaliana
  Clone ID: ARATH-23APR03-CLUSTER1069_1
agaatgcctcgaaacctcacacaaaattggtcctaaacgagtctccttcagtcgtaatttgcagcagagcaacgatggcagcgactccaatggaaggcaaatgggttcagcttaaacagaaaggaaccggaccaggagcaagaagctctcatgctatagctcttgtgggaaacaaaatgtatgcctttggtggcgagtttcaaccacgtgttcctgttgacaaccagctctacgttttcgacctcgaaactcagacatggtctatccaggaagcttctggggatgctcctcctcctagagtaggtgtagccatggctgcagtcggacccatcatctatttctttggtggccgggactcgactcaccaggagctcaacgagttatactgttttaacactttgaccaaccagtggaaactactctcttcaggggaaaccggtccacagaaccgaagctaccactctattactgcggattctcagaacgtgtatgtgtttggtggatgcggagttgatgggcgtctcaacgatctatgggcttacaatgtcgttgatcagaaatggattaagttcccatctccgggagaagcttgtagaggaagaggcggtccaggactcgaggtggttcaaggaaagatctgggtggtatatggattcgcaggagaagaagcagacgatgtccactgtttcgacatagctaaaggggaatggaaagaagttgagacaaaaggcgaaaaaccgtcagcaagaagtgtgttttcgactgcggttgttgggaaacagatactgatatctggaggagagattgacccgagcgatctggggcatatgggagcaggatgtttcacaggtgacgcttatgggcttgatacagagacgctggaatggaggaaatgggaggatggggttggatcggtggagcatcccggtcctagaggatggtgcgcgtttgcagctggatcacgagatggtaagcaaggtctgttggtttatggcgggaactcgccgagcaatgataggcttgatgatatcttcttcttcactcccaacactctactcaagtgattggtaactaagtatggtttggttttcttgccggtgagaggggctgtgtgaatgttcctttttttttagtttccttttggattggatgaactatgaagatgtgtgatgtgtttcattttcctctgttatttgtaattaaataatcgaaatttttcattaaagaagataacgaagaacaacaaaaaaaaaattattttagc

SEQ ID NO: 54 - DNA, 4437 bp, Arabidopsis thaliana
  Clone ID: ARATH-23APR03-CLUSTER10709_1
ctctctctctctctctctgtctgccaccaacagccgaggacgacgaccgtatcttccaccacaaactgcttccggctgagacgacggcgatctactccggctaattctgttacttgattctgctctgaattttaacaagcagaatttctcggatagcaggaagaacgggattaattagctcatcgcttggttctctacgtgagatttagttttggattctggagaaatttccgatcgccttcggtttacggcgattggagtgagtaggatacggagaaatctctattttctgtgtttttttcgcgatttaggaaagttaagcattataaagccaaatttcgtcgatttggcattgagattttgagctttgggtggttatagataggttttttgagttaaggttttacgggtaatcctagggtttagttattggggaagagagaggctccgttaatctggtttgttggaagagtctcctggatctgttgtctcgacggatgatttgggtctgtgagctagggctttttatgcttggctgattaagatgccgatgggacgctttctatctttggtccgaggagactcggctgagtcacctcgtgagattacctcacagagtaatatcatcggcgatactggttctaatggttggcttattaggtttttcgattctgctttcttctgtgagtggattgctgttagttatctgtacaagcaccctcatgctggtgttagggattacttatgcaataggatgtatacgcttcccttatcaggtattgagagttatctcttccagatttgctacatgatggtgcacaaaccaagcccatcgcttgataagtttgttatagacatctgtggaaagtcactgaaaatcgcactgaaagtgcattggtttttgttggctgagctggaggatgctgacgataatgaaggcatcagcaggattcaagagaagtgtcaaattgcagctactttgatgggtgagtggtctcctctcatgcgtccacagaacgaggtctcaaccccagggagcaagaatcaggtcctaaatagacttttgtcatcaaaacagaagctcttctccttaaagctatctcctcccacccagaagtctttgtcattctcaccttcgccagggaccaacgtgcaggatgatggtagtcagttacctgctgaggacaataagatttttaagaaacttatcccaagtcctaaagtcagagatgctttaatgtttagaaagtcagctgacaaagatgatgaagagagtgaaaaggaaggattcttcaagaggctcttgagggacagcaaaggtgagggtgatgaaccaatacctaactcagagggtttctttaagcgccttttgaaagacaataaatcagaagatgaggacataacaaacagttccgaggggttcttcaagaggctcttgagtagtaaaggagaaagcgaggaattgacatcgagttcagatgggctgtttaaaaggttgttacgagataataagggagatgaagaggaattgggtgcaaattcagacagtttcttcaagagattgttacgggagagtaaaaacgaggacgaggagtcaaacccaaactcagaaggtttttttaagaaattattccgtgacagcaaacctgaagatgataaagttcctaaagaagtggatgatgaggacaaagatgggttccttaagaaacttttcagggaaaaaaatgatgacaaaagacatggtagtgaaaagaatgaagccaatggaacagtgtatgccgataagaaatctggtgaagaggatgagagggaggggtttttcaaaaaattctttaaggaaaaatctgatgacaagaaagacattgtcaaggttgatgacgggaatgaaagtgagggtgatgaatctccagaattttctcttttcaaaagattattccgtatacatcccgaagatgcaaaacctacttcagaaaatgaaaatagcagcaatggcttagttgaaagcagtcctgggacagaaaactttttccgcaagttgttcagagatcgtgaccaatctgttgaagattctgaactgtttggatcaaagaaacacaaggagaaacggccaggctcacctaaacagcgggatgatactccatctggtaagcccccgctaccaaacaatactgcatcacaattcaggaaaggggcttaccacgagtcgttggagtttgtacaagcgttatgtgaaacgtcatatggtttggtagatatctttcccatcgaagatcggaagattggtcttcgggagtctcttgcagagatcaattttcatttatcggaagctgaaatcactggaggaatttgttttccaatggggagaggagtttttcgtgtggtccatattcctgaagacgaatgcattcttttgaattctagggaaaaggcgccatacatgatctccgtagaagttttgaaagcagaaacacccagtgctaaagaatcatcgaactcccagaagctttctaaaggggggattccattggcaaacggggacgcattcttgcaaaagccacctccatgggcttatccactatggactactcaggaggtttatcgcaacagtgctgaccgaatgtcgttatccactgctcaagcaattgatcaagcgatgactcctaagtcagaggtgaaggtgaaacttgtcaatgtaagtctctcagtggaggatcgtacttcagctcttgaatcatttggcgatccaattgatgatgttctgggggaagccccaaggactgggctgaacaatgatcttgaatgggtaagggtggtcgtaacggctgacccaggacttagaatggaaagcattcctgatccatcagtcccacgtaaaaaggaacatcgtcgtgttccaagtactgttgccatggaggaagttagggctgctgcagcgaagggagaggcacctccaggccttcctctcaaaggggcgggtcaggattcgtcggatgcacaaccaagggccaatggtggaatgctgaaggaaggtgatgccttatcaggtgaactttgggagggaaagcgagacagaatacgtaaagcttcaatatatggaaagttacctggttgggacctgcgttctatcattgtgaagagcggtgacgactgtaggcaggagcatcttgctgtgcaactcatttctcacttttatgatatattccaggaagcaggtctacccctctggttacgtccttatgaagtcttggttacatcttcttatactgcccttatagaaacaattccagatacggcttctattcattctatcaaaagtagatatcccaacataacgagcctacgtgatttctttgttgcaaagtataaagaaaactctccaagttttaagctcgcccagaggaatttcgtggaaagtatggccggatattctttggtctgttaccttctgcaggtaaaagatcgtcataatggaaatcttctcttggatgaagagggtcacattatacacattgattttggttttatgctttcgaattctcctggtggcgtaaactttgagagtgccccgtttaagttaacccgtgaacttcttgaggtcatggactctgatgctgatggggttccaagtgagttctttgactatttcaaggtgctatgcattcaaggattccttacatgtagaaagcacgcggaacggattattctcttagttgaaatgttacaggattcgggtttcccttgcttcaaaggtggtccacgaaccattcaaaacctaagaaaaagattccatctaagtttaactgaagagcaatgtgtctcgttggtcctctctctcatcagcagtagcttagatgcttggcggacacgacaatatgattactaccaacgggtcttaaatggaatattgtgatgttccaaagaaccaacctaataagggtaaaaaactcacaacatacattggtatgttgggttagctcataaaacaatacgttttttgaggaacccttttcatagtagcaatcagaatccttccaaaggtgggggaagatgcctgaagagatcgtgtgtgcacgcatgggagaagaaaccggtcacacgtggaggagaaaactacagtttgtgtacagagtatgatttttgcagaggtttgattgttatctttacttacttgctctacttgcaggagaaaagaaggcaaaagcctgaaattttcttcctcccaaaagctcaaaacaaagcccttttacagaggttaaaaagggtaatgttttgttttaaatttgtttctagtcaaaactcatgatgtgatattgttgtataaattgtgtatcatcttcttttcctttgtgttaaaattagagtctgagcacggaaaaaccaaacagaacatgcatacatgatatttcattaagatgtgtgttatatcactcttcacac

SEQ ID NO: 55 - DNA, 1572 bp, Arabidopsis thaliana
  Clone ID: ARATH-23APR03-CLUSTER107189_1
cgcccccccgccccttctccccccctattccctccagggggccgcttagccggggttcgtcctccgcagcatcttcttaccctcgcccccccaacgcccaagacgcaaaacaaaacctcttccgcgccttgagcgcgaggtaccggtactgatccctcgccacattaggacgacaaacaatacccatcccctgctctgatggcgatacacagttacttcttcgtcttcaccttcttcttgtttctttctcttctctcacactgttcttcgacaactacacatcaggatgtgttacacccaccaacgctctttcctacaatccccacgtctccacccgacggctagcttttcctccggtgcccataacacctccaaatccagccactactgctcctactgttcctccagtcacaactattccacctcctacactcacaccacctccagtcataacaattcctcctcctacactcacaccacctgtgacaaacccagtaaccaacccagtgactcagtatcctccaacacaaccctcagggacggtcccagtacctgttcctgtggttgcaccccctctcctcccggcccctccctcggcgtccggcgcgtccgggtgtgtggccaagcctggagcctctcaagtctcactccaacaggctcttgactatgcctgcgggatcgcggattgctctcaactacagcaaggcggcaattgttattctcctatcagtcttcagagtcatgcctcatttgccttcaacagctattaccagaagaatccttctccacaaagctgtgattttggcggtgcagcctcattagttaacaccaacccaagtgagtgagaaaaaacagaagatactctgtttctctttttctttcttgttttcagttagatggctttgattgactttggtttggattgttgttccaaaacaaggcactgggttcttgtatataccacacaggttcatcgacactcaacaccaatgaccagcaggaacaacaacaccaactccatcaacacaaacagtgaaccagcctcctgtcacatcaacacctataataccaacaggaggcgggataatcgggtaataagagcattcttttcaactcttttgtgtagtcttaaagcctcattagagtttcttaactaaaaatgtacctctctgtatttatattcaagggttggaactccgccagcgatttttaaccccgcaaatcctacatcaaatacgctacacaatccatcctcaggaggtttagcgggtggttacggtttcgatgctccgccaaatgagaccaatccaccatcatcagactctacacacttgaagattcactttggtcatgctatggtggcaacattgattcttcacgcagtgctatttcattagaagtagcagaatatgtacgagtcaaaatagctttatgacacacaagttaaagctcttttagagtatcttcctaggaagaagctaggaatgtaagacattataaatttctttggttcgacggtattgctaaggcttcggatttgtacagaaaacctctagttgaattgttttaaat

SEQ ID NO: 56 - DNA, 1700 bp, Arabidopsis thaliana
  Clone ID: ARATH-23APR03-CLUSTER1071_1
gagtactgtcatcagaatatattatcagaacgtttcaattggcggctttctctctctttccccaggaagagaaagttcgaactccagaaatggcggtggattctcccgctggagttattatcatcgccgccgtgcttttacttgctgcgacaaccttggcctgcggctccgacgcggttctcaagctggagagattgattccgccgaaccatgaacttggtctgactgagctcagggcttttgattcagctcgccatggaaggttattgcagtctcctgtcggcggtgttgttaatttcccggttgatggagcctccgatccgtttctcgtcgggctttactacacaaaggttaaacttgggacaccaccaagagaatttaatgttcaaattgacactggaagtgatgttttgtgggttagctgcacttcctgcaatggctgccccaagactagcgaactccaaattcaactaagtttctttgatcctggagtgtcatcctcagcttcattagtttcatgttcagacaggagatgttactcaaatttccagacagaatcaggctgttctcccaacaatctctgttcctattcgtttaagtacggtgatggaagtggcacttctggttactacatctcagatttcatgtcctttgatactgttattaccagtaccttggctataaattcctctgctccctttgtttttgggtgtagcaatttacaatctggagatttacagaggcctagaagagcagtagatggcatctttgggttaggacaagggagtttatcagtaatttctcagcttgctgtgcaaggactcgcgccacgagtattctcgcattgtctgaagggagataaaagcggtggaggtataatggttctaggtcaaatcaagaggccagataccgtctatactcctcttgttccatcacagccacattataatgtgaacctgcagagcattgctgtgaacggtcagatattaccgattgatccatctgttttcacaatagccactggtgatggaacgataattgatacgggaacgactcttgcttatcttcccgacgaagcttatagtccattcatccaagctgttgcaaatgctgtttcgcagtacgggcgtcccattacctatgagagttaccaatgctttgaaatcacagctggtgacgttgatgtctttccccaagttagtttgagctttgctggtggtgcatcaatggtcttaggaccccgtgcatatcttcagattttttctagttcaggaagttcaatatggtgcattggtttccagagaatgtctcatcgtcgtataacaattcttggtgatttggttcttaaagacaaagtggtggtctacgatctagttcgccaacgtattggatgggcagaatacgactgttctctggaggtgaatgtttcagcatcaagaggaggacgaagcaaagacgttataaacacaggacaatggagagaaagcggttcggagagttttaatagaagttattacttgttacaactagtagtcttccttgtccacctttttgctcgtttcttgtagtagcttttagcattcactccaccaattatggttggactttgtaagcttatattattgtaatttaatcacactaattaattcttacttacccacccaaaaaaaaaaaaaaaaaaaaaaaaaaaaaaaaaaaaa

SEQ ID NO: 57 - DNA, 2020 bp, Arabidopsis thaliana
  Clone ID: ARATH-23APR03-CLUSTER10764_1
gaagctttttcactctctctacgccacgacgactgtgaagcgagaaatggctacttccgatcaagatcgccgtcacagagtcactcgcaaccgtccaccaatagctcgaccctctacttcttcatctcgtcccgttgtatctcctcctagatcaaaagtttcgaagcgtgtgcttctccgtgtagcttccgtcgcatgcgggattcaattcggatgggctcttcagctttctctcctcacaccttacgttcaagagctggggatcccacacgcttgggctagtgtgatttggctttgcggtcctctctctggtttgttcgtgcaaccgctcgttgggcatagtagcgataggtgtactagtaagtacggtcgtcggagaccgtttattgtcgccggagctgtggcgatttctatctctgttatggttattggtcatgcggcggatattggatgggcatttggggatagagaagggaagattaagccgagggcgattgttgcttttgttttagggttttggattcttgatgttgctaataatatgactcaaggtccttgtagagctctccttgctgatcttactgagaatgataatcgcagaacccgagttgcaaatggctacttctctctctttatggctgttggcaatgttcttggctatgctactggatcatacaatggttggtacaagatcttcacttttacgaagacagttgcatgtaatgtggaatgtgccaatctcaagtctgccttctacatagatgttgtctttattgcaataactacgatcctaagcgtctcagcggctcatgaggtgccacttgcttcattggcttctgaagcacatgggcaaaccagtggaacagacgaagcttttctttctgagatatttggaactttcagatattttccaggaaatgtttggataatcttgcttgttacagcattgacatggattggttggtttccatttattctgtttgatactgattggatgggtcgagagatctatggcggtgaaccgaacatagggacttcatatagtgctggggtcagtatgggtgcacttggtttgatgttgaattctgtttttcttggaatcacttctgtgctcatggagaaactttgcagaaagtggggggctggttttgtttggggaatatcaaatatcttaatggctatttgctttcttggaatgataatcacctcatttgttgcgtctcaccttggctacattggccatgaacaacctcctgccagcatcgtgtttgctgctgtgttaatctttacaattctgggcattccattggcgataacttacagcgtcccatatgcgttgatttccatacgtattgaatccctgggcttaggtcaaggcttatctttgggtgtgctaaatttggcgatagtcatcccacaggtaattgtgtctgttggcagtggcccatgggatcaactgtttggaggtgggaattcaccggcacttgcagtaggagcagctacaggcttcattggcggaattgtagctatcttggctcttccacggacaaggattcagaagcccatccctctcccatgagattctctcttttgttatataagatgagtgtcaagcgaggaacgcataaggggagtgcttggaaatggcaaggagatggaacacttaatgtgatccttgtcgaaaattcgtgcaatggcttctcgtgtgactaacttatttgcagctactaggacttaatcccctctactttggggactatgatccttgtatacacgaggcaccatagaaccaatgaaaataatacatcattcagtttgtgaggtatatgcatctctcctttattggaagttccagttcgggatcttctctgttttttttgttgttgttgtaaattaatgtaaaaacctgtgtacaacagagtgtttgtaagggcccctgagttctgtaactgtttataaagttcattttctttagaaaaaaaaaaaaaaaaaactcgagggggggcccggtacccaatcg

SEQ ID NO: 58 - DNA, 1664 bp, Arabidopsis thaliana
  Clone ID: ARATH-23APR03-CLUSTER10775_1
gagaattagacgtgttaccaagcagcaccttatttggtaatcttcctcattcgaaggttactcgcacttcctctgcacacttcttcctctccatctaacctcagtactcctacaatcctctaagaatccatagatctactgctgggaaaagcttcgcgacaatgtcttggcctacggattctgagttaaattccataaaggaggcagtggctcagatgagtggaagagataaaggagaagttcgagtggtggtcgctccttatcgtatatgtcctttaggagctcacattgatcaccagggtggaactgtatcagctatgacgattaataaagggatccttcttggttttgttccatcgggtgatactcaggtccagttgcgctctgcacaatttgaaggagaagtatgtttcagagtagatgaaatccagcacccaataggcctagcaaacaagaatggtgcaagcacgccatctccatcgaaggaaaaaagtatctggggtacttatgccagaggagcagtttatgcgttacagagcagcaaaaagaatctcaaacagggcattattggttacctcagtggctcaaatggactagatagctccgggcttagctcatcagctgctgttggtgtggcatacctgctagctctagagaatgcaaacgaattgactgtatccccaacagaaaatatcgaatatgacaggcttattgagaatgggtatctgggtctgcggaatggaattttggatcaatcagctattttgctttcgaattatgggtgtctaacatacatggactgcaagactttggaccacgagcttgtacaggctcctgaactggagaaaccgttcaggatattgttagcattctcaggcttgaggcaggcgttgaccaccaacccaggatataatctgcgagtttctgagtgtcaagaggcagcaaaagttcttttgactgcatctgggaacagtgagctggaacctacgttgtgcaatgttgagcatgcggtctatgaagctcacaagcatgagctgaaaccggttttagctaaaagagcagagcattatttctcggagaacatgcgagttatcaaaggacgggaagcctgggcttcagggaatcttgaagaatttggaaagctaatttcagcatccggcttgagttccattgagaattacgaatgcggtgcggagccactgatccagctatacaagattcttctgaaggctcctggtgtatatggagctagattcagcggtgcaggtttcaggggatgttgtctagcctttgtagatgcagaaaaagctgaggcagctgcttcatatgtgaaggatgaatatgaaaaggcccaacccgagtttgctaacaatctaaatggaggaaaacctgttctcatctgtgaagcaggtgacgctgctcgtgttcttctctgatcaatcctggagtttttggtttcttccccacttaaactcgatttttttgtcccttatatctctcacgcttattgattctttgcttgtttatctctttttgatcctgtctgagaaattctctggtctctttggtcggagtttcatcattgcttgatacattttttttgctacaaatacataatgtaaatcattctctaccgttttcgagttgaaaaaaaaaaaaaaaac

SEQ ID NO: 59 - DNA, 1260 bp, Arabidopsis thaliana
  Clone ID: ARATH-23APR03-CLUSTER10793_1
attcatcaaatcctcaaacaacttcaagaacaaagagtgcttttcgatgcccaaaacacattaccataaaatggcattctcgaagggactcatttttgcgatgatatttgcggttttagcgatagttaagccctcagaagctgctcttgatgctcattactatgatcaatcgtgccctgctgctgaaaaaatcatacttgaaactgttaggaatgctactttgtatgatcccaaagtgcctgctcgtctcctaagaatgttcttccacgattgcttcatcaggggatgtgatgcgtccattctactagattcgacacggtcaaaccaagctgagaaggatggtcctccaaacatctcagtacggtcattttacgtgatcgaagatgctaagagaaagctcgaaaaggcttgtcctcgtaccgtgtcttgtgccgatgtaatcgccattgccgccagagatgtggtcaccctgtccggtggtccttattggagcgtactgaaagggcgaaaagacgggacaatttcacgagccaacgagactagaaatctcccaccaccaacgttcaatgtttctcaactgatacaaagctttgcagcaagaggcttgtcggtgaaagacatggttacgctctcaggtggccacaccatagggttctctcactgttcttctttcgagtcccgtcttcaaaacttcagcaaattccatgacatagatccttcgatgaactatgcgttcgcgcaaaccttgaaaaagaaatgcccgagaacatctaaccgaggcaagaacgcagggacagtcttggactctacttcctcggttttcgacaatgtttactacaagcaaattttgtccgggaaaggagtgtttgggtctgatcaggcacttctaggcgattcccggactaagtggatcgttgagacgtttgctcaagaccaaaaagctttcttcagagagtttgcagcttccatggtaaaacttggaaactttggagtcaaagagactggacaagttagagttaacactcgcttcgtcaactaaaagcatattcctaacaagcaaccaaatgagagttttcttttcttcaaatttgatttcatttatacttgatattataataatgtagaccggccaatatatggatcggttttaaaacctcctaattctccatgagttgcagagtatgctttaaaagtaaatttgttctgcttcattgaactgatctataaattcatcagcattttcaaaaaaaaaaaaaaaaa

SEQ ID NO: 60 - DNA, 847 bp, Arabidopsis thaliana
  Clone ID: ARATH-23APR03-CLUSTER108044_1
atcgatcgaaagatcaatgaattaaactatcattgtttgaacaaacccaatccgggtctatcagaagtaagtgacgaagaggatgggaacacatgtagcaccatggaagcagcttctctttggcgccattgaagccaattctcatctaagccactcttcttatgttcagctcgcaacgattggtttaaatggacggccttcgaatcgtaccgtcgtattcaggggatttgaagagaacagtgacaggattcaaatcaacaccgatcttcgcagtcgtaagattgaagagcttaagcattgtcctttttctgagatgtgttggtatttctcggatacttgggagcaattccggatcaatggaagaattgaggtcattgatgcgtccaatcctgaccagaccaagcttcagcaaagagagaaagcttggtttgctaattctttaaggtcaaggcttatctacgtctgtcctactcccggtagtccttgcaacagcgagcaatcaagccaacaagttaaattagatccttcaagtggtccagttcctgaatactgcctgctgcttctagagccagaaaaggttgattacttgaatctgaaaactaatcagaggcttttcttttcttccatggctactggaactggagagaagtgctggacttcagaaaaggttaacccataattaaacttttaatgtctgagagaagaatttattatttgtggatttcccttatgtggtacatacatcacactttgtagcaattcataatccttttacttttactcttcactttcgaacatcgcattccgccatataattaaaatatctgaataaaagaatcttactctt

SEQ ID NO: 61 - DNA, 1246 bp, Arabidopsis thaliana
  Clone ID: ARATH-23APR03-CLUSTER108082_1
aatatcgaaacattgaaagtttcgatttatttcagatactgtatataacacactagatattacattaagcttcaatgtagttacaccaattaactggtgttaccagttacggatggcatttggttttgtggaatcggttgttcgttccttactcttcttgatgatgagaacaagttagcactgaagctggtatagaactgtcttccacttctagtagcattgttaataccatcgcaaagtgataagcttcctccaattgaaaacgatcttctcacgttttctactcttcctgagccacagtagtttgccaaatcactttgtgcccttggaagaaaaatgttatggtttcttctagatctggaactgtcttgtcttccacggaggtcattgctcgattcagaatctggttgatgattcgtctctgtttcttgatgaggtggttcagtgataagaagtacaggggcacgacataaaggacagttcttgtgagagagcaaccaagtgtcgatgcaatttagatgaaaggcatggctacactttggtaacagtctcagcgactcgtcttcttcaaactcgtttaagcagacagagcattctgtgccgtcgattatcccttctccctttttgaatccaacgactgtgatcgagttgatcgcggaacggtggagaccgacggttgggatttgccaaacgtgatgaaagtcggagaaatctctctcctctgtttcgtcctcatcttcctgttggtttgtgtcaccgggagttacgctggcggctgaaatccgccgttgttgcgtgatgtggaggtagaggaagaagactagaaatagaaagagtatgattgagccgacgacgcagatcgaggtggggagtaggagagagagctccctcggtggcggtggtggtggtggcgggggagggtattgccggaaacaaaagcgtaaatctttaaactgtagacatgaaagaagcatttttctgtgattaaacgccattgtaggagttcagagacgacataaacagagcaaaaacagaggactttactttcagacacaactagtagaaaacagaacaagaacaggggaaaatgggtatgacacacaattccaagtttttgcttctgatgaaagcaaaaagaaataggacactaaaacccacaaaatgggttagaatctagacaagagtcatgacccaaaaaatcttcgtgaggaaataagtgggtacacagccacacacatcacaatct

SEQ ID NO: 62 - DNA, 2087 bp, Arabidopsis thaliana
  Clone ID: ARATH-23APR03-CLUSTER1080_1
tttttatttttttttttaagtggatttccgaaaacttttcttgcaaaacatctgatactacatttgatccaaacatattacacatctcttgctttcttctacgttttttcttttcctgatctttcaaatccagtgatcaaaatagattcaaaataacatcacatctttgtagctgcatgcacaaagtcgaatcttcatcctcgtgatgtttcaagtatggctaagaaaaaaaatagatttgtcattcctcatcaagaatcacaggtctcgttggtatcctttccaatgctttgaaagattctttttcgtaaggaggaggcaacaaacgttgtacatctgcaaatagatcttcacgtccagtcgcctctttgacagcagatgaatcgaggacatagtcgggtattgctggtaacacttcgtctaagaatgattgtaaggtggtgcagtgcaagagagcagcatcggttctacgtttccactggccatttccagactccgagtggaacaaattgatcaatggcctcactatatctcgaagatttggtcggccttttccatatttcccgagaaccgactctccatagactttatatttttcaagaacctgtcgccttgtaattccactgcttggagatccgtaaattacagtatcgacgtgtcccaaaatgtgccagggattgtagtatacagcacgcccaagcataacgccatgagctccagaccttaatgcggcatctgcctcaaccacagagtttatgcctccattaattgtgaactttaagtacgggaaatcacgcaaaagggcaaagaaaaactcgtattttaagggcggaattcgacggttatctgacgggctaagtccagacagtaatgccttccgcgaatgtatgatgaaatgcttagtaggagataatgaagaaactatatgaatgaaatcacaaagctcattatatgaatcatgatcatcaacacctattcgacatttgacagtgacagctgcattggtattggctgcaatgacagacatagcctcaccaacaaacttcgggtcaagcataagaagagcaccaaaacaacctcgtccacttacttttgggctaggacatccacagttaaaattaatttcatcataggcgtaagcattagcaagtctggttgctttagccaaattttccaagtttcttccaccaatttgaagaacaatgggatgttggtctggagagaatgccaaaaagctgtccaggttatcttcttgatagacaatggtttcagcagctaacatttcagtgtagagccatgcgtgttttgttataagacgcgctagagttctgtaatgattgtctgtccatcccatcatcggggctatactgaacagaggtggactataagcttctgaaactgtcatggcttcgtatcacctaatatttcagatccagataacgagtgtggtagagaagacgaatacaggcagctatagtggaggaggaggagaacggcgagacgaccggaggtggacgagagatggtgaaattggattttaagtgttttttttttgtggtcgctgagattttgttccctcctcgtttcttcccttcacgtctcccgatgcttcacaagtcgcaacccactttcgtcttttagatctctgtgttccctcctcgtttcttcccttcacgtctcccgatgcttcacaagtcgcaacccactttcatcttttagatctctcctcttcttattacatcagagatcttatattacaactaagtcatttctatcgcctctaaaatctataagcttgtgattttggtgtgaacgatgtcaaaatttcagagcaatttcaatcagaagatagattatgtgttcaaggtagtcttgatcggcgactctgctgttggtaaatctcagcttctcgctaggttttcaagaaacgagttcagtatcgaatctaaagcaacgatcggtgtcgagtttcagacaagaacacttgaaatcgatcgtaaaactatcaaagctcagatatgggacactgctggtcaagaacggtaaattttcctatctataatttaccatcgtagatccttgttttt

SEQ ID NO: 63 - DNA, 1639 bp, Arabidopsis thaliana
  Clone ID: ARATH-23APR03-CLUSTER10822_1
ggatactatcactgtgatagtgaaaggagctttgcttatgaagagagaagaaatggcagaaacagagattcttgagccctatcaactgtcgttctcggatcttcttttgtcctctcgtaatcgctctcaatggatctcgaaaaatgtgatggacgctcttggccccaccggtcctggtctcctttgtatcaccggcgttcttggctccgcctttctccgccgtaaactccttcctatggctcggaagctggctctgctcgatccggacaagcggaaactcattctcatggagcaccacttgggtagcgacgttcctctcaagaatccagaacgagatgtctcctcttttgcaatgcagctcaattatgaaagaacaacttataaatcctcactgggaaagctgtggttcgatgaggctggatcaaaactggacttgcaggaggatgatgatgatgctttcacaaatcttggtggtgcttttaaagaactcgggttctgcatgagggagttgggcttgtccatagctcgtctatgcgacagggagattggcggaggcttgctggaggagagcttactggattcttgcacagccaaaggacgtctcatacattaccactccgctgctgataaatatgctctcagagaatcccagaggagaaaccaatctggtaaccgagtatcaagcaagaggagagtccagaacgctgctgagcaagagctgaaccgtagaaatggagctggtttgagtgggagtcacttcaatctgtggcagcagtggcattacgattatggcatctttactgttctcacggatcctatgtttctatcgccgtattcctatcaggaattcagtttgatgagcagccattcttacctgcagatctatcatcccagcaagaacaagttctacatggtcaagactccacaagacagttttttggtccaaatcggagaatctgctgatattttgtccaaagggaagctacggtcgacccttcactgtgtgtgcaaaccagagaagctggatcacgtaagccgtgagacatttgttgtcttcttgcacccaaagtggagccaaactttctcagtctcagaatatacaatggaacatctaaggtcggatgaggtcgtccctagaccagatttacagaatattgttccacctctatcgtctcggttaagggatgggatgacttttgccgagttttcacgtgaaacgacaaagcagtactacggagggaatggtttgcaatctaatagatagccgtgccccaggttaatagcttgtctaatctttaggtagttaaattcaaaataatctttaggtaatgagtagtggaaggcaagaggaatgagccaagagggttagttgtaaaagagattagattaaagggagagttgggattcgttatgtgtacttcgatgttggagccaaaacaacagtgaaagctgttacatcgttttcacagtcaaaagctctccctttcaaacatgctttttggttgtggttgctcttctttagtctctctctgtgactcagtttatgttcctgttgtgtctcccctgttgctgttccaaacttacatctctttgtttgctttcaagcgtcgcattaagacaaaaaaaaaaaaaaaatagt

SEQ ID NO: 64 - DNA, 1596 bp, Arabidopsis thaliana
  Clone ID: ARATH-23APR03-CLUSTER10833_1
aaaacttttgtctctttttaactctcttaactttcgtttcttctcctaccttcttttaccaacctttcctttctcttacacacatatatatatacatatatagagagagagaagaggacaaagagttgaaagatgaagactctcatgtcttcatagaaacaagtgatatgtgcgctaagaaagaagaagaagaagaagaagaagaagacagttctgaagccatgaacaacatacaaaattaccaaaatgacctcttctttcaccaactcatctctcatcatcaccatcatcatcatgatccttctcaatctgaaactttgggagcatccggtaacgttggatctggtttcactatcttctctcaagattccgtctctccaatatggtctctacctccacctacctcgatccaaccaccatttgatcagtttcctcctccttcttcttctccagcatctttctacggaagtttcttcaacagaagtcgagctcatcatcagggattacagtttgggtacgagggttttggtggagccacgtcagcagcacatcatcatcatgaacaacttcggatcttgtcggaagctttaggtccggtagtacaagccgggtccggtccttttgggttacaagctgagttagggaagatgacagcacaagagatcatggacgctaaagctttggctgcttcaaagagtcatagtgaagctgagagaagaagaagagagagaatcaataatcatctcgctaagctccgtagcatattacccaacaccaccaaaacggataaagcgtcgttactagctgaagtgatccaacatgtgaaagagttgaagagagagacttcagtgatctcagagacaaatcttgtcccaacggaaagcgatgagttaacggtagctttcacggaggaggaagaaaccggagatggcagatttgtaattaaagcgtcgctttgctgtgaagacaggtcggatctcttgcctgacatgattaaaacattgaaagctatgcgtctcaaaacgctcaaggcggagataaccaccgttgggggacgagtcaagaacgttttgtttgttaccggagaagagagctccggtgaggaagtggaggaagagtactgtatagggacgattgaggaagcttagaaagcggtgatggagaagagcaatgtagaggaatcatcttcttctggaaatgctaagagacagagaatgagtagtcacaacactatcactatcgtcgaacaacagcaacaatataatcagaggtaatcaattttttacttaaatcgctttttttttttactttcggtgtatctactacgtgtgttgtttgctggttatggaaatgaatgttgtacgtcacgttatactatagatatatgtgtgtttgtgtgtatgtataacggaagtatttgtatccgttgtggtcttggacttttggtttggttctaagatacttatttttaaaaaaataaataaatgagttggttttctagatatgcttaatgggagtatgtgacgaaaaaaaagggggggggggccgccgggcccggggggcgggggtttttaaaaacggcgagacacgtgggaa

SEQ ID NO: 65 - DNA, 1556 bp, Arabidopsis thaliana
  Clone ID: ARATH-23APR03-CLUSTER10852_1
caattttcacgctttcttctcttctcatctcagagctccgtgatgaagaaatggttagcaatcgcagcgacggtggcgataattgcaataatcgttagacaaggcacgacacaatacggatggaacaaagaggcggcgttggaaaagctaaaggaatggtcagatcggctggggatttgggcgattccaacgtatgtagcggttcacacaataaccttagctctttgtctccctcacgccgtcttctttgaagctggtgcttctatgctctttggtttccttcctgctcttctctgtgttttctctgctaaagttctcgccgcttctttctccttctggatcggcaggtttgtttttaagagttccaccagagctacagggtgggcgcatagcaacaagtacttcaatattctctcaagaggagttgagcgcgatggttggaagtttgttcttcttgcaaggttctcgcccattccttcctatgtcataaactacgctttggcagctactgaagtccggtttgtagctgattttctgttccccacggttattggctgcctcccgatgatcctgcagaacgcatcagtcggtagcctcgctggtatggctgtggcttcagtagctggaaaacagaaaagtcaggtctggggttatgttttcccagtacttgggatactgtcaagtgttctgatttcattgaggatcaaaaagtactcagctggaattacagaggcatcatcagatacctctgctaacaactctagtttagcttcatctgaaactgcgaatcccgcttatggaaccgatggatccaagaaaagtgagtgattatacaaaccatgatggtggtttttgatcgccggtattacactttgtttggtttgcagctatcagattctcaacatcatggcttattttggacgagttaggcagtatcttaatagtaacaaagcattagtttttgtacttcttaagttaaaagcttagaacaaaacaacagtgttattttctataccagacacaaaaactgtgtcgttgtaataacacttaccataacattttctttcagtgtatgtttaaaaccgtttatatggtcgaaaaaaaaaaacaaaaaaagtaaaaagcgacagcagatatcacgtctggaacttactgattaaatagcctaaaactcaaattatacgttctaaattaagactaagagtctcgatgattatcttcatgaatccggtgattagtgccggtaggagaacgaagaggaaacaggggcaaaagctccggggccggatcggagccggttctcggactcggacaggaagtagaaccctccttccgctatggctttttgctcttccctgtccggttgcgcgtggagtccctcacacgctgaatgtggactcacgcgcgcccagaatgggtctaggtgagagacgggagagaccaggaatccttggaggaaatggctgaaagcgatcgtttgggtttggatggtggtgaccttaaactccattttcttgaagattgaccccaggcggtggtttgaacgctagcttttt

SEQ ID NO: 66 - DNA, 3679 bp, Arabidopsis thaliana
  Clone ID: ARATH-23APR03-CLUSTER108532_1
atttgcaaggataagagagctccacgtgctatcccttctccttgtgccttcaggctttctctacctgccatagatcaaatacaaaaggtcccccttgctctcgccctcacctttcgtcctagggatactagaaaatccgtatgtaaataggacgcatctcccgacacagacaaactccaagctcttcttacactcaactcctaaggtttctcaatgtgccgagaaaggatttgtgcagttcagtttgaaaccgatactgaggcaggggacccaacagatggcgagggatacgatcggagggacacagccagagccggagagagagtatgatggatcattcctattgaaaacaactatgagtcagtaacgaaacactacaaggcaaatcttcctcacgtccttggtctctggtcttaaaaccatagctttgcctagggtttgctcaagcatacttgggaaccattcagcttgtgtttatatttaaatgactgtagcccccccgagtggcacagtccttggttaatggtggccgtccgaaagaggggatgcccgtcgggtcgcccaataaagatattccctttctactttccctgtgccgggcctgtgttggggcccttgtatgggctgcggccaagttggagccgctcatgggccaaaagattgtggactgcattcaaactcaaaagctattggaaactcttctgttatcgaaagtaaaagcaagttcaattcgctaactatcattgatcacgagaaagaaaagaaaactgatattgcagataatgctattgaggagaaagtgggtgtaaactgtgagaatgatgatcagacagctactacgtttctcaagaaagcacgtggtcgacctatgggtgcttctaatgttaggagcaagagcagaaagcttgtgagtccggagcaggtaggaaacaacagatctaaagaaaaactaaacaaaccatcgatggatattagcagctggaaagagaaacaaaatgtggatcaggctgtgacaacgttcggctcatctgaaattgctggtgtggttgaggatacaccacctaaggcaaccaagaatcataaaggcattcgcggtctgatggaatgcgataacgggtcatcagaaagtataaatcttgctatgagtgggttgcagcgtaggaaatctcgcaaggttcgtctactcagtgagttgcttggtaatacaaaaaccagtggtggtagtaacatcagaaaagaagagtctgctttgaagaaggaatcagttagaggtcgaaaaagaaagttgttacctgaaaacaattatgtcagccggatattgagtacaatgggtgcaacctctgaaaatgcttccaaaagttgtgactctgatcaaggtaatagtgaatcaactgatagtgggtttgacagaactccatttaagggtaagcagagaaacagaagatttcaggttgttgacgagtttgtaccatcacttccttgtgaaacttcacaagaaggtatcaaggagcatgatgcagatcctagtaagagatcaactcctgcgcactctttattcactggaaacgattctgttccttgtcctccgggtactcagagaacagagaggaagctcagtttacccaagaagaagacaaagaagcctgtaatcgataatgggaagagcactgtgatcagttttagtaacggcattgatggaagtcaagttaactcgcatactggtccttccatgaacacagtatcccaaactcgagacttattgaatgggaaaagggtgggcggtttatttgacaaccgtttggcttcagatggatatttcagaaaatatctctctcaggttaatgataagccgataacatctttgcatttgcaagacaatgattatgtgaggtcaagagacgcggaaccaaactgtcttcgagattttagttcctcttctaaatccagctcaggtggatggttgagaactggagtagatattgttgacttcagaaacaacaaccacaatacaaacagatcgtctttctcgaacttgaagctaagataccccccttcttctactgaagttgcggatttatctcgggtgctgcaaaaggatgcttctggtgcagatagaaaggggaagactgttatggtccaagaacatcatggagcaccaagaagccaaagtcacgatagaaaggagactacgactgaagagcaaaacaacgatgatattccaatggagatagtggagctcatggccaaaaaccagtacgagaggtgtcttcccgacaaagaagaagatgttagcaacaaacagccatcacaagaaacagcacacaaatccaagaatgctctactgattgatctcaatgaaacctacgataacgggatctcacttgaggacaacaacacatcaagaccaccaaaaccgtgtagtagcaacgcaaggagggaagaacattttcctatgggaagacagcagaactctcatgacttcttcccaataagtcagccttatgtgccttctccgtttgggatctttcctcctacccaagaaaaccgagccagctccatccggttttctggtcacaactgtcagtggcttgggaatttgccaactgtgggtaatcagaacccttctccatcctcatttcgggtattacgtgcttgtgatacttgccagagtgttcctaatcaatacagagaagcttctcatccaatttggccatcttccatgataccaccacagagtcaatacaagccagtttctttaaatattaatcagtcaacaaatccgggtacgctttcacaggcatctaacaatgaaaatacatggaacctcaactttgttgctgccaacgggaagcaaaaatgtgggcctaatccagaattttcatttggctgcaaacatgctgctggggttagtagtagtagtagtaggccaatagataacttttctagtgagagctctataccggcattgcatctactcagccttctggatcctcgcctgaggtcaacgactcccgctgaccaacacggaaacactaaatttactaaaagacattttccgccagccaaccagtccaaagagtttatagagcttcaaacaggggactctagtaagtcagcctactcaactaagcagataccttttgatctatacagcaagagattcacacaagagccttcccggaagagtttccccatcactccacctattgggacgtcttcactttcatttcaaaatgcttcatggagtcctcatcatcaagagaagaaaaccaagagaaaagacacctttgctcctgtttacaatactcatgaaaagccggtgtttgcaagcagcaacgaccaagcgaagttccagctgctgggagcatcgaattccatgatgcttcctttgaaatttcacatgacggataaagaaaagaaacaaaagagaaaagcagagagctgcaataacaatgcctctgcgggacctgtgaagaacagttctggacccattgtgtgcagcgtcaatagaaaccctgctgatttcaccattcctgaacctgggaatgtttacatgttaacgggtgaacatctgaaagtccgtaaacgcacaaccttcaagaaaaagccagccgtgtgtaagcaggacgcaatgaagcagaccaagaagccggtttgtccacctacacaaaatgcctaa

SEQ ID NO: 67 - DNA, 1623 bp, Arabidopsis thaliana
  Clone ID: ARATH-23APR03-CLUSTER108750_1
aagacaaacagagagtgatgcgatggaacaagaagaacgttatcagtctcgtctcaaagtctcatcatcttccggcgccgattacgccaccgttacctgagatttaccgaatacctaatcctccaccaaagcttccggagatctcaattcctccgacacttacgctctctccatctcccaaacactccaatttcgtcaatttcctcgagaacaatctccctcaccatcaaacactaacgccacaaactcttcttggattcctccgttccaagatccgtaaccatccgctctacgctcattatgacttcgccgtctttaattgggcagctacactcgacactttccgtcatgatcacgattctttcctctggatgtcgagatcactcgccgccacgcaccggtttgacgatctttatcgtcttctctcttttgtagctgcgaatccatgtccttgttcctcaggtatattctcttgtccagagcttgaacctattttccgatccgccattgatgcgtattgtagagctaggaaaatggattatgctttgttagcgtttgatactatgaagagattgatcgatggtaaaccaaatgttggagtttataacactgttgtgaatggatatgtgaaatctggagatatggataaggctttaaggttttaccagaggatgggaaaggaaagagcaaagccagatgtatgcacgtttaacattctcatcaatggttattgtagaagctctaagtttgatttggcattggatttgttcagggagatgaaggagaaaggttgtgaaccgaatgtggttagcttcaacactcttattagagggtttttgagcagtggtaaaatcgaggaaggtgttaaaatggcttatgagatgattgagctaggttgtagattctcagaagctacttgtgagattcttgttgatgggttgtgtagagaaggtcgggttgacgatgcttgtggattggtgctcgatcttttgaacaagagggttttacctagtgagtttgattatggtagtttggttgagaaactctgcggagaaaacaaggcggttagagcaatggagatgatggaggagctgtggaagaaaggccaaaccccatgtttcattgcttgtactacactcgtcgaagggttgaggaaatcaggaagaacagagaaagcgtcagggtttatggagaagatgatgaatgcaggaattcttcccgatagtgtgacatttaacttgcttcttcgggatctctgcagttctgatcattctactgatgcaaacagattgagacttttggcatcaagcaaaggatatgaacccgatgagacaacgtaccatgttttggtttcggggttcacgaaagaagggagaagaaaggaaggagaagttctagtgaacgagatgttggataaagatatgttgcctgatatctttacatataatagattgatggatggcttgtcctgcactggaaaattctcaaggaaacaagtccggatgttgtaacctgtgtttgatctgtgtaaactagacccaagctatatctatgtatcaacaaattttattttgaacatatgaaatggaaaccaagttggttctttgaaaaaaaaaaaaaaaa

SEQ ID NO: 68 - DNA, 915 bp, Arabidopsis thaliana
  Clone ID: ARATH-23APR03-CLUSTER10894_1
aaaaatcctccgtctacctccgtctacctccgtctgattcctcgattgggagaatccaaatttgcttcaggttccgttcgttcatggcttcgccagaggagatgggtgatgatgcatcagaaattccatccccgccaaaaaacacttacaaggatcccgacggtggaaggcaacgattcttactggaacttgaatttattcaatgtctcgccaatcctacttacatccactacctggcacagaatcggtattttgaagatgaagcatttattggatacttgaagtatcttcaatactggcagcgaccagagtacatcaagttcattatgtacccacactgcctatatttccttgaacttcttcaaaaccccaacttcaggactgctatggctcatcctgcaaacaaggaattggcgcatagacaacagttttactattggaagaactacagaaacaacagactgaagcacattctacctcggcctcttccagagcctgtacctccacaaccaccagttgcaccttcaacttctttgccacctgcaccatctgcaactgctgctctctctccagccctttctccaatgcagtacaataatatgctttctaagaatgacactaggaatatgggtgctactggaattgatcgtaggaagagaaagaagggtatataagcatttcctgccctgaagcatacaccatggcgtcagtcgtcagatatggtttcctccatgtcctaggagggaagcctacttgactcaggttacaaaaatgttggaaactcggtattactcattccgtgtcataggccgtttatggaagttgtcatatatggtgttcaatctttgtctatgatatacaacaacccccaatcagtatcagtctttatctttgttccaaaaaaaaaaaaaaaag

SEQ ID NO: 69 - DNA, 3587 bp, Arabidopsis thaliana
  Clone ID: ARATH-23APR03-CLUSTER1089_1
gtttttacttttttagttttttggtaaaattatccttaaagctaaaaatctccataaccaaagcttcttcgttccaccagcaccaaaccaacaatggcgttaactccaattccttcaacattcacttctctcttcaacttctccgatcactctccatatccatctccatctctccattatcttcttcctggatcttctccttccttttctctccagttatctgcgttgagtagaactccgatctacttcgaggcacttaaagttttatcgagatcgaaatgtttcgccaagtctccgacaaccgccgaggatttcgtcggcgattacgaatcccttaacgttagcgacgacgacgatggtagtgacagtaatagtagtgatggagataacggaggaggaagagatgattcaaagaagatcgattcttcttcttcttcttcatcaagtgactctacgtctctgggaattcgtgaaccaggtttctgagcctgcgggtaagaaaaagcactgcgtggatttccgatttgaaattctgatcggaggcgaaattttcatcggatctgatccgatctgacgattagatttcagatctggtttttcaatcggtatcttaacgttgatatcttcgccacgcttcagaattcgtacatgattggtgtggttatgaggagacggaggaggatgagagatctgggattggtgacttgacggactccggcgacggcgattggtgatcggttttttatgacggagaggaggggacgtgtttgtggagaaatgattgattatagaatcatgaggatgaagaacagcgactcccatggtgatttctcagatctagagaagaaatgttaggaggataatgagagaactgggaaggagaagggtataattgtaaaaaaagggtcctttgaattggaggaacttcgtattagcaaacaaagactggttgaattgggctcccgagctggagctcttagacaaatgctcctggatcttttagaggatccccatgaaatacgccgcatatgcatcatgggaagaaattgcacacttagaagaggagacgatgatttggagtgtacattaccctcagataagctgattgctgaggaagaagaggaggaaatcgaaatgctcttggagaactatctgcaaagatgtgagtcatgccatggacaagcagaaagacttctggattctgcaaaggaaatggaagactcaattgctgtcaatctaagttctcggaggcttgaggtcagcaggttcgagttgcttcttcaggtcggtacattttgtgttgcagttggtgctctcatcgcaggtatattcggcatgaacttgaggtcctatcttgaagaacaagcttctgcattctggctaacaacgggtggaatcatcataggcgctgcagtcgccttctttctcatgtattcctatctcagtagacgcaaaatcttttgaaccttcaatcctaaaagacgaaagaagaggtttaaaatccgtgaagaaagtgaatttcattcatcacagttacattatggcattaggcccctactagtagttagagcgaggtgagttcatcaaatgtctgataaatatttattgttgtggtctccattgaaccccagtgacttgtgtgctatgtcctcattgcttggtaatgttgtaagatcaatgtatcatttaataaactggttcgaaagcaaatgaaaattcaaatatagggtttatcaaaactgttttcgagagtaaagggataaaaaacaatacagtatctaaatcttcgattcccagagaagaaattcaaagacaaatacaaaactttttcaggcatttatatttgtttcttaagtacgaagatcacgagctgattgacgaccttctcttgctgaggtctttctttccgagccatcaatggcgatatttccaacacctgcctccatggcttccctctcaaccttttccttatctttatcctcatccgacgcttcctcttcttcttctttgggattttgtggactcgatgacggtttcagtgatttagggaccggattcaaccatgggtgcgttaggcactgagcagccgtcggtctcttctcaggtacaaattgaagaatgggagtgatgaaatcttgcatagcaattgcgtcttcctcgctgaagtcatatttatctgttaagaccttgctaagtggccaaaaccgtaaccgcctgatgtgccgtagttcaccctgtcggttgaagaaatcccgcgaatggcgtccacctaatgcaatctttcgtggcatcatcccgagaagctccatcatcaatgccaagtgatcctcatctcgctcaaagttttcaccactgtgaggatcgaatagaacatctccggtggcaagctcaaaacaaatgcaagcaaatgaccacatatccgctgaggttgagtattttgagccaagaacaacctcaggacaccggtactgtcttgtctgaatatcactcgtaaactgtttataagtccaacaagcattcccaaaatccaccaacttgcatttccgatcaacatccgcaagtaacttttgcctcgtggatcggcttcctctcctatttccccggctcttttgactaacattctctgcatcttttactctttcagaactctcttccaacctctccacagttgcatttccatttggtcttgcctcagagttagaagagtctctctcattttcctctgaaccttccactttcttagctttcttacggatcttcttcttctgattcttagtcaaatccgcactatacgtataactcttaggtttctctttttcaactggtctctcaggaacagccttgtccttcacagttggaagaacaagaggaatccccgatttccgagcatctgcttcagggtcaatagtggaacaaagcagaatattctccggcttgatatcagtatgaataatagaaagttcacgatgaagataatccaaaccaactaagatatgaaaacagatctctttaaccatatgaagaggaacccctcggtaatcactgtacttgataaccgacaagaggttatctcccaaatactcaaaaaccatacaaacatgttgcccattaggaccagcatgcttgaaatgatcaagaagcttcacaacacacttcttatcttccgcatcgccttctgcaatctgtttcaatatctttatctcatccatggccgcttcagtgtagtgctgagcactcttctggattttcaaagctacgtatcgagagttgagagtgtcccaagcgagccagacagtggagaaatgtccccaaccaagcttactttgaatgacataagatccattcttaaaagtatcaccgactcgaaccgtatggtaacctcctcttctgtaatcttctgttccttcgtcctctgatgagtagtcactagcgtcactcagacgtccaccgttcttctcatccgccatcgccggaatagttgaaaagtacccccaatcgagaaacagcgaatctcgatctgggaaattcaattcaggaaaaacccctaaaaccctagaaatttgaggttctatggaagagaagaaagt

SEQ ID NO: 70 - DNA, 2471 bp, Arabidopsis thaliana
  Clone ID: ARATH-23APR03-CLUSTER109267_1
ggattccaaccccccaccacttctttgttcgtcgttttttctgttccccctacagctccaacctatccatcgagattccgagggcttcttctgttacaagctaaccacagagggctgtgtagagcgaggtacagtttgcaagatttcacaaatggctgaattgtcccaacaataactcaaacatgtcgtccggggttagaagtgtcgttcccccactaaccaggttaatgtctggtcttccgctcgctgacacagcctcttgagcttccaaaacctctctaccgttgatgcctccaatgaccaagacaaggacgacaccctggtctgccaggcttggttttgcctgacccagtccaagcctgccattcccgcccgggtttctcctgcctgctcaacacttttgttataagcctgtagactagccctttgtttccagaaggctcgccaggaaagctgctctctgaagccaatgagccttctcttaatggtagattccttgttcttagactcgataacttgtggaggaacctaaataagctgtctactctatcacgcaaatccagtttcagctgcatatcgtcataggactcgtctgctttactattgtcaacttcttcttcttcctcgtcaccccatttcccccatggatcatcatcaagagcatcaatgtctaattgatcatcagagggaatttctttggtttcctcagacttgagacgattcaatctgccctcaagctcttctgtcaacccattaagaaacttgagatttcctgctgatggattctccagaacagcatcgacaatggcttcttttagtcattcccccgcttcccgtctggaccgcccgccggagccgggtgtagggaaattttcgccagcaagaatgtaaccaactattgtaagaagcagggcatcacgaaaagatagcagccctcgtgatgaggaatctggtttctcgtttttcttcgcttgaagttctgccacagcgcttttgttgatcaggtcactaatttgagcagccaaaccctgactcgtatcaccagcacttacgtttaacatcatctccgcactgctaaaagtatcccatttggcactttgagattcatcaagagcagcggctgtagctgcccctaactgaataatccctttatttttcaacaaagacgactggctttgggacaatgctttgatcatggcctggagctccggttttgtagcataaccaggacgagctctcacgttaacagagatattttcgcgacgcaaagcctcttgaagccatttcttcaccagtacacttccatccttcgttttcctatcaatcatggcctctaagtaaggtgttcctctaaaacattcagtagcgacaagagatccatttagtagttcagtccagttggtggtagatttcttgtcacattcattaaacaaacctacattttgtggagcagaggtatatgaatcccagccacgtaaaaaagcttcaattccttcaggaagaccagaatcccgaatcttgcttggttcttcattaagcagttccccaagcggcacttgaacatcaagagaaggacgattgatgcttgggaccccttgtttaagctgtgcttgtgaagaaaatctttctgcccgaggcaaagatgaaaagatacgatcgaaaagtgaatccccgtgacagcagggagtgataagatcaagtgtgcggtcaacaagtaacaagccagcagatcgcttacgacgcgctacatcataaacacttgacatgtctgttagaatcttcccaacattcttcgattggtcaccaagtgaaaatatttccaacttcaactccatcttaagggccagctggtaaagaaaatgtgcggtaagagttgcaccaggaggaacatcatcagtgtcagacatagatccagtacttatgggaggcaaaccaaaactaagagaatcctcatgttgacgggacaaggacgcttctgcgactgatccttgtgcaccacctgatgaaatatctacattttcgctttcaataggctccatagtaagggattcaagtgcagaagagaacttagaaacccctttgtctttagatattttgtcgcttttcttagtatgttcattgtaatcctgaacaagtaaggtttcatactctcgatacgcgtctggaccttcatgggtgcttagacaccgtagcatataccgatgagcatcattgagaagtcgagatgtcataatcacaattctcttggcacaatcagactttgaattccaatcagccaccgcatctaaggaagtcatgttttcaagactgcagacagctcgagcacctagttccaagaacaaagggaaagctcctacaaattgaaaactttctgtgcagccagcatcgatatacacaatcgcatcttttacatcctcttctatttcgcggatcgaattgagacaagatatcgcgacatcgatcagagccat

SEQ ID NO: 71 - DNA, 1687 bp, Arabidopsis thaliana
  Clone ID: ARATH-23APR03-CLUSTER10949_1
tttttggttctttcgttctttttttttttgagactcaaaaaacaaagttactttatcggaaatgtcacatttgacgcatgagagacactttcttgccgttacttgttattgtcgttgcaacaaccaaaactatggttgaactaaaaagccccaaaacgtgcgacacagttcacccaaagtgcaaataatctttacattcaagactctagactcagtaagcaataaaaacagtaagtgatacaagaacagagagttgagttttgagcgtgaatccggtaaaaaggaagatgcgttacatatacatctgaagcatcttaaatgcttgctccaattgttctttaacattacgagttaaattcttttttggcagaagcaaaaaattgaaaaaacttgtgtaaaaagcatgcagcgaaacagagttcttgcgttcttgttgctagcagctcagctcttggtgaagatacctgaaacgtgtgcaaaatttcccgcacttatcgtatttggtgactcaactgttgattcaggcaacaacaaccagatttctactgttctgaagagcaatttccagccatatggccgggattactttgacggcaaagcgactgggagattttcaaatggccggattgcaccagacttcatttctgaaggtttgggactcaagaacgcagtccctgcctacctagatccagcatacaacattgcagactttgccactggtgtctgtttcgcttcagctggaaccggcttagacaatgcaacctctgccgtgttatctgtaatgccgctatggaaggaagtggaatactacaaagaataccaaaccaggctaagaagctacttgggtgaagagaaagctaatgagattattagtgaatcactttacctgattagtatcggaaccaacgatttcctggagaattactatcttcttccccgcaagttacggaagtactcagtgaacgagtaccaatatttcctgataggaatagcagcagatttcgtgacagatatatacagactcggagctcggaagatgtctttgtcgggactctctccttttggatgcttacccctggaaagaacaactcagctcttttatggaagcaaatgtattgaagaatacaacattgtggctagagatttcaacatcaagatggaagagaaagtcttccagttgaacagagatctgaacggaatccagctggtgttttcaaatccatatgaccttgtttcagaaatcatataccatcctgaagcattcggtttcgaaaacgtaagaagtgcgtgttgcggaacgggatactatgagatgagctacttgtgtgataaaatgaacccattcacatgttcggatgcaagcaaatatgtattttgggactcatttcacccaacagagaagacaaacgccatcgtagcaaatcatgttctgaaatacgacttatctcggtttcagtgataaaataagaaattgctacaccacaagcactatagttattagttaacctactaaattctttcctccacaacatatatatttttttctgtgagtttcttgtctagatatcactcaaatcaagcttccaaaatgttgtacaagaaccattcttcttactctatgttcgtgtgactacataaagatgctactgtgatgttataaaaatggacaagatcaaactttaaaatt

SEQ ID NO: 72 - DNA, 2369 bp, Arabidopsis thaliana
  unsure (1)..(2369): unsure at all n locations
  Clone ID: ARATH-23APR03-CLUSTER109838_1
atggcttgcatgaagctgggatccaaatctgatgctttccagagacaaggccaggcttggttttgcacaactggacttcctagtgatattgtcgttgaagttggggagatgtcttttcatctccacaagtttcccttgctctctagaagtggagtcatggaaagaaggattgcagaagcatcaaaagaaggcgatgataaatgtctcattgaaatctctgatcttcctggtggagacaaaacgtttgaactagtcgctaagttctgctatggtgtgaagcttgaactcactgcttctaacgttgtatatctcagatgcgctgctgagcatctcgaaatgactgaagaacatggggaaggaaatcttatttctcaaactgaaacatttttcaatcaagtagtcctcaaaagctggaaagattcaataaaagcgcttcatagctgcgatgaggtcctcgagtatgctgatgaattgaacattaccaagaaatgcattgagtcactagccatgagagcatcgacagacccaaacttgtttggatggccagttgtggagcatggtgggcccatgcagagtccaggtggcagtgttttatggaatgggataagcaccggggctagacctaaacatactagttcagactggtggtacgaggatgcatcgatgctaagttttcccctttttaagagacttatcacggtgatggagtcccgcggcattagagaagacatcatcgctggctccctaacctattacacacgaaaacacttgcctggcttaaaaagacgacgtggtggacctgaatctagtggtcgtttcagcacacctttgggctcagggaatgtactgtccgaggaagagcagaagaacttgcttgaagagatccaggagcttcttcgtatgcaaactcgcttggccccccccccccttttcgttgacatgcttcgaatcgccaagattttaaaagcaagtccggattgcatagccaatttggagaagaggatagggatgcagcttgaccaggctgcgttggaagatcttgtaatgcctagcttttctcatactatggagaccctatacgatgttgactctgtgcaaaggatcttggaccattttcttgggacagatcagattatgcctggtggggttggctctccttgttcttcagtagatgacgggaatttaatcggatccccacagtcaataacaccaatgacagcggttgcaaagctgattgatgggtatcttgctgaagttgctcctgatgtcaatcttaagcttccaaagttccaagctttagctgcttctattcctgaatacgccagactcttagatgacggactctatcgtgcaatagacatttatctaaagcatcatccatggttggcggaaacagaaagagagaatctgtgccggttgttagattgtcagaaactctctttagaagcttgtacacatgcggcgcagaacgagagattaccgctaagaataatcgtccaagtgctcttctttgagcagctacagctcagaacctctgtagctggatgcttcctggtctcagacaacctcgatggcggatcaagacagttaagaagcggaggatatgtaggaggaccaaacgaaggatggcggaggaggaggaggatgggcaaccgcggtaagagagaatcaagtcctgaaagttggaatggacagtatgagaatgcgagtttgtgagttagagaaagaatgttccaacatgagacaagagattgagaaactcggtaagacgacaaaaggtggtggttctgcaagcaatggagtcggtagcaagacttgggaaaacgtttctaagaaactcgggttcggttttaagctgaagtcgcatcaaatgtgcagtgctcaggaaggttctgtgtctaagtctaacaacgagaatgtgaagatagagaagctaaaggatgttaaagagcgtcgtgggaagcataagaaagcttcgagcattagttctgagaggtgaaaatggtaaatttccacggttcaaatgtccagttactgtgtgtttggacattgtttagctaaaaaaaacaaaagagagcttccattgttaaatgtgtgcattgtaggcttgtaatcatgtttctttttttcaattgtttatgtaactttgactaccaactattttgtcatttttatatttttattttaaacctctaagaaaaaaaaaaaaaaaaaaaaaaaaaaaaaaaaaaaaaaaaaaaaaaaaaaaaaaaaaaaaaaaaaaaaaaaaaaaaaaaannggggggggccccccaaaaaaaaaaaacctttttcccccgggggggagaagaattttttttttttttttgggccccaaaaaaaataggggg

SEQ ID NO: 73 - DNA, 921 bp, Arabidopsis thaliana
  unsure (1)..(921): unsure at all n locations
  Clone ID: ARATH-23APR03-CLUSTER10983_1
cttncctagcactcctacggaaaagtcaaacttgtgcgtgattcatcgtcacatcgccttgatcatggaaactcctatcgatgctccgaataaggacgaacatgaatgccctaggtggaagaaatcaactgtagtttttgtgttgggtggtcctggaagtggaaaaggtactcagtgtgctaatgttgtgaagcactttagctatacccattttagtgctggtgatcttctcagagcagaaattaagtccggttctgaatttggagccatgatccaaagtatgattgcagaggggagaatagtgccgtctgagatcacagtgaaacttttgtgtaaagctatggaggaaagtggtaatgataagttccttattgatggcttccctcgcaatgaagaaaatcgaaacgtattcgaaaatgttgctagaatcgagcctgcttttgttctattctttgattgtccagaagaagaactagaaagacgcattatgagcaggaaccagggaagagaagacgataatatagagaccataaagaagcgatttaaagtgtttgttgaatctaccctcccaattattagctactacgaatcgaaagggaaacttcgaaagatcaatgctgcaaaatccagcgaataggttttcgaggctgtcagagttctatttgcatctgaaacttgacaagcatcaaggacttggattcaccgaacagaacaaaacagagactccaaagtcaatgatgtgccttgtcgtatacgtaactaagtttacagattcatgctttatttgtatatgtaattatctctacattttacatgttctcatcatacgatatagccaaactttcgtcgcataaaaaaaaaaaaaagcctaggaaaaaaaaaccaacacttgggaaatgctgattaacaaatataagacta

SEQ ID NO: 74 - DNA, 821 bp, Arabidopsis thaliana
  Clone ID: ARATH-23APR03-CLUSTER109851_1
acagagatcttgtgatcatcccaagacaaaaccagagaaaaagacctgtctgtttttttaagaagtctttatatttttttttttgtcggagaatcttataagcatggcttcaggaggatcaaagtcggcagctttcatgcttctgatgctgaatcttggtctctatttcgtcatcaccatcatcgcttcttgggctgttaatcacggcatcgagagaactcgcgagtctgcgtcgacactgtcacttccggcgaagatattcccgatatacttcccggtggggaacatggcgaccggttttttcgtaatattcacgttaatcgccggcgtcgtcggaatggccacatcactcaccggaatcatcaacgttcttcaatgggactctccgaatctccactccgccgcggcttcctctctaatctcctggtctctcactctcctcgccatgggattggcctgcaaggagatcaacataggctggaccgaagccaatctaagaactcttgaagttctgactataattgtgagtgctactcagttgttgtgcaccggagctattcatgctggagtcggagaaacagtcgcctccggagaaaggcctcatcttgggagagtttgagtttcatgattcttcttaaaagcggttttacatttgcttcagatcgtgtaatttgtgtgttgtgtcttgtgtgtgtttattcttttgttttgtttgattattatgatcatgtaaaatgattagttggtgtgaagaaaaaaaaaaaaagagattgataataatattacacattacattcaaaaaaaaaaaaaggggtcgcaag

SEQ ID NO: 75 - DNA, 2528 bp, Arabidopsis thaliana
  Clone ID: ARATH-23APR03-CLUSTER10985_1
agtttccattctcactctttctctctcaatggttagatctgtcttttacgtcgcttcgaagtcttctttcttcccttcacatacccaacgaatcctctcaaatccctaattatccaatttcacactcgagatctcgaattggagtctctcatcatcaccaatggcgtctccaaatccctacaccaagcgccgctctccgccgaatgtcgttgtaccgccacagcctcggtataaatccataggaggaggaggatttttctgtaagtctgttctattcgctctttttctcctcgccttgccgttgttcccttctcaagctcctgatttcgtcggtgagactgtgctcactaagttctgggaactgattcatctcctattcgtcggcattgctgttgcttatggtttgtttagccgtaggaatgttgaatccgctgttgatttaaggatgactcgtgtagatgagtcttctttgtcttatgtatctagaatcttccaggtttcttctgtttttgacgaagagtttgatgataattcttgtgagtttgttgatgtgaggagtgatgagagtgtgagtgctcgagcttctgtggttgggaaatctgagtcttttgttgttgaaagcggcgaattggaagaatcgtctgaatttggtgaaactaatgaagtccgagcttggaattcgcagtatttccagggtaagtctaaggttgtggttgctcgacctgcttatggtcttgatggtcacgttgtgcatcagccattaggcttgcctattaggaggttaaggtcatctttgagagataatgctgctcttcaagacaaatcttttgctgatagctgtgatggagctgttaatgcggaagctgagtcattattggctgataatttttttgatgaggtcttggctgctccggcttcacctgttccatggcaagctagacctgaaatgatgggaatcggtgacaactatccttcaaatttccagcctatatctgtggatgaaacccttaaatcgatatcttctcggtctactggttcttcttcatctcaaactagttatgcatcccagaatcagaacagattctctccttctcgatctgtttccgcagagtcactaaactcaaatgtggaagagttggtcaaggagaagagtcgccagagttcatcacggtctagttcgccatccttgcccccatcaccttcactgtctccatctccaccatcgccagaattagtgcccaatgatactcgcagacgttcgccagaattagtaaccgatgatactcccaggcgtgcgtcacattctcggcattatagtgatggttccttgttagaggaagatgtaaggcgggggtttgaaaatgagttggaggggagtaaagtcagaggcagaaaagcagaattcttcagtaagaaggaacggggatctaaatcacttaatttggcagctgaaagttcccggagagggaacaagtctcgcagatcctatcctcctgagtctatctcatctcccgttggtggtgctgatgactccacaactagaagacaagatcttcagcaaaagagtaattgtcatttgcttgaagaaaatatcaggaaaggagtggaagctgaccataacaatctgagggtcaaaaagggaaggagtcacgactctttggagctaacagcagaagattctgcaaaagatgagaaggtcagtgaatcttttcctgctcttgatgtagtgttccaaccaacaaatgctaaagcttcaaggcgcgccatgcgttcttcacgagggggacgtgacactttgccggagaaggatgttgtcaccagaaaattagaggatgacactgtggattcggataagtccaggaaaaaggaccttcctggtaaagacaaggaaatgaaattagacggtccaagaattgaaccacgttcttggagagcttccagtaatgtatcactgagaggaaagtccgtgaggaccataagatctgatcgtcatgggaaagatgtaaagacagatggagattcatctgaggatcgggcagaagctaaagtagaaagccgaggaagaacgaaatcgagaagaccacgacaagaagaactatcgattgtactacaccaggagaaaagttcagaaactcgcgctaaatccgagccagaagaggttgctatggaagagccccaggccgagcagcaacctgaagtaactttcgaagaggaggaagaagctgcttgggaaagccaaagcaatgcaagccatgatcataatgaggttgatagaaaagccggtgagttcatagccaaattccgagaacaaattaggttgcagaaactcatatccggtgaacaacctagaggaggaggcactggtattttcagaaacagccaattcagatgacactcaccaccatttattgcctcattacttgtattaatattgtaattttaattcatcggcattgttgatgagaatctggttgtcactctctttgtttgaagtttatattgttgaataaaaatgaacttttaacctt

SEQ ID NO: 76 - DNA, 1108 bp, Arabidopsis thaliana
  Clone ID: ARATH-23APR03-CLUSTER109880_1
ccccatatggggcccggtccagcttggccgcgtaccggacccccgttatagttccgcggccgggggccccccctccggggggccccccccgggccccctccactctggctcccccccctccctgttcgggccgcatctcggggggaccggggaatttccccccccggatgttatagggtttctccccggtttccccccccgccgtcgttgtctcccttggtagtggcattgcacagggggggcccccccggggggggggggccccttataaggtggtgactaccccccgggggggtaaagcttcccgggggccccttttcgcggttcctgcttatacaaaagttagttgcaagaacatgaaagcagtggtgagcaagttgtattgttcctcgatggaggaagtgatggtggtgagacgacggccacacgtggttaacggcggtggctttgtggtgacagattacaaagaaaagatagttttcaagatcgacggttgtggagttcttggaaccaaaggagagttagttctcagagatagtgatggcaacgatttgcttctcatccacaaaaagggaggagtggtgcaggctttgagcattcataacaagtggaaaggttatagttacgactaccaaggaagtcctaaaccggttttcacgttgagggatcccaaacactcgtgcttctccataaccagttcaatccgcatctcggttggaccggggaattgctactttgatgttaaagggtatttcccggatagggattgtagcatcgttgattccacaggaaatgtcattgcacaagtaaaagaatggattgggagcagagatatatataaggtggtgacaaaaccaagtgtggataaagcttttgtttttggagtaatcgcggttcttgactatatatatggtgaatctacaagttgttgatccgcacatcactatcatctgcacatttctgtatttgcttgagtcctatgtatgttgttcctcaatgtttcttgtaaagtttaatttatgtataaattagttaattaattaactatgtaactgttgtataaaaaaaaaaaaaaaaagttatcgatccggcccacccccgagggggg

SEQ ID NO: 77 - DNA, 730 bp, Arabidopsis thaliana
  Clone ID: ARATH-23APR03-CLUSTER10995_1
acttccctctttctctctttcactttgctctgttcactcagagcatcaaataaacaaaagagagaaaccaaaaccacacaagactaacgatgttgctagggaagagacagagaccaccaataaagagaaccacgagtctatctgagattaagttcgatttgaatcaacctagcgaacaagaaccatccgatcatcagattcagcttgtgaacgttgatgaacatcgtcaagttcatcaaagattgttagatcaacggcttttagcgatggtctcaccaagaggtacacagagaagacactcaagtgattattctgaagattttctaagatcttgctctctttgtaaacgtcttcttgttcatggccgtgacatctatatgtatagaggagatagagcgttttgtagtttagagtgcaggcaacaacaaattacagtggacgagaggaaggagaagaagaaaggttcggtgaggtccaccatcgtcgtcgccaccggaaccaccacaggagagagagtttccgccgccgtgtaggtctcttttacatatgttatatattatcggtaatgattgtattatatggttcttgttttatgtataaaaagcattgagcactattgactgtgattaaccatgttaatcatcctttaaaccttgcttttgatcttaagaattattgtattatgcatattaattagatttgtgttctactgattattctacttctgact

SEQ ID NO: 78 - DNA, 1362 bp, Arabidopsis thaliana
  Clone ID: ARATH-23APR03-CLUSTER11000_1
gaaaacactgtgagagagttgaccaaaatcgacccagtgggaggactaggtttatcgaaagctccagttttcatagataaatccagtaaaattatacacgcaaattctagtttcttagagcaaagctttgttgaattgatagcttgaatttgggaatggacggagaagagcttaccgagcaggagactgccttgtacgaccgccagattagggtttggggcgctaatgctcagagaagattgaccaaagctcatatcttggtatctggaattaaggggactgttgctgagttttgcaagaacattgtgctggcaggagttggttcagtgactttaatggatgatcgtttagcaaacatggaggccttgaacgctaactttttgattccgcctgatgaaaatgtttacagtggcaaaactgtggctgagatttgtagtgattcactcaaggatttcaaccctatggtccgtgtttccgtagagaaaggtgatttgtcaatgcttggcactgatttttttgagcagtttgatgtcgtagttataggctatggttctcgtgctaccaaaaaatatgtcaatgaaaaatgtcggaagttaaagaaacgtgtcgcattctatacagtcgattgtagagactcatgtggtgaaatctttgtggacctccaagattacaagtacacaaagaaaaagcttgaagagatggtggaatgcgaactaaattttccaagttttcaggaagctatatcggtaccatggaaaccgattcctcggagaacagcaaagctctactttgctatgagagtaatagaagtgtttgaagagagtgaagggcgtaaacatggagaatgttcgctactcgatcttgccagagtcttggaaatcaaaaagcaactctgtgaggcaaactctgtgagcgagagccatataccagatattctcttggagagacttatcactggtactactgaattcccgccagtttgtgccattgtgggaggaatattagcacaggaggtgatcaaagcagtatcaggcaaaggagacccgttgaaaaacttcttctactatgatggtgaagatgggaaaggtgtgatggaagacatttccgactcttttacctcttaaacaaccagtgggccttgatttagtttaaactctataatctctgagattccatgtatatctcaatcgtttgttttttgccttcacattatgaacaaatttaatgcagaatttagtggaggatcagttgtgattttccttcggtaaaatcattttcagttattgacatttgaattgttcaatttcaaatttcaaatattataattcaattcaaagactagctaagtttttaaaaaaaaaa

SEQ ID NO: 79 - DNA, 2946 bp, Arabidopsis thaliana
  Clone ID: ARATH-23APR03-CLUSTER110052_1
atgtcgacggcggaggcggattacgtgaaggccaaaacatcggtgtggtgggatatagagaattgcgaggtacccagaggttgggatgcgcacgtgattgccttgaatgtgagttcgtctttgttgaagatgaattattgtggacctgtctcaatttcagcttatggcgataccaatctcatccctctccatcatcaacaagcactttcttctactccggctgcgcttggtctcacccccgcccgagtgcgagacgcgggcgactggaccaggctggcggtcttgtggttgtgggcaatagacgaccctgcgcccgcgcatttaccgctcctctctggtgtctcagccgtcgcgtccgctccccttcaccttggcgtgggggcgtttagcgttcgcttggctctcccccctcgagcctctgtcccccttggtgctgctccctgtggtggtcgcctcggcactccccgagccccccgcccacgtccccgaagcaacacaggagcagcccctcgctttgatgaagggggtttgcgtgtctcggggcaccggatgttaaagtggcccttttcgggagacgctccgtctcggcgaccttctggctcagtttcttacctggccagaatcgagagtctagaatccccaatgaaccgagaggatgtttagatgtgattcctgagagagtaaaactgcctaccaaacgtgaatgtggccaaagaatttggaagatgagcagaagcataaacccgaaccaaaagcacaggaagccgaaaacaagtctggaggacgcaaggatcttcctggagaggctgccaaaagggaagagattaagggccaagctgataacttttggactcgcctttgggggaaaaaatattaaaataatgtgaattgttaattcatgtttaagttgtcaacaataggatgttttcttttgaatggcagattaacgttttattttggattggcttttgcttatttcttactgttgtttcttatatataaactttacctcttaaaaaagattcaagaacaatggttcttgggcaacataatatgaataagaaggtgatgattgagagtagagctcaggcaaacgctgaattcgtttgtcttatgtgcaatgtggtgtgccagagtcagattgtctttaattctcatctgcgcggtaagaagcatgccaacatgctgagtcaatcagaggcaacattggatcaggcactcattgtttctacaaagcttcaagagaaaggagtcggagaaaaagaacaaccaagtgaaacagttgcagagcttcagttgcagtctcaaaaggctcaagagaagcaggttcccatggtactagttgattctaagaagcttccagagaaaggtgatgaagtaaagggtcaaccaaaagaaatgactgcactgcgtaatgcaagtgctaaatacatttgtcgtatgtgcaatgatcaggcactcattgattctaagaagcttcaagagaaaggtttcggagaaaaagaacaaccaagagaaacaattgtagagccacagttgcagtctcaaaacgctcaagagaatagcaagtgtttcgaaaagcatgttgtcatggtgaatcaatcagaggtactcatcaatgcgagtaagcttgaagagaaagatgcccaagaaaaagctcaaccaatagaatcaatagccgaacctcagtcgcagtctcaaaacactcaagagcataccaaattctttgagaagcaaaacgaagagttgagaaagatttgtggcactttagaaagcagtgtaaaagaacctcttccaagtactaaggactgggtggagactcttaacaaacagattccaaatggagaatttttctttggtgacctaagatctgattttgaagtacccagggaagcaagtgaatgttttgatggcattgtcaagcctgtaaacctttccaaaggagaaactaagctcattggccgaaccaaacatactactccgcctttgtagccagcaatggttctcagtccagcgtttcaaccaatcctttgaaggaaccagagggtttgcagcccgtgtggtgccaagtctgccagatcagctgcaacagcaaggttgcatttgcaagtcacacatatgggaaaaaacaccgacagaacttggaatcacaatcagccaagaacgaaactatgtctactggaccaggcaagctttctaaagattatggagaaaaaacgaagaaagtatcatgcaaaaaccaaaccacatttgattctcaactgaagagtcagaaccattataccatggcgaaggagcttgtaggaggcatttgtctccgcatttgagcatgtctccgcattggagcagttcagtattgttgactcaaggacaatccgagaagacaccgaccaagaaaaagaagcaacaaaggagcagacacttgtaaagatggatggtaatgggtttcgaggggcaccagaagataaagtggaattgaaccaagaaaaacatagagaagcactggagcagttcagtattgactcaaggataatccgagaagaaaccgatcaagaaaaagaagcaacagaggagcagacacttgtaaagatggatgatcttgggtttcgaggggcaccagaagataaagtggaactgaaggagagacacaccgtatctgagaacttggtgcaccgtgtcttcactgaacagaatcgagagtctagaatacccaatgaaccgagaggatgtttagatgtgattcctgagagagtaaaactgccaccaaacgtgaatgtggccaagaatttggaagatgagcagaagcataaacccgaaccaaaagcacaggaagccgaaaacaagtctggaggacgcaaggatcttcctggagaggctgccaaaagggaagagattaagggccaagctgataacttttggactcgcctttgggggaaaaaatattaa

SEQ ID NO: 80 - DNA, 1419 bp, Arabidopsis thaliana
  Clone ID: ARATH-23APR03-CLUSTER110158_1
gtccaaattagagaataagtaactcaagaaggagtgaaatcaacacaaaacacaatgatgatcctaaggctggctctagccatcgtcatctccgcctatgcaaccgcacaaccagcctcaacatcgtcgcttgtaacctatatattcggtgactcgctaaccgaagttggtaacaataatttcttgcagtattcgctagcaagagcagactttccatattatggagttgatttctccggtggtaaagctaccggaagattcaccaacggtcgaactatcggcgatatcatatctacgaagctcgggatactatcaccaccaccatatctatcgttatcacaaaacgacgatgcatttctcagtggtataaactacgcatctggaggagctggaattctcaatgaaactggcatttacttcatccaaaggctaactttcaatgatcaaataaattgtttcaagaaaactaaagaagttattagggcgaaaatcggagatggagctgcgaacaagcatataaatgatgccatgtacttcattggtttgggaagcaacgattatgtaaacaatttcttgcagccatttatggcagatgggcagcaatatacacatgacgagtttgtcgaactcttgacctcaaccctacacaatcagcttacgacaatatacaaattaggagcgaggaaggtaatatttcatgggttaggcccattgggctgtatcccatcacagagagtgaagtcaaagacacgcatgtgcctgaaccgtgtcaacgaatgggtattggaattcaattcaagaacgaagaagctattaatagatctcaacaaacgcctccccggagctaaattctctttcgcagacacttatcccgccgttctcgatctcatcaacaatcccactcactacggatttaagatagcaaacacgtcatgttgcaatgtggacacaagtgttggaggtctttgtcttcccaattccaagatgtgtaaaaaccgtcaagactttgtcttctgggacgcatttcatccgtccgattcggctaatcaaatcctagccgatcatcttttctcttctcttctttcttcctcttctccttctcctgctcctaaaccacgtcaatagtttagcatttacaaaaataaaaacagttaaccaatttttgttaaattggacctacttgctatatacatgtgtaactaattttatgttcttgatgtaaccatcaggacaaatatgtgtgttttgttacacaagtattatatattataagataattatggtttgtatgtatcatgaacacattgttatatatacacatatattcgtgtttagtgtttctagacatgtgttataaataaacatctacaccaattttggtcaaaaaaaaaaaaaaaaacgcgctttagaggaaaaagc

SEQ ID NO: 81 - DNA, 1317 bp, Arabidopsis thaliana
  Clone ID: ARATH-23APR03-CLUSTER11015_1
atttttctcttttccctctccttctttcttcctttataaatccatttattcatccttcatctctcagcaaaatcaaatcctcatagttgattctctctatctctctcacgagtcacgatcctactcttcttgatatggctgaggttttgcgtcccgagatgttagatatctctaacgacacttcttcattagcatcaccgaaacttcttcatgttcttgctgttgatgatagtatggttgatcggaagttcatcgagcggttactcagagtctcatcttgtaaagttactgttgtcgatagtgcgacaagagctttacaatatcttggattagatggagagaataatagttcggttggatttgaggatctgaagattaatttgataatgacggattactctatgcctgggatgactggatatgaactactgaagaagatcaaagaatcatcagctttcagagaaataccagttgtgattatgtcttcagagaacatcttgcctcgtatcgatagatgtcttgaagaaggagctgaagatttcttattgaagcctgtgaaattagctgatgtgaagagattaagagattctttaatgaaagctgaggaaagagcttttaagaatattatgcacaagagagagcttgaagctaatgatatctactcgcagctaaaacgcgcaaagatctgagtttatcagattccacgtacgatatgttctttaaaagctcaaagattcacacacatgcatgtcctgattctttcggcttacaatttttgagacattacggcttcttttgctgatagaaccaagactgatcaagagtgacaaagatgggtttttataagatagaaatgtaaattgtagacttggattcattagagaggagaagagatacattttttttttctttacatgagagatatgtaaaatggtggtgtgttattttggaagttaacatatgaatttcttttgttaagattacttaaataatgatttaggaatggattagtaccgttcattacacgaggacaagctaatcttttgctaattaaaataaagctgtctatatgaatcgaatccagcgagataagttagttattttaagcgttggttgggaccactttacatggcttttcttagaaatttccccaagttgggttttattaagaccaagaaaattctagtccctagactgttcatctatctgaaagccaaaaatggtatgcaatccggtatatcctatagccaaaaaaacaactaaaattaatccggtccagttactcctaatccaccaattaaattcaatgccaaaacg

SEQ ID NO: 82 - DNA, 1848 bp, Arabidopsis thaliana
  Clone ID: ARATH-23APR03-CLUSTER11033_1
atgctgtcacgtcgcgcgatcggtctccaaccgctcctcggtcccggctctcaccccctcccgctgaccggttctcggcatgcgctagcccctcgctgcgcagcgcgcgggttgggcgtgcgtccgctcggtctccgggccgtgacgccctcgttgttgcctcggagggtggcccttctctcgctgcgcccacaacagcgcatatcttccggcactcctacggcctacactgcggctggacagccattgcccgcgaacaagaggatcaaaatcactctgcacaagtcgctcgctcccgcagcaaatccccggcgtcgccactccagcagcgtcacccgaagcgagagagagagagagagagctcacccctctccccccccccggtggggtccgcatccatcaatttgtccatatagttttttttttatcaattgtctttgaacctaaatcatggcgtatagaagaaggcaggggatcggaaagtttgcgactttcaaggaggagattgatcggcttcccccggaaagcatcaccgccgtcaaggatagatcaccgccagctcgatcctcccctgcttttgaccaacccagatctaagaattttacgaccgagccaaagggcttgtggggagtcatagcccagaaagcaaaatctgttattgaagatgataaatctagtgatcggtctacaacagcttctcagtcccggttttcatacctatcagatgaagggttcaagaaaatggataatcccaagcttcggagggggctggataagcttacatcttctcttaatcagatcggtgacacttttgaaaaagcctttgaggatggccgaacactcgttgagaacaaaacagctgatatcatccaggaaacacgaaaacttcaaaccagacgaagaggaactggtggtgaagatgagaatcagaatcaatcttatggagttagtagctcatggaaaaagtctccagagcagccaatgcagttgaatcatatggaacatgaaactcaactcaaggcatctcgcgatgtggcgatggccactgctgctaaagctaaactactcctccgtgagctgaaaactgtcaaagcagatcttgcatttgcgaaagagcgttgtgctcagcttgaggaagagaacaaacatctgagagagagccaccgtgagaaaggaagcaaccctgcagacgaagatttgattcggctccagctggagagcctactggcagagaaagcacggctggctcatgaaaattctgtgtatgcgagggaaaaccggttcttgagggagatagttgaataccaccagcttacgatgcaggacgttgtgtacatagacgagggcagtgaagaagtgacacaagtttcccctttcgtatcaacgttgatgacttcttcacccgctgaccgttcacagtctcctcctagtcaagagatgattaaagagatgcttgtggttgctgaagagagctctgtgtgtgcaagtgtggtttcagtttcttgaattcattattattaattatttcttcttgaatgaaatcagattgttttttgcaacggaatataaaaggcgatttcattcaaaaagaaaaaaaaaaaaaaaaaaactcgagggggggcccggtacccaatcgcctttatctcaactgatattccactttatgtctttgcaattacatgatccgctcttacgaaaaccttagtgaccaatctttgacgacttttgactgtcataacttaatgctacactttctgatcagattcagctgtgaggtcgaatctaatggttatgttacaactcgtgatcatgacatcgatcatctgccaatgatccaatgtattccgg

SEQ ID NO: 83 - DNA, 1172 bp, Arabidopsis thaliana
  Clone ID: ARATH-23APR03-CLUSTER11037_1
gcacctcactagtcccccccccacgaaaagggaagaagcaaagtgaagaagctccagaacacgccatagctatggctcttctctgtccttctcttccctctccgaattctcgtcttttcaggtgcaggagcagcaatatttcgagcaagtatcatggagcctcaaaggagctgatgattgctcgttctggtgtgtctacgagatcaatttcttcggaaaaggggctttctcgtagggatttagtgctcattggtctctcttctccgttgtctatgttcttgccattgtcttctccagtcactcatgcagaagaagacgtgaaaatgagtggagaagaattgaaaatgggtacaatggtggatgatattaatgcttattcttatgcttacccattggattatccatctgagaagcttgtcttcaaatgggttgaatcaagaaagcctgaaagatactcttcagctgcaccactctctcctgatgcacgtttacggattgtttctgaacgagttgacctaactgacaacctcgtcatttctatttcgataggtcccccaaactcaagattaacatcaaaagaaaagaaaacatggtccgctaaagaagttgctgattctgttttgtctgataaatcagcattgcgtgtcacctcaagtcagcgtcttgaagagagttcggttcttgatgctcatgctagtgatattgatggggagccttactggtactacgagtaccttgtccgcaaatcaccaaccaaaattgctgaagcatcaaagctttacagacactatatttcttcaacagctgaacgtgatggatacttatacaccataaatgcttcaacccttggcaagcagtgggacaagatgggaccggtgttagaaagagcagtaggatcctttaggcttcttcctcctactgatagttatgttcctccatacaaggatccatggaggttttggtgatgcttccatctgcctcatgaaatttcttttttcgaaattgtcgttaattttgataggagaggaggttatgaaagttgtagtgtgagaaatgagccaagcgaagtgatttttccaaatccgaatatcttgttcactatcagatgtattgagattgagatataactagcattttcttttaaactcatttcaagtggtatcaaaactcga

SEQ ID NO: 84 - DNA, 3898 bp, Arabidopsis thaliana
  Clone ID: ARATH-23APR03-CLUSTER110689_1
atgagctttcaagtcaggcgagataggagcgatgataggtctcatcgattcaatcatcagcaaacgtggattcctagaaactcatctacctcgagcgtggtggtaaatgagcctttgcttcctcctaatacagatagaaattctgaaacccttgatgctggttctgcatcccgtcctgtttatctgcaaaggcagcataacgcttctggtcctccgtcctataaccaccaccaaaggagtagtaacattggtccacctccacctaatcaacatagaagatataatgcgcctgataaccagcatcaaaggagtgataacattggtccacctcaacctaatcaacatagaagatataatgcgcctgataaccagcatcaaaggagtgataacagtggtccacctcaaccttatcgacatagaagaaataatgctcctgagaaccagcaccaaaggagtgataacattggtccacctccacctaatcgacaaagaaggaataatgcttctggaactctgccagataatcgccaaagagttgcatctaggacgcggcctgtgaatcaggggaaaagggtagcgaaggaggagaatgttgtgttgacagacccaaacttgcctcaacttgttcaagagttacaggagaagcttgtcaagagttctattgagtgtatgatttgttatgacaaggttgggaggtctgccaatatctggtcatgctccagctgttattccatcttccatatcaactgtatcaagaggtgggctcgagcaccaacttcagttgatttgctagctgagaaaaaccaaggtgataactggagatgtccaggttgccaatctgtacagttgacatcatctaaagagatttcctatcggtgcttttgtggaaagagaagagatccaccgtctgacccatatctcactccacactcatgcggggaaccatgtgggaaaccgctggagaaagagtttgcacctgctgagacgactgaagaggatctttgtcctcatgtatgtgttttgcagtgtcatcctggtccatgtcctccctgtaaagcctttgctccacctcgtagctgtccttgtgggaaaaagatggttactactagatgctccgagcggagatctgatcttgtttgtgggcagcgttgcgataagcttcttagttgcgggcgtcatcaatgtgaaaggacatgtcatgttggcccttgtgatccttgtcaggtactggtaaatgccacatgtttctgcaagaaaaaagtggagactgtcatttgcggtgatatgaatgtgaagggggaattgaaagcagaagatggtgtctattcatgcagttttaactgtgggaagcctcttggatgtggtaatcatttctgttccgaggtatgccatcctggaccttgcggggactgtgacttactgcccagtagagttaagacatgctattgtgggaatacgcgtttagaagaacagatcaggcagagttgcttggacccaattccttcttgttcaaatgtatgtaggaagcttcttccttgtaggtgggatacttgcaatgagatgtgccatgcaggtgattgcccgccttgtttagtccaagttaaccagaaatgccggtgtgggtcaacatccagggctgtggaatgctacataacaacttcctcagaggcagagaagtttgtgtgcgctaagccatgtggacgtaagaagaactgtgggagacatagatgtagcgagcgttgctgccctctcttgaacgggaagaagaatgatttatctggcgattgggacccacatgtctgccaaataccttgtcagaagaagctaaggtgtgggcagcattcctgtgaatctttatgtcacagtggacattgccctccttgtctcgagatgatcttcactgatcttacatgtgcttgtggaagaacttcgattcctcctccactatcatgtgggacacctgttcctagctgtcagcttccatgcccgattcctcagccttgtggccattctgatacgcatggatgccattttggagattgtcctccttgttctacccctgtggaaaagaagtgcgttggtggtcatgtggttctcagaaacataccctgtgggttgaaagacattagatgtaccaagatttgtggaaagacgaggcgttgtggcatgcatgcttgtgccagaacttgtcacccggagccttgtgacagcttcaatgaatctgaagcaggtatgcgtgttacgtgtagacagaaatgtggtgctcctagaacagattgcagacacacttgtgcagcactctgccatccttctgcgccttgccctgacctaagatgtgaattttcagtcacaattacttgttcatgtggtcgtataaccgctacggtcccttgtgatgctgggggaagaagtgccaacggttctaatgtttactgtgcggcctatgatgaagcctctgttttacagaagcttccagctccacttcagcctgttgaatcgagcggaaaccgtatccccctcgggcagagaaagctttcgtgtgatgatgagtgtgcgaacctggagcgtaagggggttcttcaagatgcatttcatataactcccccaaatctggaggcattacatttcagcgagaattctgctatgacagagattatttcagacctttataggcgtgatccaaagtgggtactggctgttgaagagcgctgcaagttcttggtacttgggaaagcaagaggaagcacaagtgcccttaaggtccatatcttctgcccgatgcagaaggataaacgagacacggttcgacttatagctgagaggtggaaacttggtgttagcaacgcagggtgggagccaaaacggttttcagtggttcacgtaacagcagatccgaaaccgccaacaaggatcattggacctgggggtggtgctatctcgataggagggccacacccaccgttctatgattcgctggtggatatggatcctggacttgtggtttcttttctggatcttccgagagaggcgaatatcagcgccttggtactgagatttgggggtgaatgtgagcttgtttggctgaatgacaagaatgctttagcggtgttccacgaccatgcccgagctgccactgccatgaggaggcttgagcacggttcagtatatcatggagctgtggttgtccagagcggcgggcaatctccatcacttaataatgtatggggaaaattacctggcagctcggcgtgggatgttgacaaaggaaatccatggaggagagctgtgattcaggagaagtgatgactcctggggagctgaagattcccccattggaggatcatctacagatgctcaagcctctgcgctgagatcagcaaagagcaactctccaattgttacctcggttaaccgttggagtgttttagagcccaagaaggccagcacatccactttggagccaattgctcagatagaagagagcagtagttcaaaaactaccggtaaacaaccggtggaaggctccggtgaagaagtggtggatgactgggagaaggtatgtgagtgagagcatatacccaacgactgtgattggttttcaacttctttgtgatgtatgaaaacggcagattgttcagacgtatataatggagactgtatgcgtgtgcgtatgctgtgatgagtccatttcaaagcttaggtgatagccaacgacgtgccgtttttgttttggcatctttggcgtgcgtttggtttatttatgtagtaactaaaaaaacatcccattgttcagtaacttcagttattgtgaaacggcatgtttgtaacgcttttttttttctcttttattcttgacataatgatgcaacactaaggttggttattcattcattagtac

SEQ ID NO: 85 - DNA, 1736 bp, Arabidopsis thaliana
  Clone ID: ARATH-23APR03-CLUSTER11077_1
gtctccgacgcttctgactccgtggcctccattgatgctcttcagtccgatcgcttcgaccccttggccccctcgttcccttttcaataccctagattttaggttttgactcattcgatccgatcgcatcgctcgctgatcactctaattattttttttcttttccaggtgagtatgttctttaacttttgatttattgattctagttatctaagagtaagatcaaggtcagatgtgaattagttcgtcttgcgtaaatcttgattcttttcaaaaaatgtattgtttttgtgttttctgtctttaagaaatggttatttgatcatatcatgtacttcgtttgaagtaatcaaagcgagcatttgtatctagttaacatcgttattagcttaataacttcttaaccacggctaaaatctacctctgttaatgcctttattcttgtaatcatccctgtttctggccaaagaattaacaatcaaattacagtgtataaatctctgtattttgactatttatttttctctaatcaattagtttggttgcaactttgctcttgaatttcagcaagatatgaattctgattctaataaatcatcttcaaatggatttgagaaatctttgacaccagaggagtatctaaacaaggtatatgatgatgatgataagggaaaccattagctgctctgtgatatttcatgcgtgtatcaattttttttttgtcttcttttgatataaagattgtgtgttttgacaacatagataaatgaagtgaggacattactagggccattgactgagaagtcatctgagttttgttcagatgccgccattactcggtatttggctgcgcgtaacggccatgtcaagaaagcaactaaaatgcttaaagaaacactaaaatggagggctcaatacaaacctgaggagattcgatgggaggagatagcacgagaagctgagaccggaaaaatataccgagctaattgtaccgataagtatggaagaacagttcttgttatgagaccaagttgccagaatacaaaatcatataaagggcagattagaatcttggtgtactgtatggaaaatgcaatcttgaacctaccagataaccaagagcaaatggtttggctaatcgattttcacggtttcaacatgtctcatatctccttgaaagtgtctcgagaaaccgctcatgtgttacaagaacattaccctgaacgcttaggcttggccattgtatacaacccgcctaagatttttgagtcgttttataagatggtgaaaccatttttagagccaaagaccagcaacaaggtgaaatttgtctactcagatgataacctcagcaacaagcttctggaggatcttttcgatatggagcaactcgaggttgcatttggtggaaaaaacagcgatgcgggtttcaattttgagaaatatgctgagagaatgagagaggatgatttgaagttctatggaaacaccacagtgtcatcaacctcagctcatttgactaactcagattctgaagtttcagactctgagatgaagtatttggaggacaaagaagatgagactatagagaatggaactttgcaatctcctttagatacaacaaaaacctaaacatgaaatcctaaagttgtagaagcttctggagctaatactatgctggagctataatttttgttgttgttacacaattaagacaaaaaaaaaaaaaaaatctt

SEQ ID NO: 86 - DNA, 643 bp, Arabidopsis thaliana
  unsure (1)..(643): unsure at all n locations
  Clone ID: ARATH-23APR03-CLUSTER111186_1
catttctaaccccatttctgcttagagacagagaaatagagagagatcgcgtcggcacaatctgcaatttccaacatcgacatgtttaactctacagcgttggtgattttcgccattcttttcctctcaatctccgccgatgtgttcccgattccgtctcccaacggagagatcgacgcaatgttgatccgaaacagtatcatcggagaagatgaagatctaatgccaactgagatcagccggagagtactgatggcgcagaaacggtacatcggctacgaaacgctaaggagagacatggttccttgtcagaaaccaggagcttcttactacgattgtcgctctggacaagctaattcttacagcagaggctgtgacaccattacaagatgcgctagagacacaaacgacatcaacacatgaaggtaagatccaagaaattgccaaaattggaagctttttggccgaggcaagtaaattatatgattaagcttttgcattgctgttgttatatatgtgtttttgacataagaattgttataatatatgtaactctgccactagttggttatcaatgttcaattattgagatctataaattatattaagtttttttggctataatttatagtttctgtgngnt

SEQ ID NO: 87 - DNA, 2323 bp, Arabidopsis thaliana
  Clone ID: ARATH-23APR03-CLUSTER11179_1
atagagatttggttttttgattcttccaatctcactctctctgtctttctctctccatcaaataccaaattatctggaagctgagtacatcttgttttctgctcattcctctgtttcaacaatggagagtactattgttatgatgatgatgataacaagatctttcttttgcttcttgggatttttatgccttctctgctcttctgttcacggattgctttctcctaaaggtgttaactttgaagtgcaagctttgatggacataaaagcttcattacatgatcctcatggtgttcttgataactgggatagagatgctgttgatccttgtagttggacaatggtcacttgttcttctgaaaactttgtcattggcttaggcacaccaagtcagaatttatctggtacactatctccaagcattaccaacttaacaaatcttcggattgtgctgttgcagaacaacaacataaaaggaaaaattcctgctgagattggtcggcttacgaggcttgagactcttgatctttctgataatttcttccacggtgaaattcctttttcagtaggctatctacaaagcctgcaatatctgaggcttaacaacaattctctctctggagtgtttcctctgtcactatctaatatgactcaacttgcctttcttgatttatcatacaacaatcttagtggtcctgttccaagatttgctgcaaagacgtttagcatcgttgggaacccgctgatatgtccaacgggtaccgaaccagactgcaatggaacaacattgatacctatgtctatgaacttgaatcaaactggagttcctttatacgccggtggatcgaggaatcacaaaatggcaatcgctgttggatccagcgttgggactgtatcattaatcttcattgctgttggtttgtttctctggtggagacaaagacataaccaaaacacattctttgatgttaaagatgggaatcatcatgaggaagtttcacttggaaacctgaggagatttggtttcagggagcttcagattgcgaccaataacttcagcagtaagaacttattggggaaaggtggctatggaaatgtatacaaaggaatacttggagatagtacagtggttgcagtgaaaaggcttaaagatggaggagcattgggaggagagattcagtttcagacagaagttgaaatgatcagtttagctgttcatcgaaatctcttaagactctacggtttctgcatcacacaaactgagaagcttctagtttatccttatatgtctaatggaagcgttgcatctcgaatgaaagcaaaacctgttcttgactggagcataaggaagaggatagccataggagctgcaagagggcttgtgtatctccatgagcaatgtgatccgaagattatccaccgcgatgtcaaagcagcgaatatacttcttgatgactactgtgaagctgtggttggcgattttggtttagctaaactcttggatcatcaagattctcatgtgacaaccgcggttagaggcacggtgggtcacattgctccagagtatctctcaactggtcaatcctctgagaaaacagatgtttttggcttcgggattcttcttcttgagcttgtaaccggacaaagagcttttgagtttggtaaagcggctaaccagaaaggtgtgatgcttgattgggttaaaaagattcatcaagagaagaaacttgagctacttgtggataaagagttgttgaagaagaagagctacgatgagattgagttagacgaaatggtaagagtagctttgttgtgcacacagtacctgccaggacatagaccaaaaatgtctgaagttgttcgaatgctggaaggagatggacttgcagagaaatgggaagcttctcaaagatcagacagtgtttcaaaatgtagcaacaggataaatgaattgatgtcatcttcagacagatactctgatcttaccgatgactctagtttacttgtgcaagcaatggagctctctggtcctagatgaaatctatacatgaatctgaagaagaagaagaacatgcatctgtttcttgaatcaagagggattcttgtttttttgtataatagagaggttttttggagggaaatgttgtgtctctgtaactgtataggcttgttgtgtaagaagttattactgcacttagggttaattcaaagttctttacataaaaaaaaaaaaaaaaagttgaatagagggaacactttgggagatttcatgtgtgaaagttgggaagtcatgtttgagaatgaaggttatcttattattgaa

SEQ ID NO: 88 - DNA, 3389 bp, Arabidopsis thaliana
  Clone ID: ARATH-23APR03-CLUSTER11198_1
agaaagttgcagagagagagagagagaccttagctgtatagagagagaaagggattgggtgttgtgcactgagttcgatagagaagaagaagaagaagaagaagaagaagatgagtcagatcgcgagacgacggaggaaaggtcgtccgtcgaaggcagatctggcggcgcggcgtagtagttcatctccgcgtgaatcgggatatgagctccggcgaggtcaaaggcagcgaaatgtgaggtataacttcgatttcgacgattacttcgacgaggaggaagaggatgaggttgaagaggagaagaagagacagaagaagctgaaacaagttcttaagctgaaccagagccgtgctagagctgaccctcctgttaagagtcgagcgcgtgtgagacacgcgtctgattatgaagaagaagacgaagaagatgatgaagcagaggaggaggaggaagaagtaagtgagaagaggcaagtcaagaagaggaaacttaaccgtcaagacgaagaagaggaagaggaagaagagaaggattacgatgtggaagaggaggaagaagaagaagaaggtcacgctgattctgaggaagaggatgataaggaaaggaagaggaggagcgcttctgggaatcagtgtgatcattcttcagaaacaacacctatccttgacaagaagtctttggagttgattcttgacaaacttcaaaagaaagacatctatggtgtgtatgcagaacctgttgatcctgaagagcttcctgattatcatgatatgatagagcatcccatggatttttccacagtgaggaagaagcttgcgaatggatcatattctacgttggaagagctcgagagcgatgtcttattgatttgctcaaatgcaatgcaatacaattcctcagacactgtctactataaacaggcaaggactattcaggaaatgggaaagcggaagttcgagaaggcaaggcttaagattaaacgagctgaaaaagagcttaaaacagatgaaaaggtgaaacctgacagctctgtgaagaagcaagtgagacagccattcagtcgaaatggtctagaggccgttggttctgatttctcatctggggcgaaccttgctagtggaggagcttctcaaaacgagccggtttcaactcaaatcggcggacatgaaaagcacagctacacggatgtgctttttgagggcaacacatcattagtagacagtctggagaaagcagaagacttatcatctgggaagggtctctttggtaagtgtgggaggaagctgtcggttgttgaggaagaccgccgtgcaacctatgaagattctgatcagcagggcgatagatcggagtccatattcacaacatttgagagtgaaatcaagcagtttgttgctgtagggcttcatgcagaacatgcgtatggtaggagccttgcacgttttgctgcaactcttggacccgttgcatggaaaatagcttctcagcgaatcgagcaagcactacctgcagactttaagtttggccggggatgggttggagaatacgagccgcttcctacaccagtacttctatttgaaacctgcacacctaaagaaccacctaaaaaagcatctgtgttttcaaagcggaaatcaaatgctgcaacaaagacgaatgagacactgtttaagactcctctgcctgcaaaggaacaacagggtagccgaccagttcgagatggaaaccatgcattcccatttccagcatctattggggctttgtcagaagggagtccctcttttgttgctactcaggtaggaaacctaaaatctatgagccagcatgaatatcgaaatccttctcagctagattttgtcaagcctcaaaataggattcctcagcaagtagaactgaatttacccccaccagcagaacaaaccaattccggttctggctgtgttttggaaaaccaaagctttggaaaatcagatacggtggcatcatacaggtcatcaagtgacatgatgaggaacatgagttctacagattctgaacattacaagcaccagatgactactaacgggatcttccctggtggattgaggaatggcaaagtctctcccggtgtgaacaacagaatgtttgatctatctactgattttgctaatcaaatgagtcgcacagcaacaagttcacagcaaccaatgagacaacagagtcaaagccacgaggaacaagcacagataatgagaaacttcaatgagagggctagaacacagcacaactccacttataatcatcctaaagctgatgctccaccgaagatttcgtcaccacaatccgcaagaagtgaagattcaggcaatgcttctgtagcagcagcacgagcatggatgtcgataggagctggagggaataataaacaaacatttgaaaatgctagtaatccgaagagcagccagatttctgcggagtccttgtataatccatcaagagaacattttcaccaacaagctttcaaaccgagagatgctgaagagacacagttccatcctcaaaggaatggtttccctttccagacatttgtgcaccaacctgttcacgggatgatgaacggaggataccaaccatttcaaaacaaccgaccaattgttttccctcagatggctgccccaacttctgatttctcaagattccatgtccagtctcaatggcgaggaggcattactccacaagtccagttgaagcagagacaagagaatttcaatctcccaccagatttgaacatcggagttcattcgcctgattctcctgcaaaacaatcttctggtgttcgtgtcgattcccaacagcctgatttggcgctacagctctaaagaaacagccatgaagaacaagcccaacaatttcaaggagaaacttgactcctgtcccaagcaaatgttattgccacagctttttctttttttctgtgctcatcactacatcaggcgataacgcgggctagatatgtaatcgctgtgggagaaaatggaaagaaacacaagaccaagttgttgaaccaggtgagtctacatgtgaatcaaaaatctttacctaggcttctttatttttttgatgtggttagtttatttcgaggttcaggctggtttagagtcatcatcagtcatcagtatagttggtctaagagttgaatttggagaatgcttattgatatcgacaccgtggttagctaacgatgttcctaacgtagatgttcaatcaaaccaatcaagttcttgattcacctgattccctgaagtctttggtcttcctacacttctctatttgttctatatataatatacgaattagtattataacatttggtaatcatatgaccatagtaaaaggttgtttggccg

SEQ ID NO: 89 - DNA, 1800 bp, Arabidopsis thaliana
  unsure (1)..(1800): unsure at all n locations
  Clone ID: ARATH-23APR03-CLUSTER11211_1
ctagcggcgggattatcagactgctgcattagctatcgtcaatggggtctttaggatattcgatttcaatgatagcttcgctgagtccaactttgatggagtcaaggcttatctcttcgatgggttgtgtctcgatgactgttgctcctagtttttcttcagtctctgtagtttcttcttcactagggacaacaaggagggaccgaactttaaagcttagatcttccatgtctccgggtatggtaacaacgctagattccgatgttggcgtcgggtcttctgcaactactaaaaaggtgcttgttccaattggatatgggacggaggaaatagaagctgttgtgttagttgatgttttacggcgagctggtgctgatgttactgttgcttctgtggagcagaagctagaggttgaaggatcctcagggaccagattgcttgctgatgttcttatctcgaaatgtgctgatcaagtttatgatttagttgctttgccgggaggcatgcctggtgctgttaggttaagagactgtgaaattctcgagaagatcatgaagagacaagctgaagataagcggttatacggggctatatccatggctccagctattactcttcttccatggggacttttgacaagaaagaggacaacgggacatcctgcttttttcgggaagcttcctacattctgggctgttaagacaaacattcagatttcaggggagcttacaactagccgtggacccggcacttctttccagtttgctctttccttggcggagcagctcttcggagaaaccacagccaagtcaattgaagagtttctgcttctgcgtgatggttaccagaatcctaagaacaaagagttcaatagcattgactggtctttagaccacacacctcgtgttcttatcccggtagccaacgggtctgaagcggttgaactggtctcaattgcagatgttcttagaagagccaaagtagatgtcacggtttcatcagttgaacgatctttgcggattacggcattccaaggcaccaaaattatcactgacaaattgattggtgaagctgctgagtcatcatatgatctaatcattcttccgggaggccatactggctcagaacgtctgcagaagtccaaaattctcaagaaactgctcagggaacaacatgaatctgggcgaatatatggagctaccaactcttcatctaccgttttgcataaacatggtttactcaaggagaagagaacgactgtgtatccttcagagtcagacgagcctatgaatcaacaaatgatcgaaggagccgaagttgttatagatggaaacgtgattacaagtttggggctcgcaactgttaccaaattttccctggctattgttagcaagctgttcggacatgctagagcaaggagtgtttcagaagggcttgtgcatgagtatccaaggcagtaaccgtttgaaagcatcttgttcaagaaacacagttagaagatgtctcattactgatcttaaaccgaagtataacggtccgatggtatcaaaccacctcaactccagagacttttcacaagtatcatctgttcaacgttgatgcaccttatcctgaagcgggatgctatctgcaagaattttgccaatttagtatgtgtatctaattttgtacgcccagttggattaccagatgttgatgctaaacttgatgtttactctcttctataataaaggtgttgacttgggcccaaaaaaaaaaaaaaaataaaaaaaaaaaaaaactcgagggggggcccggtnc

SEQ ID NO: 90 - DNA, 3669 bp, Arabidopsis thaliana
  unsure (1)..(3669): unsure at all n locations
  Clone ID: ARATH-23APR03-CLUSTER11234_1
gtttttcaccgcctcccttttctccatcgttggcctccttcaacgtcggagactctcaccgncttttcgatccacccactcgggtgaaatacttcgatagactccgatatatatattcgcgcccaccggtagcttcgaaaacagagatcctcactctcgaaatcttctcactctcgagaaacctgaacccttagtttaccgaaatctaggtaagaatggcgagcaatgatttgaagacttgggtttcggataagctgatgatgctacttggctactctcaagcggctgttgttaactatctcattgcaatggctaaaaaaacaaaatcaccaactgaacttgtgggagagttggtggattacgggttttcgtcttctggtgatactcgttcgtttgcagaagaaatttttgccagagttccccgtaaaactgctggtgtaaatctctaccaaaaacatgaagcagaggcagcaatgctagtgaggaagcagaaaacatatgctcttttagatgctgatgatgatgaagacgaagttgttgtggagaaaaaatcttcagtttctgaatctagaaaatcagataagggcaagaaaaggtttagaaagaaaagtgggcagtcagatgaaagtgatggcgaggtggccgttagagaggatagtagacacgttagaagaaaggtttctgaagaggatgatggttctgagtcagaagaggaaagagtgcgtgaccaaaaggagagagaagaactggagcagcatttaaaagatcgtgatactgcacggacacgaaagctaacagagcaaacgttgtcaaagaaagagaaagaagaggctgttcgaagagcaaatgctttggagaaggatgatttatattccttaaggaaagtctcgagacaagaatacttaaagaagagagaacaaaagaaactggatgaactaagggatgagatagaagatgaacaatatcttttcggaggtgaaaagctcacagaaacggagcttcgtgagtttaggtacaagaaagagctttatgacctcgtgaagaaaagaacacaagatgaagataacgtcgaggagtatagaattccagatgcttatgatcaagagggaggtgttgatcaggagaagaggttttctgttgctgttcaacgatacagggacctggattcaacagagaaaatgaatccattcgcagagcaagaagcttgggaggaccatcagattggaaaagcaacattaaaatttggtgcaaagaataagcaagcctcagacgattatcagtttgtgtttgaagaccaaataaacttcataaaggaatctgtcatggctggtgaaaattatgaagatgctatggatgcaaaacaaaaatctcaagatttggcagagaaaacagctttagaggaacttcaggaagtcagaagaagtctgccgatttatacgtatcgtgatcaactgcttaaggctgtggaagagcatcaggttcttgtcattgtgggagacactggttcaggaaaaacgacacaaataccacaatatctccatgaagctggttacacaaagcgtggaaaggttggttgtacgcagccccgaagagttgcagctatgagtgttgctgcccgtgtggctcaagagatgggtgtcaaactcggacatgaggttggctattccattcgatttgaggattgtacttcagacaaaacagttctgaagtatatgactgatggaatgcttttgcgcgagctgcttggtgagccagacctggccagctacagtgtcgttattgtggatgaggcacatgaaaggaccttgtcaaccgatatactgtttggattagtcaaggatatagcgcggtttcgacctgatttgaagttgttgatatctagtgcaacaatggatgcagaaaaattttctgattattttgatacagccccgatttttagttttcctggaagaaggtatccagttgaaatcaactatacaagtgcacctgaagctgattacatggacgcagccatagttactatccttacgatccatgtgagggagccacttggagatatattggtcttcttcactggtcaagaggaaattgaaactgcagaagagatcttgaagcacaggataagaggtttgggtacaaagatccgtgaattaatcatatgcccaatttacgcaaatcttccaagtgaactccaagcaaaaatatttgagccaactccagaaggggcacgtaaagttgtcctagcaacaaatatcgccgaaacatcattgacaattgatggtataaagtatgttgttgatccaggctttagcaagatgaagtcatataacccgaggacagggatggaatctttgcttattactcctatctctaaggcttctgcaactcaacgagctggtcgtgctggaagaacaagtccagggaagtgttatcgtctgtacactgcgtttaattacaacaatgacttggaggaaaacacggtgccagaagtacagaggacgaatcttgctagtgtggtgcttgctttgaagagtcttggaattcatgatctcataaacttcgatttcatggaccctccacctgctgaagcacttgtaaagtctttagaactgctctttgctctgggtgctctaaataagctcggggaattgactaaagctggtagaaggatggcagagttcccccttgatccaatgctgtcgaaaatgattgttgtttctgacaagtataagtgctccgatgagataatatcaatcgctgctatgttgtcaattggtggctctatcttctaccgtcccaaggacaaacaagttcatgcggacaacgcaagaatgaatttccacaccgggaatgtcggtgaccatattgctttgctaaaggtttacagttcatggaaggaaacaaacttctctactcagtggtgctacgagaactacattcaggtccggagcatgaaaagagccagagatatccgtgatcaattggagggacttctcgaaagggtggaaatagatatcagctcaaacctgaatgaattggattcagttagaaaatccatcgtagccgggttttttccgcacactgcaaagctacagaagaatggatcgtaccgaacagtgaaacatccccagacagtgcacatacatcccaattcgggcttatctcaggtattgccgagatgggttgtatatcacgaactagtacttacgtccaaggaatacatgcgacaggtaacagagttgaaaccagagtggttgattgagttagctcctcactactaccagctcaaggacgttgaagacgctgcatcaaagaaaatgcccaaaggagctggaaaagctgcaatgtaagaactcagatgggattggcaaaagaataatggaaacagatgcgagtacatacgactttgacagattgttagaaaagctctcttcactacattaactcatttttggtcagcctcctgagtttttgttagaaaatacttaaaatgttatgaacagttcaatgtagtgccatttattcccattgttatatattgtaaggtcgagctacattatgtctgaatcagtaacttcttttccgctgcatggagcagttgtgaaaacttttacaaagagaacccaaataaagtatcaagcaaacttatttgaaaaaaaaaaaaaaaat

SEQ ID NO: 91 - DNA, 1255 bp, Arabidopsis thaliana
  unsure (1)..(1255): unsure at all n locations
  Clone ID: ARATH-23APR03-CLUSTER112656_1
atcttgtattttaattagatttatgttcaagaaaaaaaaacaaaatttgacatatctattgattttntttttctttttgttctctgatcctcttcgcgcttccacacgtcgtcaaattaccaatgacgtctcttccgataatcctcgcatcctctccactgcgaaacctaaccaaaccttgttcaacttctcaaatcccaaaacccattcaaaattctacaaaacaacctccaatacatctcctaaccaaaaccaatctctctgtaaccatttcccaactaattatcacttcccctgttctcgcatctgaatcattcgactcaatttcatcagacccatcttctggaaaaatcgatttagagtcaattttggtcacaattgataatttcttcaacaagtatccatttttcgtagcgggatgtacttttacctatcttgttgtttatccagctgtgatgttttacttgaggaagtataaaccaatatccgccatgaacgcgtttcgtaagcttaagaatgaatctgattctcagcttttggatattagagatgtcaagactttggctttgttagcatcaccgaatcttaagtttttgggtaagagttctgttcaggttccgtttagtgagaatgatgaagaagggtttttgacgaaagttaaaggaagcttctctgatgctgagaatacagttgtttgtgttcttgataattttgatggtaactcgtcgaaagtagctgaattgctgatcaagaatggtttcaaagaggcttattatattagaggcggcgcgagagggaagaatggttggttggctattcaagaagagcttttgcctccaccggtgcatatgtacactgcgaaaaacgtaaaatcttcaaacaacaatgaagcgtctgttgttggaactgagaactagttcaagaacatagcgtaatgtggcaggacatggtactaccatgtcactggaacatgagaaagcttctttaggtggaagagtagctatatattgaaagacttgtttagacctcaagacaactctatgcttagcaaaaaagctaaccttgtctactacatattgatttctcagaccattccaataaaatgagacttgttattattatgaagttttttgtgcttttgtaccttttctattgcattgtgtgacagataatgattatgtgtaatgctcttcctgagattgtttgaaacaatttacctgcgattcctttggtaaaaaaaaacggcaaaaaaaaa

SEQ ID NO: 92 - DNA, 1194 bp, Arabidopsis thaliana
  Clone ID: ARATH-23APR03-CLUSTER112936_1
aattttaataatcttgaatttagagaaaaagggtaaagcttgtcatcaacttattcgacagtttatataaaaaccgagtcatctttcatcggaagtacttccctccggcccattttctgacgccggcgatactctctttcacctctttctttctttcttctctgtcttttttgctttgtttctctccagtgaggaaaatggcggagtcattacgattctccgactgaaaaaagaagttaaaacctttgaaagaagaggaagaatttgaaagaaaggaaaatgctttgccggaaaaactcaagcttggtggacagaggaaatgttccggtttatctgaatgtctacgatcttactcccattaatggctatgcttactggcttggtcttggcgtttaccattctggtgttgaagttcatggtatagagtatgcttatggagctcatgaatatccaagcactgggatattcgaaggggagccgaagcaatgtgaaggctttacgtttaggaaatcgattttgattggtaaaacggatcttggtcctttggaagtcagagctactatggagcaacttgctgacaactacaaaggaagttcttacaatcttatcaccaagaactgcaaccatttctgcgatgaaacttgtattaagttaactgggaatccaattcctagttgggttaaccgccttgcccgaatcggcttcatgtgcaactgtgtgcttcctgcgactataaacgcgaccaggtttggaaacaacagagtcaatcaagacaaatcatgtgaagcagaaaatgagaagaagaaactgacgagtgtatcgagcagagagaggtctaccattgctactccttcgtcgtcttcttcgtctccttcagttcaagttcgcggtcgaagcaggaaaaggcgtcctcgtgctctgcaaccttcatcgccattgactctcggatcttcctccgtttgactataagtaaaatgaaatttggctttgtttggtaaatccatttttgatctctcaactagagagaccactctgtatttcttctattaattgcgagtgtgctctgtaatcttgttaatatgcaaacctttttcttttcttttttttgtaatcttatttgcattttcgtttcagattttggactttatttttacagtcagatatcaaattctcggtcaaaaaagaaaggaaaaa

SEQ ID NO: 93 - DNA, 2103 bp, Arabidopsis thaliana
  Clone ID: ARATH-23APR03-CLUSTER11298_1
tttttttttttttttttgcaaaaagccagattccttttttttttttttttttttttataatttcattaaaactacccaatgggcttgggccgaaacttacaaacaattcggtccagttacaaaattagggttttctgacacatcgccaggaaaaagaaaaaagctcgccgcctgttgaccgtcgctagcagagcgaccaaaacctagatccggcggactcaagtcccacagctttgtggccgcctccgagaatcgtccaccaccgacgaaagattccggttttcgtctgtagagactcaactccaacgcaccaacccaccacaagactcccggaaagctagccgctccgacgtagcggttccacggaaccggatcccgacctagcaacccgaaacactcagcgataacacttctctcccatcaccggaaaatagcaaagacccagagccaaacacacgtcgatccggaccggtggagaccaaaaacggcagacctaaagactggtggctcagtcagactctctagatccaaaacccgctgcagccatctaagatccaaacagatctactgttaaccaccgcatcagacaacgaacccccccttacccctctccaacttccgccgtggacgcagcgactagaatcacgggtgagcctgagaacctcgcagcaaccctcagcgtccataaccaagagacccccgccgcaaccttctcgaccgacaaaaccagagccaaatccacatcagagagagagcaccacaccacacgttgacggagacaagcatcggctcactcctggacttccttgaagaggcttcaaaccgacgatgaagagcagatcggaacaaaaagaaaaaggaaactaaatctacttaccggaaattgtcttcaagagagagagaagggcacgactttcaaggctacgattgagcctccatctcataaagccagattctttatcttccataatcgtattaaagctacgaaacctcgatttcgtgttcaaaacttggatttgctcgctatcgaaaggtctatggctgaccaaggattagaagagagtaatccaatggaccttagcaaacatccttcagggattgttcctactcctcatagtcaagtcatttacaagatgccaccaagaattgctgctatccgtcttgtaagctcgcatcgtgaggtctatgaaccatgtgatgattcatttgcgctagttgatgcattactcgctgatcgcaccaaccttatagagcacaaccctaagatttgtatggagattggatgcggaagcggatatgtcataacttcacttatacttcttcttcaaaacgaagttcctggtgttcattatctcgccattgacactaacccgatagctacaagagtgacaaaagaaactctagaagcacatggagttaatgctgatgttatctgcgcagatttagctactggtctagagaagagacttgctggctcagtcgacgtgattgtggtgaatccgccttatgtgccaacacctgaatatgaagttggaatggaaggtattgcctctgcttgggcaggaggggaaaatggccggacagtcatcgataaaatcttgcctgtggttgatcttttgctatcagagaaaggatggttctacttagtgacattaacttcaaatttcccagcagagatttgtctgatgatgagaaagaaaggttatgcttcgagaatcgtagttcagagatcaacagaagaggagaatctcgttatcctaaagttctggagagacaaggatgaggagagccaggacaaagagacatcatcatcatcgtttgtttcgcagttttcgaaatccttatcttcgcttatggagaaacaatggcgctgatactacaaagatggctagagatctcataagcatgctttgtttaaccaagaattctctagtgttttaatttttatgaaaatcatgttttgtgttggtggtgtagtcgtaacagtgatttgatttagtggggttattggttagtggattttaactgatgtgaaattttgattttcaattccacattatgtgatttgaaaaaatcaatgaaaaattataaatttctactcgc

SEQ ID NO: 94 - DNA, 677 bp, Arabidopsis thaliana
  Clone ID: ARATH-23APR03-CLUSTER112999_1
ccggaaaaccgttttgccccgggtttccccaaaaccgcgaaatttccccccccttaaggggaccaaaagggggggttccccccgggggggggggcgttttaagaattgggtgttccccgggggctcaagatattccccggggcccctctccttgagcccccttttcgtaaaaacaacttcttcatctaatctgataagctaaaggagacttctaagctgaatctttttccaggatccatcagagcagaacaaaaaaatgggagtgttccgaggtcttatgggcgcaaagaagatctttcaaggtcgatcaatggcagcttcgacaccaaaagggtttcttgcagtgtacgttggagaaagccagatgaaaagatacatagtgccagtctcatatttgaaccagccttcatttcaagctttgttgagtaaatctgaacaagagtttgggtttgatcatccaatgggcggcttgaccatcccttgccctgtagatacatttatcaccgtcacttctcagcttcattagatccaattcacaaggatcacatatatgtaacaatttttgaggtcattaattagatgtagaagatatttagaacccagctgtgtaattacttacatagaagataacatttatcgtctgaaatttgccaaaaaaaaaaaaaaaaaaaaaagat

SEQ ID NO: 95 - DNA, 1316 bp, Arabidopsis thaliana
  Clone ID: ARATH-23APR03-CLUSTER11305_1
gaacggacggcgaaaaccctaacaaaaacctccattcaccggcgaaaatgcgagctccgatctccggaattttctcgagatctctcggttacctccaccgtacgacgccgctatcctccgctactcgtcacctatgcgccgtcgcttctcccgaagctcgaacgaagaaactcgagcgaatcgccgacgatttactcaaactgaatcggattgagctttacgattactcactcctcttcagccataaaataggtctcaatcgctacggttccgccgtagctgttaccggatctgtcggcgacgcgtcagcttctacggagacgaaaacggcggagaagactactttcgatgtgaagcttgagaaattcgaagcggcttcgaagattaaagtgataaaagagatcagagcattcacggatctgggattgaaagaagctaaggctttggttgagaaagccccagtgattgtgaagaatggtcttactaaagaagaagctgagaagatcatggagaaactcaaagcggttggtgctattgtagctttggaatgaaactgagattgagatcaaaataagtattttgaatttttcgaaatcaaacaatgttgaaagcttttgagaattatgaatattgattttacaatatggttctgtgtgtttgcttaatgtgtgtcatcttcttgcttagattctcataactgaaatgccacttctatcagggattagcttcttcatgtaatactttgaatttcttgaaagattgattctttgtcttctactctctggtatgatctctattgagcattcttggaaccctcgtctcacaaaccaatccgctgttcgcgttgtgagtaggaacagcttctctaacccgagagatgaagctttcttctctatgtaatctgcagaaatagattgtgttgttgcattgaggttctctggctttgctttgcaaatgtaacagaaagggtttgagtttattcaccgagcaatttatcgccttggccttgaccgcgacaatctgatgcaaccgcgattgcagcaacttctccgcatttgtctttgaagaacggaaacaaagccgcacaagcgatgatctgtccttccctttccacaaccacaaatgaatccaaagctcgcagtaactcctcatcagttctgcgaactaaaatccctgattcctccaagggtttgattatatgtctaattcctgctagatcttccactctggcatcacgggttccttcgtaaacatcactagcaaccatagttcccattccatctcttttgaaaagctccaacaatagaactccactt

SEQ ID NO: 96 - DNA, 1321 bp, Arabidopsis thaliana
  unsure (1)..(1321): unsure at all n locations
  Clone ID: ARATH-23APR03-CLUSTER11311_1
tgnnnnnnnttnnnccccggctgcaggaattcggcactagtcccccccccccgataaataaaatttctgggaaatttggcggcgacagtttcctttggatttcagatttcgtgagcttattcttacctttctctcgaaggaagctctcatcttttcactcagatcacgttccctgggcttattcgcttgtatctgttgatatacaagatggcatctgcgactctgagaaggcggcttcatcacggtgatgtagatgggaggaagtatgaacgctatgatgcaacagactctgaaactttaagtgaacccttgttaggaagtagtagtactgataatagtagaaatgagtacattgaggagcgtactctggaggatatttgggaagaagaacggaagagacagcaagttcactggacgttaatcttttctcagttgattgcacagtgggctcagtggatagccaaaatagtctttggatctggctcacttgttgggaggtttctttctctgcctacatttggtcaaataggtactggtgggaggcttctgccaccacctcttagtatgttgcaggaagaaaggctgagaaatattaagcgaagaatagaaatcccatttgatggatctcgaatggagcatcaagatgctcttagacaactatggaggctagcttatccacagagagaactaccacctcttaaatctgaactctggaaggaaatgggttggcaaggaacagacccttcaacagattttcgaggtggagggtatatatcactggagaatctaatcttctttgcgaagacctatccggaatcattccagagattgttacataaacaagatggaactagagcggaatgggaatatcctttcgcggtggctggcatcaatatctcattcatgctggcacaaatgttagatcttcaatcaggtaaaccatcaacaatagccgggataagattcttgggatttctggaagaagacgaaatggcattcgataatctctactgtatagctttccaaatgatggatgcacaatggcttgctagacgagcttcttacatggaattcaatgacgtcctgaaatcgacgagagcacaattggaacgtgagctggcactggatgatgtttcaagcatcacagacttgcctgctttcaatcttttgtacaaataaattgttaaatttcctacaatttctatctgtatttagataataattatctgagaaattcagtgtaacaaataatcagtttttgctgaaattgctcggcaagtataatttcatcagaagatttaatatcgacataaaaaaaaaa

SEQ ID NO: 97 - DNA, 772 bp, Arabidopsis thaliana
  Clone ID: ARATH-23APR03-CLUSTER11328_1
gctccacgggctggtgccgctctcggctccctcactatgtgaaggacgcgacagtaggaaaatggctttcgcagcgacgctcttcgttccacctccagtagccgtccgatctccggctagattccttggccgtctctcaattccttgcctgctccaagttcttccgactaatggtgcagcgagtccccggcaagtgaagagggcaattgtagcaaatgcttcgccgggaaacggtggcgttaaggccgaggaagaagacggagtttctctgggtactatgaagcttcccgtagataccgatctcgctagattcgaaactcttctatttcagtgggcgaatagtctttgccaaggagccaatctacctctacctgttcctctcaaggtggacagaataagcggaggagcgaggttaggattcatagtgatggaagatgaaggcaagaccgatgttccggtttacattgactgtttggttttccaaacaacagagaatggtgtagtgttccaagcgacgcgtaatgggcggaagaaagataaagcacctccgggagaagaaagaatcatgagaagtctcttaggagccctcaaaaaagctgtggagattgctcgagtcacataaacatttgcctctttcagttgaaaccgaatttcgaatatctcttttgctctacgtctttctagtttcttactgctactactacttatctgagacatgatcactggtaaataataaagttttaaagtttggggccaaaaaaaaaaaaaaaag

SEQ ID NO: 98 - DNA, 1575 bp, Arabidopsis thaliana
  Clone ID: ARATH-23APR03-CLUSTER113309_1
aagaaactgaagaagaaatctgcaaattcagcttccctccttcccccgttcccgcctttctccgcttcccgccttcagcttcatcgcttccccggttctttgtcgcctgtatggtgcctatgactctccacggtgcctttgttcgtgttccccttcgcctcattccttgctcgaaattcatcttctcttcttccttcgattccatctttctccgtttccggcgataatcttcatcgcttcttcagttgattatctttagaatggagctaaagaatgtcaaagatgcgtttgatcgtgttaccaaaaagcagaaactatgctatagcaaaacgcatgaagtggtagaaaaaatgtctcaagaaatcgacaaggcattgaaaacgatacaggaggataatcatgaatctgttgttgctgatctgaagaaaacttttgaggagattgctccaatcaatctactagaagcgtctcagaaagaaataaatggggttcttaccaaatacccgaaagctcttgacaaaactctgaatccagatatatcgacggcttacagaaacgttaagtttgatactcatacagttcatcagatactagctcagtttttctacaggcaaggcatgtacggcgttggtgactgtttcatttccgagactggtgaggttaagcctgaatcttctgttactaaagctttcatggaaatgaatatgatacttgaagccatgaaagaacgggatctcggaccagctttgaaatgggtagcttcaaactctgacaagctaaaggaagcaaagtcagatcttgagttgaaacttcacagccttcactttttggagatagctaaagacaaaacctccgaagaagctatcaactacgcgagaaaacactttgctacgtattcagcagatagctgctgtttccctgagatacagaaactcatgtgctctctcttatggaacagaaacctcaataaatccccatactcagagttcctctcacctgtattgtggaccaacgctgccaaggaactaacccgacaatactgcatcctactcggtgaatcaccagagagtcctttaagtgtaacagttgcagcaggttcacaagttttaccgacgtttttgaagtatttgaacgtgctgccggagaaaagaaaagagtggcaaacaatggagcaacttcttgtacctgtggaactctctgaagagtatcgcttctactcggtctttgtctgccctgtctctaaagaacactcgagcgaagataatccgccgatgagattggcttgcggtcatgtcctttgcaagcagtctatcaacagaatgtcgaggaatggttcaaggtcgttcaagtgtccttattgtccaacagatattgatgcttcgcagtgtaagcagttatatttttagactagctttacaacttcttatgcagcatttctaaagaaagtagacaaatgtttcttatcttttcttttatgaacttgaattgggttcgtgtacaaaaactatagtttgaaataaaaccttttatacccaaaaaaaaaaaaaaaaaaaaaaaaaaaaaagggcggccgtg

SEQ ID NO: 99 - DNA, 3206 bp, Arabidopsis thaliana
  Clone ID: ARATH-23APR03-CLUSTER11334_1
gagtgcgtggttcttgttcatctctctctccctctaacaaaaatcttttcttctgccaagaaaaactatttctgaaaataatcaaatcctctaaaggtttctgtctatttactgatataatttttatctgaaacttttattttagcaactctcttcttcttctctcttcgtcgtcttcctacttctttgttttttctttctttgtattgtctcaccgatttacagtttcttgttcttactttactttgaatctttattaagtttcaaagatccaaacttatactcttcaaaaataggtttcataggctctcagatttggtattataaagatctggtgttatgcagaagagcagggacgacaaggttgataaaagtgaagaagtgaatagtagtaacagtggaagaagaatcaaatgttcttatcatccactgatcaaagaagcccttctaataacaatccatcatcttcttctagtttcttacatctgaccaactcttgtgatgagttaggtcaatcacatctttcaactttctccatcagagattatgcatttagttaccggaccaagaacatcaagaaaagttggcctttttcctcaacaagtttgcaactttgtttaaatcatggcttaactgatccattgccaccgattcagcctcctgaagtgaagaagccaaacataactcatgtggaagcggtaagtcacaagagaaagtcagagaaacttggctcttatcagatattagtagagactactaaacaaggatttgagaatggtttgttggcgagtggttcgaaatccaaaatacaagtagctatggttaacaagaatcctagaaaaaagtgtgggttgatagtgaaacctggagcttgtgtggatagtggtggaaaagaagatcatagtagcctcttttcagcttctgattctatggctttgagaacttgtcccatctgcaaaaccttctcgtctgcttctaacactactttaaatgcgcacattgatcagtgtctgtctgttgactcggggcagcagccgattcgtaagccaaacaggcctaagactaagccacggttgaaagttaaaaccatgactgatatctatgcttctgcgaaagaaggcacattagaagatcttgataaaagaaatggcacaaagtgggctatgatttcgagctactctaaccgtgttgtctctgatgataagcctgaagtgtccaacaaagtaaagaagcgaagcgtgtcgcgtgctcgcattgatgaagatgctgctggcattggacctgtttacattgatgctaagggccaaaaactgcggattttatctaagtttaacgagaaagcttctgatccatcaagaagagagcatgaagaagtttgtgagaagaaatcttctagtgaaggtaaagggggcaaaagctttaggaaaaaactttggggagagaaacattacaagcatcgtaaactagttcctcaaaacagaaaactcactgttcgtaaaagcaatgcttcagagataccggagtatcgaagaggatattctaaagaaggtaaagactttgagaggtcagaaacttcaggtcctggtcaaggtagaatattcaaccagcggatgctaacaaagcgttctctttcaaggcatggaaagaagaatgggacagacatttgtgaatctgagaattggaattcattgtcagaagatcctcttgtgttaagaagtccaagtcatgtgagtactgatttgtccgagacagtttcttctcctttaaacagtatagggtcatggagagtttgtggggagagccaagtttctggaaagagctgggctttgtctaggaacagaagcattgaaagtgatttatttgtagcaaatcccttgagatgtttaacacctgtggcgagaggcgtcatgaagttcaagaaagctcgaatggatttctctgagaatgaagatgaagatatagggaaatgggagtctgaaatgactcaagaacgtgaactgtcagattatgatggttgggatgatgatgatggagaaacagataaggttgcgctaagctcaaatccttcgtttagcggggaagacaatgattatgaaagctatgaagagactggtgataacaaaggaggtgatgatatgttggacaaaactaaagatgcagatgttgagtttgaaagcatggtttatgagaaaactggttgcgaaaccgcggaacaagaaagctcgttcatggaggttgatcccattcctattccaggacctccgggatcatttttaccaagtccttgggatatgatgggaactgatgcagttgaacatcatggaaactcttcagttatcacaagccaagtccactcttcacaagatcagtttgatctcactgacagaaattcatcggaatcacctgtttcagcaatttcaaactttgcagctcctgaaacacagacattaagtcttcataacatcatcaccactgacaagagaccttccagattcagagacaatgatcaatcatgttgttgccaaagaaaggagaaagctcttgaagatacaacattttgtcaaccaccaccaccacaaatgatccaacaagatttggatttcctgagtaagtctgtgcctgcggttccttcaactcccaacccggtgttgcggctgatgggaaaggatttgatggttattaaccaaagagaagagccttcacacaacgaatcaagtccaaaaccaacctctcagtttctagatctttctaagacacagcaagcgtctccttctgttaatcttcttcatcctccttacagcggaaatggttatttcgacaccaatacaagcttctacaacatcccatgaaagttcagaccaagaactctacttctctccaagatactaaataatattccatggcatttcagatcaaagtccaggcattttccttaagcttgagatcttgagaagctagacacctcaagatctcatgtttctctataataaagaggttgagaatctcaaaaaggctgctttagaaagacaatggtgagactgagataaattctctcctcataggatgatatatatgagaactccactaaggtaaaaggacccccacttttgttttaagttttaaggatgaaaacttataattataatgttatgaaagcgaatttaaaataaattatataagagttaacatcaaaaaaaaaaaaaaag

SEQ ID NO: 100 - DNA, 2237 bp, Arabidopsis thaliana
  Clone ID: ARATH-23APR03-CLUSTER11335_1
gaggcttacgtcccatcatcattccccgttctctttttattttctctaatcgccgacgattatctctttcgtccggcgatagctattttgtctcttcaaatccccatagaccaatactcaactcttcatctccatgtctcctcaatctcatttctctccttagtgattgagctttttccttctttctctttggttattattccttctcctcctccgtcgtgtttttgattgatttcagaatctaaatctccgtttgatttctccatactcgtgctgattttcacctatgtaatgtgatttatgagctctgtttatttcaaatcgacggcgatcgttgaatttattgatcaatgtgtaagtaagagcttgaagaaatagtttttgttgttgttgtgaaagctcagagttttgtttgcttttttgttgacttttttgagattgatgctggatctcaatctcgacgtcgactcgaccgagtctactcagaacgaacgagattcgattactgttaaaggggtttctttgaatcagatggatgaatcggtgacgtcgaactcttctgttgttaatgctgaagcttctagctgtatagatggtgaagatgagttgtgctctacacgaacggtcaagtttcaatttgagatactgaaaggaggaggagaagaagaagaagaagatgatgatgaaagaagtgctgtgatgatgactaaggagttttttcctgttgctaaaggcatgaactttatggattcgagcgctcaaagttcaaggagcaccgttgatatttccttccagagggggaaacaaggtggagactttataggtagcgggagcggtggtggcgatgcttcacgggtgatgcagccaccatcacagccggtgaagaaaagcaggagaggtcctaggtctaagagttctcagtatagaggcgtcactttctatcggaggacaggcagatgggaatcgcatatctgggattgcggtaaacaagtttatttaggtggatttgatactgcccatgctgcagctagggcgtatgatcgagctgctgtcaaattccggggtctggaagctgacatcaatttcgttattggcgattatgaagaggatctcaagcagatggcgaatctttccaaagaggaagttgtgcaagtacttcggcgacagagctctggtttctcaaggaataattctagatatcaaggagttgctttgcaaaagattggcgggtggggagctcaaatggagcagcttcatggaaacatgggttgtgacaaggcagccgtacaatggaagggaagggaagctgcttccttaattgagcctcatgcatcccgaatgattcccgaggcagctaatgttaagctcgacctcaacttgggaatctctctttcactaggagatggtccgaagcaaaaagatagggccctccggcttcaccatgtccctaacaattccgtatgtggaaggaacaccatgatggagaaccacatggctgcagcggcatgtgatacgcctttcaatttcttgaagaggggttcagaccatcttaataaccggcatgcccttccttctgcgttcttttcacccatggaaagaacaccagagaaagggcttatgttacgttctcatcaaagcttcccagccaggacatggcaagggcatgatcagtccagtggtgggaccgccgtagcagctacagcaccgccactgttttcaaatgcagcatcatcaggattctcactctcagctacacgccctccttcatccacagctattcatcatccttctcagcccttcgtcaatctgaatcagcccggtctctatgttatccacccatctgattacatatctcagcaccaacacaatctcatgaaccgcccacaaccaccaccatagcttcctccttcctccgcataactcaaggttctacacagccctgaggttggaataagttggaaggccagccaaaacgacgctgaattctcccaagatctgttgtacttattgtcattgtgtgatttatctttctgcttttgatttgtaacataaactgagggataataccaaaacagaacccaaacccatttgccattttactataatgtctctgatattaatatgaacagcgtaaagtacaatgcattctatatgtatgaatgaagaaagctattgagacttgagagactataaaaaaaaaaaaaaaaacgagggggggcccggtacccaatcggggg

SEQ ID NO: 101 - DNA, 2282 bp, Arabidopsis thaliana
  Clone ID: ARATH-23APR03-CLUSTER11341_1
cttgtttatacatgaaccaatttaccagcacactttcaaaaccccccacacatactttacatactcctcatcttcttcttcttcttcatcgttttcgatttgttgctccgataatgtcgtttctataacccgaagatcatcaacgaagaaagcgaaataaacctcaaaaaatcacagagattattacaaatggcggctactgattttttcttcgctttcgtcttctctttcgctcttatcttcggcttctctttcgctggtgatccttacgtctcttacgatttcaccctctcctacatcactgcttctcctctcggtgttcctcaacaggttatagcagtcaatgggaaatttccaggtcctgtgattaacgctacgacaaactacaatgttcatgttaacgtactcaatcatttggatgagcctcttttacttacttggcctggtgttcagatgaggcgtaactcgtggcaagacggtgttcttggaacaaactgtccaattccaccgaattggaacttcacttatgattttcagttgaaagatcagattggaagttatttctactctccttcacttaactttcagagagcctctggtggttttggtgcactcataatcaataacagagaccttgttcctattccgttcactgagcctgatggtgaaatcatctttattattggtgattggtatactcagaaccatacagctttaaggaggatacttgactctggtaaagaacttgggatgcccgatggagtactcatcaatgggaaaggtcctttcaagtacaatagcagtgtacctgatggaattgaacatgaaaccgttaatgttgatccagggaaaacatacaggatccgtgttcacaatgttggtatctcgacaagcttgaacttcaggattcagaaccacaaattgctcttgattgagactgagggtcgctacacctcccaaatgaacttcaccgattttgatgttcatgtgggacagtcttattctttcctggtaaccatggaccaaaacgccacaagtgactactacattgtggcgagtgctagatttgttaatgaaacagtgtggcaaagagtcacaggtgttggcattctccattattccaattccaaaggacctgcttctggtcctttgccagtttcagcaactgatgttaatcacccttggtctgcaatgaaccaaccgagagccataaagcaaaacacatctgcaagtggagctcgtccaaatccgcagggatcatttcactacggacagatcaacattacaagaacatacatcttgaggagtttgcctccaacaaaaatcaatgggaaacttcgtgctacacttaatggaatttcatttgtcaatccaagcacccccatgaggcttgcggatgaccataaagtgaaaggagattatatgttagattttccagacagaccacttgatgaaaaacttccacgtttgtccagctctatcatcaacgcaacatacaagggctttatacaagttatcttccagaacaatgacaccaaaatccagagcttccatattgatggatatgcattttacgtggttgcgatggactttggtatatggtcagaagacagaaacagttcttataacaactgggatgcagtagcacgaagcacggtggaggtctatccaggagcatggactgctgtacttatttctctcgataatgttggagtttggaatatccgggttgagaatcttgacagatggtatcttggccaagaaacatacatgcgaattataaaccctgaggaaaacggaagtacggaaatggatccgcctgaaaatgttatgtattgtggtgctcttcaggccatgcaaaaggaacaacatcacagctcggccacaaaatcaatgacaaatggacagttgatactaattttcagcatgatgatggttttgctctcctcgttttcgtccttttgctgagtctgttccatcatttacgaatctactctggtttggtattctgatctcccattagggctgtagatggagaatgtataactacaaacagctgttgggttcgttctgtttctctcatatttcattgattgttaggtactcatatcttctatcctcatgattctaaacaacgttagttcgtgagggtttgtgtttagagctttgttcttcgtagttctaggtcatttggagttcaaaactttggcaacgactgtaactaaagttctcatttgtgggtcttctacattaatttctactataaaaaaaaaaaaaaaaaa

SEQ ID NO: 102 - DNA, 5893 bp, Arabidopsis thaliana
  Clone ID: ARATH-23APR03-CLUSTER113488_1
atggatacgaggtttccgttctctccggccgaggtctctaaagtccgggtggtccagtttggcatactcagccccgatgagatcaggcaaatgtctgttatacatgttgagcatagtgagacgaccgagaagggtaaacctaaggtgggaggattgagtgatacccgtcttggtacgattgatcggaaggtgaagtgtgagacatgtatggctaatatggctgagtgtccgggacattttggctatcttgagctcgctaagccaatgtatcatgtcggttttatgaagacagtgttaagtatcatgagatgtgtctgtttcaattgctccaagattttagctgatgaggtatgtaggagcttatttcgtcaggctatgaagatcaagaatcctaagaataggcttaagaagattctggatgcctgcaaaaacaagaccaaatgtgatggtggtgatgacattgacgatgtccaaagccacagcacggatgaaccagtaaaaaagagccgaggtggatgtggtgcacaacaaccaaaactgactattgagggtatgaagatgattgcagaatacaaaattcaaaggaagaaaaatgatgagccagatcagcttcccgagcctgcagaaaggaaacagacacttggtgctgatagggttttgagtgttttgaaaaggattagtgacgcggattgtcaactcctaggtttcaaccctaagtttgctcgtcctgactggatgattcttgaagtccttcctattcctccaccccctgtcagaccatctgtaatgatggacgccacttccaggagtgaggatgacttgacccatcagctagctatgattattcgacacaatgaaaacttgaaaaggcaggaaaaaaatggagcgccagctcatattatatcagagtttacacaactcttgcagtttcatatagctacgtattttgataacgagttgcctggacagccaagggctactcagaaatcagggaggcctattaaatcaatatgtagtaggctgaaggcaaaggaaggcagaatcaggggtaacttgatgggaaaacgtgttgatttctcggcacgtactgttattactccagatccaacaataaatattgatgaacttggtgttccgtggagtattgctctgaatctcacatacccagaaacagttactccctataacattgaaagattaaaggagcttgttgattatggaccacatcctccacctgggaagactggagcgaaatatatcataagagatgatggccaaagactagatcttcggtatcttaagaagagcagtgatcaacatttggaacttggatacaaggtggagcggcatttacaggatggtgattttgttctgtttaatcgtcaaccaagtctgcacaaaatgtctatcatgggtcacaggattaggattatgccatattccactttccgtctgaatttgtctgtcacgtctccgtacaatgctgattttgatggggatgagatgaacatgcatgtaccacaatcattcgagaccagagccgaggtgttagagctgatgatggttcctaaatgtattgtctccccccaggcgaatcgtcctgtgatgggaattgtgcaggataccctcttggggtgccgtaaaattacaaagagagatactttcatagagaaggatgtattcatgaacacactgatgtggtgggaagacttcgatgggaaagttccggctcctgcaatcttgaagcctcgtcctctttggactggcaaacaagtttttaatcttatcataccaaaacagataaatctgttgaggtactctgcttggcacgcagatacagagactggatttataactccgggggatactcaagtgcgaattgaaagaggggaacttcttgccggaactctttgcaaaaagacccttggtacatctaatggaagtctcgtgcatgtcatttgggaagaggttggtcctgatgcagctagaaaattcctcggtcatactcaatggcttgtcaattactggcttctgcagaatggttttaccatcggaattggtgacacaattgccgattcatcaacaatggagaaaattaatgaaactatttccaatgcaaaaactgctgtgaaagatcttatccggcagttccagggaaaggaattggaccctgagcctggccgaactatgagagatacatttgagaacagggttaaccaggttttgaataaagctcgtgatgatgctggaagtagtgctcaaaagagtttagcagaaaccaataaccttaaggccatggtgacagcaggatccaaaggaagtttcatcaatatttctcaaatgacagcgtgtgtcggtcagcaaaatgttgaagggaagcgaattccatttggatttgatgggcggacattgccacatttcaccaaagatgattatggtcctgaaagtcgtggttttgttgagaattcgtacctgcgtggcttgactcctcaagagttctttttccatgctatgggaggacgagaaggtcttattgatactgctgtgaagacatcagaaactggatacattcagaggcgattggtaaaggctatggaggatattatggttaagtatgatgggacagtcagaaactctttgggtgatgttattcaatttctctatggagaagatggtatggatgctgtatggatagaatcacagaagctggattccttgaaaatgaagaaatcagagtttgataggacttttaagtatgagattgacgacgaaaactggaatcctacttacctaagtgatgaacatcttgaagacttgaaggggattcgggagttgcgtgatgtattcgatgcggaatattcgaaacttgagactgacagattccaactcgggacagaaattgcaacaaatggtgatagcacttggccattgcctgttaacatcaagaggcatatctggaatgcgcagaagactttcaaaattgacttgcgcaaaatttcagatatgcaccctgttgaaattgttgatgctgttgataaactacaggagaggctgttggttgttcctggtgatgatgcgttgagtgtggaagcacagaaaaacgcaacattgttctttaacattttgcttcgcagcactcttgctagtaaaagagtgttggaagaatacaagctcagccgcgaggcttttgagtgggtcattggtgagattgaatcaaggtttttacaatcgctagtggccccaggggaaatgatcggttgtgttgctgctcaatcaattggagaacctgctacgcagatgactctgaataccttccattatgctggtgtcagtgcaaagaacgttacgctcggagttcccaggttgcgtgaaattattaatgtagctaagaggatcaaaacaccatccctatcagtctatctcactccggaagctagcaaatcaaaagagggggctaagactgttcagtgtgctttggagtatactactctcaggagtgttactcaagctacggaagtctggtatgacccagatccaatgagtacaataattgaagaggactttgaatttgtgaggtcctactatgaaatgccagatgaagatgtttccccagataagatatctccgtggctacttcgtatagagttgaatcgcgagatgatggttgataagaaattgagtatggcggatagtgcggagaagatcaaccttgagttcgatgatgacctaacttgcatattcaatgatgataatgctcaaaaactgatccttcgaattcgcattatgaacgatgagggcccaaagggagagttgcaagatgaatcggctgaagatgatgttttcctcaaaaagattgagagcaacatgctgacagaaatggcactcagaggtattccagacatcaacaaggtttttataaaacaggttagaaagagcaggtttgatgaggagggaggcttcaagacatctgaggagtggatgttggatacagaaggtgtgaacctcttagctgtcatgtgtcacgaagatgtggatccaaagaggacaacaagcaatcacttgattgaaattattgaagttctcggaattgaggcagttcgtcgtgctttgcttgatgaactccgtgttgtgatatcctttgatggttcttatgtgaattaccgtcatcttgccatcttgtgtgatactatgacctatcgcggtcatctgatggctatcactcgacacggtatcaatagaaatgacactgggcctctgatgagatgctcttttgaagaaacagttgatattctgctagatgctgcggcttatgctgagacagactgcttacggggtgttactgagaatataatgttgggtcaacttgcaccaattgggacaggagattgtgagttgtatctgaatgatgagatgctgaagaatgcaattgaacttcagctccctagctatatggatggtcttgaatttggaatgactcctgctcgttcaccagtgtcaggcactccttaccatgaaggcatgatgtctccaaactacctgttaagtccaaatatgcgtttatccccaatgtcagatgcacagttttctccatatgttggtggaatggccttttcgccttcttcttctccaggatatagtccatcatcgcctggatacagtcctacttctcccggttacagtccaacttcgcctggatatagcccgacttctcccggttacagtccaacttcgcctacctacagtcccagttctcctggctatagcccaacaagccctgcttattctcctacaagtccttcctattctcctacctctccgagctacagcccaacgtctccaagctatagcccaacgtcgccaagctacagcccgacatctccgagctacagtcctacttccccaagttacagcccgacttcgcctgcttacagcccgacttcacctgcttacagcccaacttcaccagcatacagcccaacctctccttcttacagcccaacttcaccttcttacagcccaacatcgccttcttacagccctacttcaccatcttacagcccaacatctccgtcttacagccctacttcacccgcatatagccccacatctcctggctacagcacgacttcaccaagttacagtccaacatcaccaagctacggtcctacgtctccaagctacaaccctcagtctgctaaatatagcccatctatagcttactctcctagcaatgcaagactatcaccagctagcccctacagtcctacatctcccaactacagcccgacatctccatcatactcacccacatctccatcttattcaccttcaagtccaacatacagtcccagcagcccatacagctcaggagcaagcccagactacagcccaagcgcaggctactcgccaacacttcccggttattcaccgtcatcaacgggtcagtataccccacatgagggcgataaaaaggacaagactggaaaaaaagatgccagtaaggatgataaaggcaacccttgaaagagagtgagaattggcaatccatgttttaggtcatgatttaagagacagtgaaagctgagaaaaggaagggaccgtttcaaagtgatcttctgtggataactttgtgaacaaggttttcttaatagatccttttttcgtgagttgtatattattccaaactgatccataaatccatccaatcctcatcccccaaaaagaaaatagtataaacatagaaaaacgaaaacatatcagactttgggcttttcgtatggtttagtttttggctttttgctgtgttgttctatttcagaaagtaaacatgtgaaacggttcatttgtaatccatgaaaggattctttatgttactgctgttgcttcattgagt

SEQ ID NO: 103 - DNA, 3221 bp, Arabidopsis thaliana
  Clone ID: ARATH-23APR03-CLUSTER11352_1
cggacgcgtgggtctccctcttctgccccttctgtaaattcccaatccaacccttctctccttcctcctccgtctttgccccttcccccaatttcttcttcccgattctctcctttccctttttctttttacccgccaaaatcacatccaccttcactaacggctccttccccaatttccatttcccatttcattcatactcgaaaccctagatttctaattcctggatcggtgcttggatcttcttcagttttctcgtgttttggttgatacccagaatttgattcaactccaaattctccgttttttctcaaagagtaagttgctgtttttcgctgaggaattcactgtccagtgaaattgacgatgcacaagattaagctagacgaccgtactgataatgtgagagagaattagtttctttgtacaagttggttgttttgaagaagtgtgttgttgttgttgtttgaattaagaagattgtttcagcaatggccaatcgcgatttgatgcttggacaaaatcgtaatatcggtattgggcagggtcaatctttggtgcttggccacagccacagtctagggcttggtcaaaaccatgttgatgtggagctaggccaaggtcacaatatggatttaggacttgctcatcatgatcatgatcatcatgaaattgatttaggaaatcctcatgatgatcatgagctagacttaggaaatagtgaagatcaggatggagaggatcatcatcatcatcatcatcacgattatatgaacgagaatgaaatctcggttgatcagaagcctggacacgacgatgttgatcctgatctggttctttcatcgcaaaaccatgagttctcattgtcagataataatcatcagttggttgttggggaaaaccatgaactagatgacaatctggaattagccgttgactcaagtcatgaacttgaaattgatcagcatggtgaaatggttatggttagcactccggttcaagctcgagctctcactgctgacatgacttaccaacttaccgttggacaagagtttccagatgtgaagagttgccgtagagcactgagagatatggcgattgctcttcatttcgaaatgcagactataaaatctgacaaaactcgtttcacagctaagtgttcgagtgatggatgtccatggagagttcacgctgcaaagctccccggggttccaactttcacaatcagaacgatccatgaaagccatagctgtggaggaataaatcacttgggtcatcaacaagcttcagttcaatgggttgctagctcggttgagcagcggcttcgcgagaatccgaactgtaaacctaaagagattcttgaagagatacaccgggttcacggaatcaccttatcgtacaaacaagcttggcgtggtaaagaaagaatcatggcgactatgcgcggatcttttgaagaagggtatcggttacttccgcaatattgtgagcaggttaaaaggacaaatccgggaagcattgcttcggtttatggaagtccagctgataattgcttccagcgtctcttcatatcgtttcaagcttcaatttatgggtttctaaatgcttgtcgaccgcttcttggattggacaggacatatttgaaaagcaagtatttaggtactttgcttctcgctactggatttgatggagatggtgctttgtttccgttggcgtttgggattgtagatgaagagaatgacgagaattggatgtggtttttgtgcgagcttcataatcttcttgaaaccaatactgagaatatgccgagactcacgattttgtcagatagacaaaagggaatagtggaaggtgtggaacagaatttcccaactgcgtttcacggcttttgtatgcgacatttgagcgaaagcttccgcaaggagtttaacaacacactgttagttaattatctgtgggaagctgctcaagctctaacagtaattgagtttgaagccaaaatacttgaaattgaagagatttctcaagatgcagcgtactggatccggcgaatccctcctcggttatgggctaccgcatattttgaaggacaacggtttggacatttaaccgcaaacatagtcgaatccctgaactcatggatcgctgaagcatctggacttccaatcattcagatgatggaatgcattaggagacaactaatgacttggttcaatgaacggcgtgaaaccagtatgcagtggacttcgatactcgtcccaactgctgaacggcgtgtagccgaggctcttgagcttgcaagaacctatcaggtgcttcgagccaatgaagcggagtttgaagttatttctcatgaaggaaacaacattgtggatatcaggaaccggtgttgtctctgtcggggttggcagttatatggtttaccttgtgcacacgccgtggcagctcttctttcttgtagacagaatgttcatagattcactgagagctgttttactgtggctacttataggaagacatactctcagacgattcatccgattccagataaaagtcattggaaagagattggagagagctttctgaaggagatccaaacgtgaataaagctgctcttgatgctattataaaccctccaaagtctctgagacctcctggtaggccgaggaaaagacgggttagagctgaagatagaggacgagtgaagcgggttgtgcattgtagccggtgtaaccagaccggacatttcagaaccacttgtgctgcacctatttgatttgcaacgacatatgtttcactggatgttttacgatgatgttagtagtacttcattgtattcacagatctgatttgtgtaaactctgctgacagaaacaaaaccgcagactccagtgagttatcggaaaagaagcaaaaaccgcaggggtaaactctgctcagtgtagtataaaattcgatctttcttgatcaattgctagatttcaggcaactacctagagaacaacattacattgcctgtttgttgaatcctttccttccttattttatatgctcagctcgagcagttaagcagcaacgctttttctttttattcctgagatcacatttaatttcccatttggaatgtattttatttaggtttgaaattcacaaagtattatgtgattatactttttttaaaaaaaaaaaaaaaaaaaaaaaaaagaaaaaaaaaaaaaaaa

SEQ ID NO: 104 - DNA, 2058 bp, Arabidopsis thaliana
  Clone ID: ARATH-23APR03-CLUSTER11360_1
ctttttttttttatcttacctcttcagaacagaactctgccatggcttctttttcttcttttcttcaaatactagccgttgcttgtttcctctaacaaaactcacccgcgagttaaaaaaacctttgcaactcactgaacctaaacttcgccggtccctacgatcgcatcgacctcttatcaaacaccaaaccacaccagaacagaactcagccatggcttcttcttcttcttctcttctaatcctagccgttgcttgtttcgtctcgctaatctcaccggcgatttcacaacaggcttgcaaatcacagaacttgaactccgccggtccgttcgatagttgcgaagaccttccggtactcaattcctacctccattacacctacaattcctcaaattcatctctctccgtcgctttcgtcgccactccatctcaagccaacggtggctgggtcgcttgggctattaaccctacggggactaagatggctggttctcaagccttcctcgcttacagatccggcggtggtgcggctccggtcgtgaagacgtacaacattagcagctacagcagtctcgtcgaaggtaaacttgcttttgatttttggaatctacgcgccgagtcgttaagcggcggtaggatcgccattttcatgatcggttaaggttccggcgggagctgatagtgtgaatcaggtatggcagatcggcggcaatgttaccaacggtcgtcccggtgtacatcctttcggtcctgataatttgggctcccaccgtgtgttgagtttcacagaagatgcagcaccgggctctgctccttcgccgggatctgctccttcgccgggatctgctccgtcgccgggcaccagtggctcgactaccccaggaacagcggtgggaggtccagggaacgcggggtcattgacgaggaacgtaaattttggggtcaatttgggaattttggttttgttgggttctatttttattttctgaatggggatctctctctagtctctcttctcttcttgagtctctctctattttttttttttttccggtttgttgcgaacaatactggggccgcaacaccttttttctcttttaaagtcctagcggcttcttctttcgtctcgcaaatctctccggcgattttacatcagacttacaaatcccagaacgtgaactccaccggttcgttcgatagaagcaaagatcttccagcactcaattcctacctccattacacctacaattcctcaaattcatctctctccgtcgctttcgtcgccactccatctcaagccaacggtggctgggtcgcttgggctattaaccctacggggactaagatggctggttctcaagccttcctcgcttacagatccggcggtggtgcggctccggtcgtgaagacgtacaacattagcagctacagcagtctcgtcgaaggtaaacttgcttttgatttttggaatctacgcgccgagtcgttaagcggcggtaggatcgccattttcacgacggttaaggttccggcgggagctgatagtgtgaatcaggtatggcagatcggcggcaatgttaccaacggtcgtcccggtgtacatcctttcggtcctgataatttgggctcccaccgtgtgttgagtttcacagaagatgcagcaccgggctctgctccttcgccgggatctgctccggcgccgggcaccagtggctcgactaccccaggaacagcggcgggaggtccagggaacgcggggtcattgacgaggaacgtaaattttggggtcaatttgggaattttggttttgttgggttctatttttattttctgaatggggatctctctctagtctctcttctcttcttgagtctctctctattttttttttttttggtttgttcgaacaataatggtgccccatacttttgtactgttttagtcttagggccatttactttgtttcaccacatacttagagttattggattgtatggaccattactatcatgagattgagatcatcttatcttcttataaaatctatttgccatc

SEQ ID NO: 105 - DNA, 1536 bp, Arabidopsis thaliana
  Clone ID: ARATH-23APR03-CLUSTER11401_1
gcgcagatgcagtcttcttcatcaatggaggtttttgattcgccccaagctctcgcgattcctgatgttcttcagtaatttcttgcaatccttataaacaaagagcgtggagaatcgtttcagaggaaagaaaactaaaaatggcgactcttttcaacaaatttcagcaggctgttggagttcttgccaagagtaccacatttgctaagaacccaaggcaactgcagtttgaagcagacgttaacaaactctttatgtatacaagctataaccggttgggacgagaagctgaggagactgatgcagaggagatcattgagatggctggtaaagccactttatctgagcagcagaagcaagttcaagagaacattcactaccaagttgaaaaattctgctctttgatggatggaatccttcttcctgatgttaggaggaacgagtcggggtcacaatcaacaagccctcgtcctcctcgtagaagtggtcttactttcgccattggtagtaataatgcttttccacatgcagatcagccccttgttcccgagacaaagcctttgaaactcactgacgtctcacagagattaatggatcaaatgggctacaccctcgagatcaaaccgtctgtaatacctcacaaagacgctggtcaaggttgttttatcaaaggcgaagcagatgttggaactgtcttagccttttaccctggagttatttattctcctgctttctacaggtacattcccgggtacccgaaggttgattcacagaactcgtatctcatcaccaggtatgatgggactgtgataaatgctcaaccttggggtcttgggggagaatcaagggaagcctggaacgggtcctacactcctgcggtcaaaacaaacactaaaaccgcagaaaacggttcagacaggttatggaaagcgttgagcaagcctctcgaaggttcgggtaaaggaaaagaggttcttgagaggagaaatccgttggcttttggtcacttagctaaccacccagcgaaagagatgactccaaacgttatgatatgtccttatgacttccctttgatggcgaaagatctgcggccttacattccgaatatatcttttggggattctggagaaataaagatgaaaagatttggaagtttctggtttaagacagggagtaaaaacgggttagaagctccggttctgaagacactggtcttggtggcaacgaggtcgttgtgtaatgaggaacttttgctgaattacaggctgagcaactctaagagacgaccagattggtatactccggttaacgaggaggaagataggagaagatggagctaaatttctcttttatgttttaatgaaacttgaaaggctctgtttcaaaacatgctcctcggttttctttggactattagtgggacgtcgttttctgattgtgtcactatttttgtttttcgattatttttggaagacattttattctaatcttttaaagacatttatgttgttcggttgtcaaaaaaaaaaaaaaaaa

SEQ ID NO: 106 - DNA, 6678 bp, Arabidopsis thaliana
  Clone ID: ARATH-23APR03-CLUSTER11409_1
atggtccacaactccccatgtaataaacataaaacgacgtcgatttcgtggacccgtatcttagcgggtcggtgtacgggcctatttgttcaagtatctaaccgacgccgttttagaacgcaagcgatcgccttcttcctcggagagccgaccagaggtgaaaacaccacagaggagaagaatcctaaacgacacaagtacagggattttgtcatgttagttcagcttcctcgcttgacaagctctcttagagagcctttcgacatcgatcaggcttaccttcgccgcaaaactatactccaaactcttaataagcctcgcagctccggtaatcgccttgatgaatctgaccttgctaagaggatagttcatcaatgggaaggagcttctctcgaagtgcgacaagcatacaagcagtttattggagctgtagtggaattgattgatcgggaagttccatcagatgagtttcgcgaggttgctttttccgcttatcgtctgtttaacaatccagtggaggaagatgatagtgatatcaatgataatataagcatttccgggaagaagttagagttgcaaaatcttgtcgggcatgctgtctcagatgctaatgtaaaaaacgtggcctcctttgctcaggcactttactcaatacagcctactcatcagtctgagacatatgctgatgaagttaatgggggagctgagtttggtgccgaccttgttttcaatctaccagctcgttttttggtggaagcatctcttgacgaaactgggtttgtggatgtagaaagcaatgatgctcatacatcgttttctgaaggatggagtggtgttagcgacacgaaaaataatctcagtgcaggaaaattcaatttaagttggctaagagatgcatgtggtcggatggttagagaaaccaattcacaactttcccgtgaagaattggctatggctatatgcagatttctggattcggataaacccggtgaggagatagctggggatctgctggatcttgttggggatggtgcatttgagactgttcaagaccttattatgcatcggaaagaaattgttgatgctatccatcatggccaaatgattctcaagtctgacaaagcagcttcaaacacccaatctcggatgcctacctatggaacacaggttactgttcaaacagagtctgcaaagcaaattgaaaaacttcggcgtaaggaggaaaagaaaaataaacgaaatgctgatcttggtttagagagtgaaatatcagaggccaatttttcttctttacttgaggcaagtgaaaagaagactgcatttgaggatctgattgggtctggagaagcgaattctcttgcacttgcccttccccaaggtactgtaaggaagcacttaaaaggatatgaggaagtgtttatcccgccaacccctactgcacaaatgaaacctggcgagaagctgattgagataaaagagttagatgactttgctcaagctgcttttcatggttacaagtctttaaaccgtattcagagtcgcatatttcagacagtttaccacaccaatgagaatatattggtctgtgctccaacaggagctggtaaaacaaatatagctatgatttctgttctacatgagatcaaacaacacttcagggatggctacttgcacaaaaatgagtttaagattgtttatgtagctcctatgaaggcgttagcagcagaggtcacgtcagcatttagccgtcgtctagctccattaaatatggttgtgaaggagcttacaggggatatgcaactcacgaagactgaacttgaagaaactcagatgatagtgacaacaccagagaaatgggatgtcattactcgcaaaagcagtgacatgtcaatgtcaatgctagtaaaactattgatcattgatgaagtgcatcttctgaatgatgatagaggtgcagtgatagaggcgctagttgctcggaccctccgtcaggtggagtcaactcagacaatgataagaattgtaggcctgtcagccactttacctagctacctacaggttgctcagtttctacgagtgaatacagacactggcctattctattttgattcaagttatcgcccagttcccttagctcaacaatacataggcatcactgagcataactttgctgctagaaacgaattattaaatgagatatgctacaaaaaggttgttgattcaattaaacaaggtcatcaagcaatgatatttgttcattcccgaaaagacacttcaaaaacagctgagaaactggttgatcttgcccggcaatatgaaactctggatttgttcacgaatgagactcatcctcaatttcaactgatgaagaaagacgttatgaagtccagaaataaggatcttgtcaaattctttgaagctggcttcggaattcatcatgctgggatgttgagatctgatagaacacttacggagaggctgttttctgatggtctcttgaaggtgcttgtttgcactgcaactcttgcgtggggtgtaaatctgcctgcacacacagtcgtaattaagggaacacaattgtatgatgccaaggctggtgggtggaaagacttgggaatgcttgatgtcatgcagatctttggaagggcagggagaccacaatttgataagagtggtgagggaattatcatcacatcccatgacaagctggcatactatctccggctgctgactagtcagcttcccatagaaagtcagttcataagctccttgaaagataacttaaacgcagaagtggttttgggaactgtaactaatgtaaaggaagcctgtgcttggcttggatatacatatttgtcaattcggatgaagttaaatcctttggcttatggcattggatgggaagagataattgccgatccttctttatccttgaagcaacgagcccttgttgctgatgctgcccgttcactggacaaagctaagatgatgaggttcgatgagaaaagtggaaacttttactgtaccgagcttggacgggttgcaagtcacttctatattcaatattctagtgttgaaacatacaacgaaatgttgaagcggcacatgaatgaaagcgagataattaatatggttgcccattcttctgaatttgaaaatattgtggtaagagaggaagagcagcatgaacttgagactcttgcacgctcttgctgtcccttagaagttaagggaggcccttctaacaaacatggaaaaatttcgattcttattcagttgtacatatcccgtggatcaattgatgcattttctctggtctctgatgcttcatacattagtgctagtttagcacgtataatgcgtgctctgtttgaaatatgcttgcgaaaaggctggtgtgagatgactttatttatgttggaatactgcaaggcagttgatcgtcaactatggcctcatcagcatcctcttcggcaattcgaaagggatctgccttctgatcgatggggtgaccttgaccagcggtgggaggtcgtggaccaggtgtttggggcgctggttcgggatattcctgcgcggaggcgtcttggtcctgggccttcgttgctcttgccgcctcctggttgtcctccctcccgcccggtggcggcggcggtttggcctatcacccccactgtcttgtgggtggatcggcttcttgctcctgctctccgttggtgggttcgctttcagggcactgcgcttcgttggtgctttctctctgagctctccgcgcttgcgtagcgcttgccctcagggcttcccccgctgccgtcgcggaccgctagaggggaaccacagaagctttcttttaccgtaccgatatttgaaccacacccaccacaatactatgttcatgcggtttctgattcttggttgcatgcagagacttacttcacaatctcttttcacaatcttgcactaccagaggcgcggacgtctcacacagagcttttagacttaaaacctcttcctgtgacttctcttgggaataagttgtatgaatcgctttacaaattttcacatttcaatccaatacagactcagatttttcatgtgttatatcacacagacaacaatgttcttgtaggagctccaactggaagtgggaaaactatatctgctgaacttgcaatgttgcgtctcttcagtacccagcctgatatgaaggttgtttacatagcaccactgaaggctattgttcgagaaaggatgaatgattggaaaaagcatcttgttgctccacttggaaaagaaatggttgaaatgactggagattacactccagatttagtagctctcttgtccgcggacatcatcatatctacccctgaaaaatgggatggcattagtcgtaattggcatactcgaagttatgtcaaaaaggtcggccttgttattttggatgagattcacttgcttggagccgacagaggaccgattcttgaggttattgtatctaggatgagatatatatcatcacagacagagcgctccgtccggtttgttgggctttctacagctctggcaaatgcaggtgaccgggctgactggttgggtgttggggagatcggacttttcaattttaaaccaagcgtcaggcctgtaccaattgaagttcatattcagggttatcctggaaagtattactgcccaaggatgaatagcatgaacaagccagcatatgcagccatatgtactcattcacctacgaaacctgttcttatctttgtttcatcccgtaggcagacaaggcttactgcattggatcttattcagtttgctgcctccgacgaacatccgcggcaatttctgagtgtgtcagaggaagacttgcagatggtcctctcacagataactgatcaaaaccttcgacatacgttgcaattcggcatcggactgcatcatgcaggtttaaacgaccacgatagatctgcagtcgaagagcttttcacgaacaacaagattcaggttttggtctcaacatgtaccttggcatggggagtgagcttaccagctcacttaggtattataaagggacctgggcatggcgacgggacctcccagcgctctgtggtcttccctcgggcacagatcttgccgacggggggacctgcagggcggccgccgtccctcctacaggggtctgccgtttgtcgggtcctgcagcccgaccacagcttgtccaacatgggcttgcgcgtacccttccccgtggaccgtagtttggctgtgacgctgcgcgctcgctccaacccggcccccgtctctggagcttgaggcagcagcggcgcggccgcgcctttgcttacatggacgtatttgtttcgtagactgatggctaatcctgcttactatgggctagaaggtactcaagacgaaacaatctgttcctacttatcaagattggtgcaaaccacatttgaggatcttgaagacagtggttgcctcaaagtaaatgaagatagtgtggagcctacgatgctgggtacaatagcgtcacagtattacctttgctacatgaccgtgtctatgtttggctctaatataggtcctgacacatcgcttgaagcatttttgcatatcttggctggtgcttctgagtatgatgaacttcctgtgcggcacaatagaggaaaattacaataaaacactgtcagatagagttcggtatcccgtggataataaccatctagatgatcctcatgtgaaagcgaatctgctcttccaggcacatttttctcaattggcacttccaatcagtgattctgccccgcctggccaggctggactgctgcgcagcctgcggatccccctcgccctcactgacgtctgcgcgccctgtgcatggcgccctgccgcgctggcgggctggccccgtttcctcatggtcgtgcagcccatgcgggctggtcctgcttcgtcgttctcgatgatcccatgcatgaatgaccttcttctaggatctctgtccgcaagagggattcacacgctacatcagctattaaatcttccaagggaaactctacaaagtgtaaccgaaaacttccctgcatcaagattatctcaggatctccaacgattcccacggatccaaatgaatgtgagactccaaaagaaggattccgatggcaagaaaaagccttcaacgctggaaatcagattggaaaagacatcaaagaggaatagctcgagggcattggcccctcgattcccaaaggtgaaagacgaagcgtggtggttggttcttggtgatacttcaacttctgagctctttgctgtgaagagagtttcgttcactggtcgtctgatcacacgcatggagttacctcccaatataacctcttttcaggatacgaaactcatcttagtttcggattgttatttggggtttgaacaagaacactccattgaacaacttgcacgacgcggatgagccattagatgatggattgtagtaaccccatatttttttggaatttgttttatatattgtcaaaattttcttaaaattctggtttttttttgtcgtcttcttaatgtaaaaccaaattttaccttacgttttgtaataaaacagtgttacagatcttttgagatacataagaaaaataatgaagagcttaaggcaaatgtgtt

SEQ ID NO: 107 - DNA, 1895 bp, Arabidopsis thaliana
  Clone ID: ARATH-23APR03-CLUSTER11425_1
agtcgtcttcttcgtttggatctcgtcaccggagctacaccggcgcttcagtgcttgcttctatcgtcgactaatagaaccagaatccgataaaaaaaaaaaaaaagtgttgactcaatcaaagagaagtcatgaacactcacaataatcgatacgcaaaatggaaacagagagagcttgttcttatactcctatacgccatcgctttctatgcttatgtcgtatggagatcgcttcgtctctcccacgatcattacttcaagctccatggtttagcttctggctggctcattcctaatcgacgtaatgatgtttctgatgctcaatggaggaactttcgtggaaatttgccaattcttagctttgttttcgctgttttcactgtgattgcaaatggggttaggtcgtttttccatttaagagctaaaggaatggctatcttgtggctttcaatgtcgttaatatacttgatatacttacatggagcttgcgtcatttacattctctcgattgcaacagccaatttccttcttgttaaggtttttgcacggactagttactttccttacatgctgtggactttcaacatattttttctcttctgcaatcgcatttatgaaggatattctttctccattttcgggcaacagtttgaattcctggataactttcggggcacatttagatggcatatatgcttcaactttgttgttttgcgcatgttaagttttggatatgattatcactggagccaactggattctcattttgatcaggagaaacacgtaatgcgctgttccttatgtaagttggggaagacttgctacgtagtgcgacaggagagaggtctagcaagtgatagctgcagtttttctctatacctttgttatttggtatatgcacccttgtaccttgcggggccaattataagctttaatgcatttgcttctcagctagatatgccacagaatactctttcattcaaagatgttgcttggtatggagtgcgttggttattcagcttcttgctgattgaactcatgacacacttattttattacaatgccttcgtgatcagtggtctgtggagagaactatctcctgtggaaatatttattgtcggatacggagtactaaactttatgtggcttaagttccttcttttatggagatatttccgcttttggtctctggtgaatggcattgaaactgttgagaacatgccgaattgcattaacaattgctacagcctagaactattctggaaaacctggcatgcctcatttaataggtggcttatcaggtatatgtatattcctctaggtggatcacgaagaaaatttctgaatgtgtgggttgtatttacatttgttgccatgtggcatgatttggaatggaagcttctttcatgggcatggttaacatgtttattcttcatgccagaaatgttactgaaatcagcatccagtgcatataaggttgagagtgcttttggagaattcctccttcgtgaactcaaggcgttgtctggtgccgtcacaatcacatgcctcatgattgcaaatcttgctggctatgtcattggaccatctggtataaactggatggtctccagctttctcaaaagagaaggagtacctgttctgggcggcgtgttctttagcttgtacgtgggtacaaagctgatgttccacatccaagacttaagaagtgtggcgcatagcccgaagtagccaagggaaagagacaaagagttgtaatctcctcagttacaaccaagtaatttcattattgttacgttttgtaaaaaatttagtcggactaatcgagtgtatccttgctggaagaatggaaaattaaatcaacttttgcaaaggcttaaaaaaaaagaaaaa

SEQ ID NO: 108 - DNA, 1309 bp, Arabidopsis thaliana
  Clone ID: ARATH-23APR03-CLUSTER11427_1
aggcatttgccggaatccaaaggcattggcgtgtagacatgatcactgctgttcttcacccttgttcttcggcgtctctctctcttcccaaccgtcctcctcttaggtacgccatccttggtgcaggttttgctggaatctctgttgcctggcacctgcttaaggagagtccaaaagagctgagattaagtgttgacgtatatgatgaagttggcataggaggtggtgcttctggtgtttctggaggactcctccatccttattctcctaaaggaaagctactttggcatggtgctgagtgttggagagaatgtttagagctcttaaatgtggctgaaacagctgcttcttctagttaccaatctacggagaacagagactttagcgagagtttcggaaattttatggttcgaagaaggggaatcttgagaccagcaacaaatgccaagactttggatttaatgagtgatttttgtagtaaagactattgacaaagatggtgcacaaaatctcgtccccaatctatacctgcctttgaactgcgccttctattttccaggagctatgaatgttaatccgcaccgatatctccaggcactctttctagcatgccagagctcagcaaaaacatcactgggaaggaaaaacataactttggtgaacaagtctataactgatgtgcttgaacttgaaggaggatatgatgcagtagtaatatgtcttggatccaaggtagactttcttccagggcttactggaaagctccctttaaggacatgccgaggtgtcattactcatatgcagttacacgagagtgccagaggaagttacccggacgatggaccttcgatcttgtcagatgcgtggctcgcggttcagggaccccgtaatctgcacatgggatccacatgggaatggcaatcaagaaattattcatcggatgtcccagcagaggaagcttcaagagctctcaacgagcttcttccgaaagcaagtgcagtttatccagacatagaaaagtgggaatttgcgggagcaagggcgggcttgagagcaatgccacctgtcacaagccatggatcactgccgctcttgggatgtgttaatcagctcataggtgctggtcagttttgcaacttctgggtattttcagggctcggatcaaggggactactctatcatgcttggcttgggaaactcatgtctaaagctgttttaagttgcaatgaagaattacttccttctgaactaacttcttggaagaaaaacagacaataagagtaccattgtttacttctcaaaaaaaaag

SEQ ID NO: 109 - DNA, 1113 bp, Arabidopsis thaliana
  Clone ID: ARATH-23APR03-CLUSTER11453_1
accgaaagctccacaaaccccattaattaacaaaaaaccaaaagaaggcggcgcaaacaaaagataatgcaaccagagacctcagatcagatgttgtactcgtttcttgccggaaacgaagtcggcggtggagggtactgcgtctccggcgactacatgacgactatgcagagcttatgtgggtcttcgtcgtcgacgtcatcgtattacccactggcgatctccggcatcggagaaacgatggctcaagacagagctttagctgctttgaggaaccacaaagaagctgagagaagaaggagagagaggatcaattctcatctcaacaagcttcgtaacgtactctcttgtaattctaagaccgataaagccacactgctcgccaaagtagttcaacgagtcagagaacttaaacagcaaaccctagagacctccgactccgaccaaacattattaccatcagagaccgacgaaattagtgttctacactttggagactattcaaacgacggtcatataatcttcaaagcctctctatgttgtgaagatagatcagatctcttgccggaccttatggagattctcaagtctcttaacatgaagactctccgagctgagatggtaaccattggtggtcggacaagaagtgttcttgtcgtagctgctgacaaagagatgcacggcgtcgagtctgtgcattttttgcaaaatgctctcaagtcgctgcttgagcggtcaagcaagtcgttgatggaacgtagttctggtggtggaggaggagaacggtcaaagcggcgtcgtgcgctggatcacatcataatggtgtgaaatgatgagaattgagcacactaaaaagtctataattgattaatatatatagggtatgatcataattaacttggttataattaccaaaaccttttttattcctctttaataatatatatgttatatggttttagttactaagtcttgggagtgtaagcaaatgttgtaagtaggtttggtgtgttctttttcttttcttttttttttctttttcaagaaaaagaaaaagatctatattatatataaagaatatttgtcatgttatttacaaaaaaaaaaaaaaaa

SEQ ID NO: 110 - DNA, 581 bp, Arabidopsis thaliana
  Clone ID: ARATH-23APR03-CLUSTER11463_1
gggtcttctttttgggtttatggattcgtctcgcgaagccaatcgtaaacatgatgcggaggagaaaagagaagacgagaaaacttctctgatggaggtaaatctcatggtggtgcttctctctcagctttctacgaagaaggaagatgagaatggtttggagaaagagagaagagaccatgttgcacacgaggctcgtgaatctagagcacgtgcaaacaagaggtttatgaaggatacaaagttgatggagaaaaggactcacgtgcttcagcccatggctaaagaattcaggcattacaggaaaatgtgaaggcgcatgactgacttgtgattgcccccagaacctgagttcaattatatttattggattcaaatttttttgttattgatcactatatataaagatgaacagatcttttcattattaattaactgtaaaagatgaaaatgaagagattttttggcgtaattaaatgtaagcaagtattcgctttgtaacgaagatgtatccaatcttgtatcaaccatagaagagatgcaaattcaatgtttcaacctaaccagcaacatgttgtatt

SEQ ID NO: 111 - DNA, 2220 bp, Arabidopsis thaliana
  Clone ID: ARATH-23APR03-CLUSTER11484_1
atagattagagaaaaaaagcttcaagctttcatggaacatgtcagagttatcttcttctttgcttgtttcctaacgcttgctccatttcatgcctttgctcaggtagattcctatgagtttgatccagatttcaactgtgttgatcgtggcaacttcacggcgaacagcacttttgccgggaatctcaaccgccttgtctcctctctctcctcactcaaatcccaagcttatggcttctacaacctctcttctggagactcatctggagaaagagcttatgcaattggtctgtgtagaagagaagtcaaaagagatgattgtgtcagctgtattcaggcagctgcaagaaacctcaccaagcagtgtccgctgacaaaacaagctgttgtatggtacacgcactgtatgtttcgttactcaaacaggacaatctacggaagaaaagaaacgaacccgactaaggcttttattgctggtgaagagatatcagcaaacagagatgactttgagcgtctgcagagaggactattggacagactcaaaggaattgcggctgctggtgggcctaataggaaatacgctcaaggaaacggttcagcttcggctgggtaccggagattctatggaactgtgcaatgtacgccagatttgtctgaacaggattgtaatgattgtttagtttttgggtttgagaatattccgagttgttgtgatgctgagattggtcttcggtggttttctcctagttgtaacttccggtttgagacgtggagattctacgagtttgatgccgacctagagccagatccacctgcaattcagcctgctgattcaccacaatcagctgcaagaactgagaggacaggaaagggcaaaggtggatctaaagtcattatcgcgatagtcatcccgatacttcttgttgcgttactcgcaatttgcctatgcttggtcttgaagtggaggaagaacaagtctggatataaaaacaaagttcttgggaaatcacctttgtcgggttcaattgccgaggatgagttctcgaacacagaatcactcttagttcattttgagactctaaagacagcaacagataacttttcttcagaaaacgaacttggacgtggtgggtttggttcagtttataagggtgtgttccctcaggggcaagaaatcgcggtgaagagattatcgggtaattctggacaaggagacaacgagttcaagaacgaaatattactacttgcaaagcttcaacataggaacttggtcaggcttataggtttctgcatacaaggagaagaaagactccttgtctatgagttcatcaagaacgctagtcttgaccaatttatcttcgatactgagaagcgtcaacttttggattgggtagtgcggtacaaaatgatcggaggaattgctagaggactcctttatcttcatgaagactctcgttcccacgcgtccgatcgtgatcttaaagctagcaacattcttttggaccaagaaatgaatccgaaaatcgcagattttggattagctaaactctttgactcaggccaaaccatgacacatcgattcacaagcaggattgcaggaacttacggatatatggctccggaatacgcaatgcatggacaattctctgtgaaaacagatgttttcagcttcggtgtattagtcattgagatcattacaggtaaaagaaacaacaatggtggatcgaatggtgacgaagatgcagaagatcttcttagttgggtgtggagaagctggagagaagacactatactaagcgtgatcgatccgagtttaaccgcaggatcaagaaatgagatcttgagatgcatacacattggtcttttatgtgtgcaagaaagtgcagcgactagaccaacaatggctacggtttctctcatgctcaatagctattcttttaccctcccgacgcctttgaggcctgcgtttgtgttggagagtgtcgtcataccttcaaatgtttcttcttcaacggaagggttacaaatgtcgtcaaatgatgttactgtttctgagttttctcctcgttaatctgtaaatgttttgattcttctctgaaaacctttgaaatgggttttgtttgtgtgatttttcaggcagcctggcttgatcttgttgtgaataaaacatgaatgtgaagctgtgagatactttttcctttgtcccgttttttttcttcc

SEQ ID NO: 112 - DNA, 768 bp, Arabidopsis thaliana
  Clone ID: ARATH-23APR03-CLUSTER11492_1
aaaaaaattcaatttggaaaaaaatcagagtaggttaaaaatgaattgggcaaaattccgtgaaactgggagcccagaagacaccgacatgtcttctactccgatctcgtccgacacgacggcggtgtccaaagtgatcgatccaaattacgtattaatggttgctgatttcttcaaagctatttccccagacgaatcttgcaacgatttcacctctttcgactctttctccgtcttatttcaaaacaataccagagctctctccatcgcacgcggccgtgtctcgtgctccgtcaccgtcacgccaggcatatccaatttctttaaggggttacatggaggagcggtggcatcaattgcagagagagtagcgatggcttgtgtgaaaactgttgtgtctgaagacaaacatctgttcattggtgaattgagtatgtcttatctctcttctgctcctatttcgagtgaattgttggtggagggaacggtggtgaggactgggaggaatctgtcggtggtgactgttgagttcaagatcaaggagaccatgaaagtcacttacctatctcgtgctactttttaccattctcccatctctaagctttaaagctttttcacatgctcagtgatcttttgctgatctatttacattcttctgttcaataaaacaagattctgtatacagatattactgtctttaatcagtttatacaacactactacattatcatccaactaagaagaattttgcaaaaaaaaaaaaaaaaa

SEQ ID NO: 113 - DNA, 3304 bp, Arabidopsis thaliana
  Clone ID: ARATH-23APR03-CLUSTER11611_1
gataatcgacatgaagctgtccttttcacttgttttcaatgctctcacgttgcttcttcaagtttgcatctttgctcaagccaggttttctaatgagactgatatgcaagctttgcttgagttcaagtctcaagtttctgaaaacaacaagagagaggtcttggcttcatggaatcactcctccccattttgtaattggattggagtcacatgtggccgcaggagagaaagagttataagtttgaaccttggaggattcaagttaaccggtgtgatctcaccctccattggtaatctctcctttcttagattacttaatcttgcagacaactcttttggaagtaccatccctcaaaaggtgggaaggctatttaggcttcagtacttgaacatgagctataatcttctcgaaggaaggattccgtctagtctttctaactgctctagactgtcgaccgttgatttatcgtcaaaccatcttggacatggtgttccttcagaactaggttcactttctaagcttgccattctggatcttagcaaaaacaaccttactggaaattttcctgcatctttaggaaacttgacgtcacttcagaagcttgactttgcatataaccagatgagaggtgagattccagacgaagtagctagattgactcaaatggtgtttttccaaatagcactgaatagtttttcaggtggttttcctcctgcattgtacaacatctcctctcttgagtctctatctctagctgacaatagcttttcgggtaatcttagggctgattttggttatcttctaccaaatctaagaagacttcttttgggaacaaatcagttcactggagctattcccaaaacacttgccaatatctcaagccttgaaaggtttgatatctcatctaattacctgtctggtagtatccctttgagctttggaaagttacgtaatctgtggtggttagggattcgtaataactctcttggaaataactcgtccagtggtcttgaatttattggggctgtggcgaactgcactcaattagagtacttagatgttggttacaatagacttggaggtgagcttcctgcttctatagccaatctgtccactacattgactagtctgttccttggacaaaatcttatctctggaaccattcctcatgacatcgggaatcttgtaagcctgcaagaactcagcttagaaacaaatatgttgagtggagaacttcccgtctctttcgggaagcttttgaacttgcaggttgtggatctgtattcaaatgcaatatcgggggaaataccatcttattttggcaacatgactcggttgcagaagctccatttgaatagcaatagtttccacggaagaatccctcagagtcttggacgttgtcgatacttgctagacctgtggatggatacaaataggttgaatgggactatacctcaggaaatactgcaaattccatccctcgcttacatagatttgtcaaacaatttcttgacaggccattttccagaagaagttggaaagttagaacttcttgttggactaggtgcttcgtacaacaaattatcaggaaagatgccacaagctatagggggttgtctttcgatggaatttctctttatgcaaggaaattcgtttgacggagccattccagatataagccggttggtaagcctaaagaatgttgacttctccaacaacaatctctctggccggatacctcgatatctggccagtcttccttcgctgcgaaatctgaatctttctatgaacaagtttgagggaagggtgccaacaacaggagtgtttcgaaatgctacagcagtttctgtttttggtaacacaaatatttgcggaggcgtccgagaaatgcaactaaagccatgcattgtacaggcatctccaaggaagagaaagcctctgtcagttagaaagaaagttgtcagtggtatttgtataggtatagcttcgcttttgttaatcataattgtggcttctctgtgttggttcatgaagaggaaaaagaaaaacaatgccagtgatggtaacccatctgattctactactttggggatgttccatgagaaggtaagttatgaagagcttcatagtgcaacaagtcgcttctcttcaaccaatttgattggttcaggcaatttcggtaatgtgtttaaaggattgcttggccctgagaataaactcgtcgcggttaaagttttgaacctcctaaagcatggagcgacgaaaagctttatggcggaatgtgaaaccttcaagggtatacgacatcgtaaccttgtaaaactgataacggtttgttcaagccttgattccgagggaaatgatttcagagctctggtctatgagttcatgccaaaaggaagtctggatatgtggctgcagctagaagatctggaaagggtaaacgatcactcgagatctttaacacccgcagagaaactcaacatagcaatagatgtggcttcagctttggagtatctgcacgttcattgtcatgaccctgtagctcactgtgatattaagccaagcaacattcttctagacgatgatctgactgctcatgttagtgactttggtttggctcagctcctctataaatacgatcgagaatcctttctaaaccagtttagttctgctggtgtcagaggcaccattggctatgccgcgccagagtatggaatgggaggccaaccatcaatacaaggagatgtgtacagcttcggaattctacttttggagatgtttagtggaaaggaaccaacagatgaatcatttgcaggcgattataacctccacagctacacaaagtctatattatcgggttgcacgagcagtggaggcagcaacgccattgatgaggggttgagactggttttgcaggtggggataaagtgttctgaagaatatccgagggataggatgagaacggatgaagcagtacgagaattaatctcaataagatctaagttcttcagttccaagacgactattacagagagtcctcgagatgctccgcaaagttctcctcaggaatggatgttaaatacggacatgcatactatgtagacccttctcaactacttatggggacacagtaaaagtgtatttgcgtgtgcatcatcgaaacagaacaaatgttgggaggaggagagactactagttataataagagaataaattaaaatctatctctgctgtagccttttttttttttgttgtgggtgaaaatgattatgatcacatatatatggtcgttgaataccg

SEQ ID NO: 114 - DNA, 1626 bp, Arabidopsis thaliana
  Clone ID: ARATH-23APR03-CLUSTER11616_1
aatccttctcgcgtgactaaaaccctccccttcttctctctccgtcaaaatctgcaaaaccctaacttttcgaatcagcggcagataacgatggtgccttcctccaaagccgtcgtttttgcaaggcagatggcgaagcagattcgtgttacgacgccgtcgatgtccgcaacacgctttctctcaacgggcgacaatggtcaagtagacgagcagcagaaccctccagagcccttacccaacagacccttgcgaggggagagatcttccaactctcacagagaaccacccgctagacaagcccacaaccttggaaagagtgatactactctgtctgacgatggcttcctcgaacagttcaagcttggagtcaatcaggattcacgggaaacccccaaaccggaacaatacccgcaggagcccttaccgccgcctgaggattccgatgagatcttcaagaagatgaaggaaggaggtctcatccctaacgccgtcgccatgcttgacggcctctgcaaagatgggcttgtacaagaggccatgaagcttttcggattgatgcgtgacaagggtacaatccctgaggtcgttatctacactgctgtcgttgaggccttttgcaaggctcataaaattgaagacgctaagaggattttcaggaaaatgcagaacaatgggattgcccctaatgccttcagctacggtgtgttggttcagggattgtataattgcaacatgcttgacgatgctgttgctttctgtagtgagatgcttgagtctggtcactctcctaacgtccccactttcgttgaattggttgatgccttgtgcagagtaaagggggttgaacaagcccagtccgctattgataccttaaaccaaaaaggatttgccgttaatgttaaggctgtcaaggagttcatggataaaagggctccatttccgtctttggcttgggaagccatcttcaagaagaaaccaaccgagaaacccttctgatttacttacgcagtgctgttaagtatgccgtctcagtaagatgttttcttgacttgtaataacaaccttgaaagtgaaaatcaatatgagtcttcctttttctgcttggagtcaggtatcaagtttttttttttttcctatgtcctttaaaaatgtgtagttgtagatgtagttccctgttttcatgcattctaatattgattgcaagttcaatgaatagcgttgtgttggcggtatagggtgtcaaattatgcttgacgcttatcagtcattaccaatgatgtatgtgactgtctattgcaaatgtggccgacttcatgaacaaatatgaacaatagtatcattggttacatacaccaggcataaaactacatcatcctccaaaggcactgctgatctcagggacgtggaggtctgttctgtagaagctggcgctatattgaatacaaaatgcgtgcagtcaacattaaaatagtttttatgattcactcggagatctttacttgatttggtcggctgtattatattcgtgaactcggaagtcaaggcctgtcttgatggaagaatgactccttacttttaatatatatataaataatacactggatataaaaaaaaaaaaaaaaa

SEQ ID NO: 115 - DNA, 3313 bp, Arabidopsis thaliana
  unsure (1)..(3313): unsure at all n locations
  Clone ID: ARATH-23APR03-CLUSTER11619_1
aaatttatttaataaagtttacctataatatcaaattatgcaaaacacaggctggttcagttttttccacgaatcaaaaatggttggagaaatattgaataagagagagagagagagagagagagagagagatagagtttcagagttgacacaacattgaagtaaactaaactcctaacctctttatctatgggtcgttgcacgtctctagtgtacacatcaccctcaccattcacacatagtcacataccaaagcaaaaacatggatcgttgcacgtcgtcgtttttgcttctcacattggtgtccattctccaaatctcctttgctcaacttgttccagcaatgatgacattcggtgactctgtagttgatgtcggcaacaacaactatcttccgacccttttcagagctgattatcctccttatggccgtgatttcgctaaccacaaagccaccggtcgtttctgcaacggcaaattagccactgatataactgctgagactttaggcttcactaagtacccaccagcttatctaagtcctgaagcttctggtaagaatcttctcattggtgctaatttcgcttctgcagcttcaggttatgatgacaaagctgctcttctcaatcacgcgatcccgttgtatcagcaagtagagtatttcaaggaatacaagagcaagctaataaaaattgcaggaagcaaaaaagctgattcgatcataaatgggagcaatcttgtctcctactacatttatcaagcaagtgtatgcggttggagcaaggaagatcggtgtgacatctctgcctccaacaggatgtcttcccgctgcaagaacccttttcggtttccatgaaaaaggctgtgtttcaagactcaacacagatgctcaaaactttaacaagaagcttaacgctgctgcttcaaagcttcagaagcaatattccgatcttaagattgttgtcttcgacatctactctccactttatgatcttgttcagaacccttccaaatccggattcacggaagcaaccaaaggatgttgtggaacaggaacagtcgagacaacttcactcttgtgcaacccgaaatcgtttgggacatgctccaatgctactcagtatgtgttctgggacagtgtgcatccttctgaagctgccaatgagattcttgccactgccctaattggacagggcttttctctcctcggttgatctcacgtatttttcttatattctcttttcaaatcgctgtttctatcacacattgagtcatacatttgtttttctttgaattatgtatcaaagcatcactgttttactaaaaatgtattgaaacttattacaagtactaaaccaagagttgagaacacttttgaattatgtatcaaagcatcactgttttactaaaaatgtattgaaacttattacaagtactataacaaaaacctaaaacacttagtacctacccaattttccctatttattcatccctcgtgcggggcccccgcactttttttncttcccccttnnntcccttcattccttttggtctcccgtctcctcttccttctcctctccccccaactttcccgtctccgccaatcttcgttcctctttcccgttctccccacaggttgttgctttggtgcttgttcccgcctctaaatttctgttaacctcacccttaaaaaccagtgtctgtttagcacccctcttggcaacgggataagccggatgtttgtagaccagatgcattgatcttctctccttgagaggcactttcccagctggaacgtaggtggtgatgttttggtgaccggacatttgtggcacctgattgcccatatagtaataagatgtcccgacctggaatggctgaaagcaaccatatgagctggacacatatgagaggactggctgagctggtgaaggggcagaaggagcttgcgtgtactggcgtggctgtgcctgaaaatattgctgcaacctcttgattcgatcctctttgcgctctgcaactcgaacaactattggctttccatcaactaagaacccattgagatatcttttagcctgtttggactcttcacagttagagaagcacacaaagccgaatcctttacttctgccattctcatgacacatcactttagctgaaactatttgcccatagcatccaaagatttctcgcagtcttgtttcatttcattgatccactcaagttcttcacgtacagattggaccatctcatgttaggctttgcaataaagttgtcactgaatttctgtttcagcatctccctcctttcatctttcttgagtgccttaccaacaaacaatttcttcgatccaagttgtagtccacagagagattccatagctttcttagcattttctggattgcagaagttaacaaatccgaaacctctagatcttcccataccatccctcataaccacaacactagagacagttccatattgagaaaacagtgtatgtagacaatcatctgtaacagtttcgatcagattcttcacataaacgtttgtagagtcttgatttcctgccatagctgctctttcatccttgttgatgaacttggcaacaaacagtttcttgccataaaccatagagccgtggagagcagaacgagcagatacagcagattgctctgtatcaaactgaacaaagccaaaacctttactttggccattctcttcaacgactttgcaagaaagtatggaaccaaaggggcaaaacattcgctctaagcaactgctagtaatcgagctatccagattctttacgtatagatttgcaaaaccagtacgagtacgacgacggtacgcaagatccctctgagaccacattattcgcggggccgggcccggcctagcgctatggtttaagcgagtcatagcattcgatgcgctgaaaggtgaatcgaagttgatgtaagcgtaacacatggattttccggtgacagagttacggcaaagatgaacggacactaccggaacattcaaagagaacttaccaatgagatctttctccgtcacgtctgggctaagatcaccgacgtaaagcgaaccaaaccttgaagaatgctggtggtttcctaacgcctgcgtttccgttttcacgagcgccattgttgttctctcacaaatccttatctctctctcgttctgtagaaatgtagaatcaatgagaaagaacaatttctttttccgaaaaactctgcagagaaaaaagagtaaatgagaagcggacgcgtggtcgaccgggaatncggacgagtaccgcaggcgt

SEQ ID NO: 116 - DNA, 1264 bp, Arabidopsis thaliana
  unsure (1)..(1264): unsure at all n locations
  Clone ID: ARATH-23APR03-CLUSTER11684_3
cccgcgtggcggccctttaagaacttagtgatccccccgggctccaggaatccgccgaggnccattnncttagaactcctaggaaaaaatataancccaaagcctttagtatcatctcgaaaaccaccaaaaaacctttttatancccacaaaacaaagtctctacttctcttcaatcccgaaacccaacccccaaaaaagaaaaaaagtatgtctctcttccccatctcatcctctacctaacactttgacgggtggttgttactggagaaactctccgacccaagaatctacagcgagacatgccctgaagctgaatccatagtaagaagagaaatgaagaaagcatgatcaaagaagcaagaagcgtcgcttccgtcatgcgtttccaatttcacgactgtttcgtcaatggatgtgacgcatctctgttgcttgacgacacaccaaaacatgcttggtgaaaaactatcactttccaacatcgattcactaagatctttcgaagtcgttgacgacattaaagaagctctagagaaagcttgtccagctactgtttcttgtgccgatatcgttatcatggccgctcgtgacgccgttgctcttacaggaggaccagattgggaagtgaagctagggaggaaagacagtttaacagcgagtcagcaagattccgacgatataatgccaagtccaagagccaacgcaactttcttgattgatctcttcgaaagattcaatctttctgtaaaagacatggttgctttatcagggtcacactcaataggtcaaggtcggtgtttttcaatcatgttcagactttataaccaatccggttctggtaaaccggatccagctcttgaaccgacttaccgtaagaagcttgacaaccttttgtttaaacacaataaagttggaactggaggggggaatgtgactggagatctttatgcaacacctcaggtttttgataatcagtatttcaaagacttggtttcagggagagggtttcttaactctgatcagactttgtacacgaatctagtgaccagagagtatgtgaagatgtttagtgaggatcaagatgagttcttttgggcttccccccaaggcatggtgaagttgggtgatttgcaatctgggagacctggtgagattaggtttaattgtagagttgttaatagaaggcctattgatgtattgcttgtatcttgaattatcattagtaaagagaagaaatcttaattatggcttctaagggatt

SEQ ID NO: 117 - DNA, 1668 bp, Arabidopsis thaliana
  unsure (1)..(1668): unsure at all n locations
  Clone ID: ARATH-23APR03-CLUSTER11694_1
aattttaaaccttaaaaaaatctagagagagaccaaaaagccgacgattagtccaccgtgactccaccggtccctccaccgtgacttcaccggtccctcctccgattagttactcttcttcttcagtccaccgtgactccaccggtccctccaccgtgacttcaccggtccctcctccgataagaaatggctttaagagacttttggtgatcaaagggcatgactttcacagattttccagcaaaagtcgtcaaatgtccaagactcattttctccactgttgttgttgataagagtctgaaacaacaaggtcacgacgacgatgagctgctgctgatgtgagagagacctttgtttttattcgtcttaccaaaccataaagaaagaagagagaaaactagaggaagaagaagaagaagaaaggagacaaaacaatgagtgtgtctttgagtgtgatgtcattcaatcttcacgatgatctacctgaagaaagccctaattcatggctcaaaaggaaagatttgtgtctcactgtcatcactagttactcccccattgttctctgtacccaacaaggtgtgaagtcgcagttggattatcttcagcaggggttgccagcctatgatcaatttggcatatcaagaacaggacctggggatgctaatgatgaacactgcaccatcttcttcaacaaggaaaaagtagagctgctagagggtggaactttttggttgtcagagtctccctcggtccctggaagcacggcatggggttccgcagttccttgtatagcgacatgggctacattccaacttaaaggagcggagccgcctggtttttcgtttcagatagtcaacacaaacttggatgaaatcagccctcgtgcccgtaggcgaagtgctttactcacatggcaacacatagcatcattacctcccactttgccggttgtgtactgtggaggattcaacacacagaaggaatcaacaacagggcggtttctgttgggcagatctagagagcatggtgtggtaggagatatgagagacgcatggccaagtgcccgagtaggaaaaaacgtcgctctcataagaacataccatgatttcaaaggtgacaagcagggaacggtcgagttcctgaagctgatattcagagcgttatgcctctgctgggaccgacagacgcaagatctacacacggattggatactttacagaggtagatctatagttcctgtaatgtgcgagatcgtaaatgataagattgacgacttgtatccttcatctcactaccctgtgtttgctgagtttatgcttcctcgttctgtaagaatgcttgaacctactcctcctgtttctgctcctgctcaagaggaaagctagaacacatgtcctcacttgcttaagctttggactatactgattgttgtgcaaatgagctctgtttttttctcggcgcctttatttattgatttgagctaaaacatattcaaaagagatttaaataaattgttttgtttgctcctaatagtttgtgttattattgatgaccactgaaacataagattgacgacttgtttttttattttacaaaaaaattttaaaaaaaaaaaaaaaaaaaaaaaaaaaaaaaaaaaaaaaaaaaaaaaaaaaaaaaaaaaaanna

SEQ ID NO: 118 - DNA, 2152 bp, Arabidopsis thaliana
  unsure (1)..(2152): unsure at all n locations
  Clone ID: ARATH-23APR03-CLUSTER117553_1
cgacggcgaaaggaagaagaagagagagagaaaaaaacgagacgacggtggcgatcgaaaccctgtgccctaatttaaacggaaacttggttcgccgccgttctgcgtcgcccggcggcggaaatgtgcgcttggggcgatgcgtttaattctcaccgtcatgtgctcattcattccttacctttattcatcttctcctcaccgtccttgctcttccccaatctctcgtcctcctcctcgaatccgtccttgtcgtctcagtcgtttcgccaccgcattagtcgctacctccgctcttcttctcgcttccgtcgcttggctttctctcgtcttctcaccaaccacttcccgttgttggcatcttcttaaaggttgggaagacaatcatctctggagtaaacggtaccatcatccaattgtaactcctcctccgccgccgccgtcgccgccgtctcttccagctcttccgttattcgatcatgaatttagaaatcgtagtctctcagagattgataaacttgatctgtctatgaatcacttgatgtttggtattgctggatcttcacagctttgggaacgtcgtaaggaacttgtgagattatggtggaaaccttctcagatgcgtggacatgtctggcttgaagagcaagtttctcctgaggaaggtgatgattctcttcctcctataattgtctctgaagacagctctcgttttcgttacactaatcctactggtcatccttctggacttcgaatctctcgtattgctatggagtcttttcgtctctctctccctaatgttcggtggtttgttcttggtgatgatgatactatcttcaatgttcataatcttcttgctgtgttaagcaagtatgatccttcggagatggtttatattggaaacccctcggagagccactctgctaactcttactttagtcataacatggcttttggaggcggtggcattgccattagctacccctttaagcggaagctctctcccggattcacggcggttgtctcgatagatacccgaagctatacggtagtgatgatcggctccacgcctgcatcactgaactcggagttcctttgtccagagagcctggctttcaccagtggggtattaagggaattgctcggcgtctccccccctcccttccccttgccccatttgtcgcgagtcgtcccgttgacgctgtcattccgctccttccgggtttatctacattagatagtttgaaactcttgacaagagctatgagtttggatcctaggagtgttgaaactcttgacaagagctatgatcatactcacaaactgacatttgcgatatctcttggttatgttgtacaagttttccccaagtattctcctaccacgggatcttgagcgagctgaactttctttctctgcttggaacgggataagtcaacccagtgagtttgatcttgacataaagcttccaatttcgtctctctgtaagaagcctatcctcttcttcttgaaagaggttggccaagaaggtaatgctacacttggaacgtactcaagatccttggtaaaggatgatttgaagacgaagcttctatgttttccacgctctctacctctgcacaaagtggataaaatccaggtctcagggtttcctctgagtaaaaattggcacttggcgccgagacggttgtgttgcagagcaaccccaactactactaacgagcctctcagattaacagttgggcagtgtggtaagataattttgggttccacgattagttctcaatgaacacttatggtgaatactggatctctctaagcatgttgtttcagctctatcctgtacttgtacataggtaagatccagaaccttgactgttgtctgacctagaatgctaatatgcccaaaattgaatttgtcactcttttgtttgttccatgttccactttctttttttgtacatctgagatttcacgaactcaacatttcctgttgagaaacgagtgtaatgtgtacaacaacaaatctttaccagtgaaacctatccatctgtgtgttaagtaagaaaaaaaaaaaaaaaaaaaaagggcggccgcnnnnnnnnnnnnnnnnnnnnnnnnnnnnnnnnnnnnnnnnnnnnnnnnccccacc

SEQ ID NO: 119 - DNA, 2159 bp, Arabidopsis thaliana
  Clone ID: ARATH-23APR03-CLUSTER11773_1
gtgttttccttcttcttccttatctccgcctctttctagggtttctctcaaatcagctcttcaaccatggcggacgaatctcaatactcatcggatacttactccaacaaacgcaaatacgaagaaccaaccgctcctcctccatcaactcgcagacctaccggcttctcttctggtccgatcccatctgcttcagttgatcccaccgcacctaccggtcttccaccttcttcttacaacagcgttcctcctccgatggatgaaatccagattgctaaacaaaaagcacaagaaatcgctgctcgtcttcttaatagcgctgatgctaaacgtcctcgtgttgacaatggtgcttcttatgattatggtgacaacaaaggatttagctcatatccctctgagggtaagcagatgtcagggacggttccgtcttcgataccggtttcgtatggtagctttcaaggaactactaagaagattgatattccgaatatgagagttggtgttatcattggtaaaggtggagagactattaagtatcttcagcttcagtctggagctaagattcaggttactagagatatggatgcagaccctaattgtgctactaggactgttgacctaactggtacccctgatcagatctcaaaggctgaacagttgatcactgacgtccttcaagaggctgaggcaggcaatacagctggttcaggtggaggaggcggccgtaggatgggtggacaagcaggggctgatcaatttgttatgaaaattccgaataacaaggttggtttgataattggtaaaggaggtgaaacaatcaaatctatgcaagctaagactggagctagaattcaggttattcctttacatttgccccctggagacccaacgccagaacggactttgcagattgatgggataaccgaacagattgaacatgctaaacaattagttaatgaaatcatcagtggcgagaaccgtatgagaaactcagcaatgggtggaggctatccacaacaaggtggttatcaagcccgcccaccctcaagctgggcaccacctggtggtccgccagcacaacctggttatggtggttacatgcaaccaggagcatatccaggtccacctcagtatggtcaatcaccttacggaagttaccctcaacaaacttcagctggttactatgatcagtcctctgtgccaccatcccagcagagcgcgcaaggtgagtatgattattacggtcagcaacagtctcagcaaccaagcagtggtggtagctcagccccaccaacagataccacagggtacaattactaccagcatgcttctggttatggccaagctggtcagggataccagcaagatgggtatggagcttacaatgcctcgcagcaatcgggatatggtcaagctgctgggtatgatcaacagggtggttacggcagcaccactaatccaagtcaagaggaagatgcatctcaagccgctccaccatcgtcagctcagtctggacaggctgggtatggtacaactggtcaacagccgcctgctcaaggtagtactggtcaggcagggtatggagctcctccaacttctcaggctggttacagcagccagccagcagcagcttacaattctgggtatggagcaccaccacctgcttcaaagccaccgacttatggccagagccagcagtctccaggtgctcctgggagctatggtagtcagtctgggtatgcccaaccagcagcttcagggtatggacaacctccagcgtatgggtatggtcaagcgccacagggatatgggtcttatggaggatacacacaacctgctgctggtggaggttactcttcagacgggtctgctggagccactgctggtggtggtggtggtacaccagcttcacagagtgctgctccacctgctggaccgcccaaagcatccccgaaaagttgatatgtgtatggataaatttctactgttatacaaaacatgcttccatgctcttatctttttcttgaggatttatcaatgtttgtgtttcacattttagctcttgtctgtcaactctctttatattaaagataatgttacgttttagcctgttattattctttctttgattcaaattcaccaaaattttaaatcct

SEQ ID NO: 120 - DNA, 3082 bp, Arabidopsis thaliana
  Clone ID: ARATH-23APR03-CLUSTER11781_1
aacggaacttgaatcttctgatggaaaattagggtttttgtttttatactttttttctgactcttttgagttttgagtaattgggaattcgatttgattccgttgcaatggtggagagacggaatcctctggttctatcatccacaagaagtactctccgttcagtgctcaattcgtcacaacccagctctgccgacggcgaccgagttctgaataaagacggtgacttgttacgagggaacgctaggttgtctgcgggcattctccggtggcggaaggacggagaaaatgtttccgatgcaaaattggattctttagatgactctgcattggttggactctccactcaattgcttaagagactatctatcaactctggttctttggttgttgtcaagaacattgagataggcattcaaagggttgcgcaagttgttgtacttgatcctcccaagacgacgctggaagatgcatctctcactcaagtacctgtttcggactctcttcatacgatgcttgtctttcccacttatgatttgatgggccagcagttattagatcaagaggttgcttacttgtccccaatgttagcttttaatcttagcttgcacatatcttgcctgaaatccctcgtacatcgagggaacggggtcttagagaagtattttgaagctaagtgtgatgaggagtttatcggaaaatctgcagaagatgggtcgaagattggtttggatttggaacccgtgtcccaagttccaggctatgcatcacatctgagagtttcttttgttaaaatcccagagtgtggtaccatcccatccctgaaagtcaattcgtcatttgaagctgaagagcgacaagggttaatagattctgcattacagaagtattttggaactgatagacagctatcaagaggcgatatatttcgcatttacattgactggaattgtggttcaagcatttgtaatccatgtagtcaaaggttgtgctccgaaagcgacgactatatatattttaaggttattgcgatggaaccttctaatgagaggtttcttcgagtgaatcactcccaaaccgcccttgtccttggaggaactgtatcttctggtcttccaccagatttactggtgtatagatcaaaggttcctatgccattgcaggaggagacagtaaatattttggcatcggtgctttcaccacctctctgcccatcagcactcgcctcaaaactcagggttgctgttttactgcatggtataccagggtgtgggaagagaactgttgttaaatatgttgctaggaggttggggctgcatgtagttgaatttagctgccacagtttattagcatcatctgagaggaaaacatctactgctttggcccagacttttaatatggcacgaaggtattcaccaacgatacttttgcttcgccatttcgatgtttttaaaaatctgggctctcaggatggttcactgggtgaccgagttggtgtgtcctttgagattgcatcggttattagggaactcactgagccagtttctaatggggacagttccatggaagaaaaatcgaatagcaatttctctgaaaatgaagttggaaagtttaggggacatcaagtgctgctaatcgcatctgctgaaagtactgagggtatctctccaacaatcaggcgttgctttagccatgaaatacgtatgggttctttgaatgacgaacagagatctgaaatgctgtctcagtccctccaaggcgtttctcaattccttaatattagctcagatgaatttatgaaaggattggtgggacagacttctggcttccttccccgggacttgcaagctcttgtagctgatgctggtgccaacttatacatcagtcaagagtccgagaccaagaaaattaactctctgtcagatgatcttcatggagttgatatacaccaggcaagccaaatagataacagcactgagaaattaacagctaaggaagactttaccaaagctttggatcgatcaaagaagagaaatgcatcagcccttggtgctcctaaggttccaaatgtgaaatgggatgatgttggtgggcttgaggatgtgaagacatcgatattggacacagttcaactacctctcctgcataaagatttattttcgtccggattgcgtaaacgttctggtgtacttctctatggccctccaggaacagggaaaactttactggcaaaagctgtggcgacagagtgctccttaaatttcctcagtgtaaagggtccagaattaatcaacatgtatattggagagtcagagaaaaatgttcgagatatatttgaaaaggcaaggtcagcgcgaccttgtgtgatcttctttgatgagcttgattctcttgctccagctcgaggtgcttctggtgattctggaggagtcatggatcgagtggtatctcagatgcttgcagagatcgatggactcagcgactcttcccaggatctgtttattataggagcaagcaacagacctgacttgattgatccagctcttttacggcctggcagattcgacaaacttctatatgttggagtcaacgctgatgcgtcttacagggaaagggtacttaaagcactgactcggaaatttaagttaagcgaagatgtatctctttattcagtagcaaagaagtgtccctctacattcaccggcgctgatatgtacgccttgtgtgctgatgcttggtttcaggcagctaagcgaaaggtgtcaaaatcggattcaggggatatgcctacagaagaagatgatcccgattcagtcgttgtagagtatgtggattttataaaggcaatggatcagctctcgccatcactctccataactgagcttaagaagtatgagatgcttcgagatcaatttcaaggccgttcgagctaaacccctctcagtacataaaaattagcttataatgaagacatttcatatttttttcccagactattttctctgaacagttctgttgatttggttagtcaattgatagtaaaattaaagaatcaataatgtaaaataattttcttggttcg

SEQ ID NO: 121 - DNA, 1868 bp, Arabidopsis thaliana
  Clone ID: ARATH-23APR03-CLUSTER11792_1
cttctttctctttatctcccaagctctcttggccagaatctgccgtcaccttttttcggtttttgcgtcttcctcaaaaattcgataacaatggtgaaacggaatcgagttccgccggcagaacaagcattacccatcgaagaagattgcaaatcgttgataaaaaagcttgcttcgtgtaagcaatcaatccgcgacagatccttgcgaactgttcttcgtacttggctcccagaacaaactgaaatctccgatgaagatatgaagaagctatggcaaggaatcttctattgtgtctggcacgctgataagtctctttaccaatcagaacttattgatcgtctctcttctgctcttcaatcacttcctcttcctttgtctatccattacttcaccgtcttcttgttcaccatgcgtcgtgagtggtctcgtattgatcggctcaggttagataagttctacctattgattcgtaggttcttgcacggtttcttctcacttattgatagcaattcatgggatttggaattcactcgtcgtttgatgggtattttgttcgacgggactttacttgctgatgataagtttcaagggaatggtgttaactatcatataacttctgcttttgttgaagagcttaggccgtttcttccattaaggaaggaggttttggaacttctttttgctccttttgtgaagattatgggtgttgttaatgataagattttggtggggaagattaagagtaatttgtttgatgagttactgaagatggggaagaagctactgataattaaacaatctggggatgatgcagtgcctgaggatgatgatgttgtggttttgggatctattgctttgtctatggagtttgcaaagaggttttatgagttgggttcttctccggagtgtcatcagggtaataggaaattgatatttgctcttcacaaggagtttttgcagttggagaaggatatgtcgagttctagtatcgaagtatctatcgtagaagcttctcgtcctggcaacgatgaagttcctgaatcggttcctgtgtctgagtctaatacaaatgttgtttctaagtctaagaagattgttgctaatgggtcttcttcaaagaagaagggtttgaagaaatgttcaaagactaaaaaagacagtgtcaagaaaggtgctgttatggatagtgttgtcgatcttggtaacaaagatgaatcctttgatgagactatgatatcagatcttcgacaggagtttgagaagattgcctctgaaatgagtccgtcaaaaagtgaggttgcaagtgtctgtgacgtggcagagcctgtgtccgtatctaaaaagaccaagaagaggaaaagagagaacaaaggggaagagcaagttagtactgttaacagagatgcagcagagacaagcttagctggcccgagcagtgagaagagctcaaagagagtaagattcgcaatgaagaacaatttggtgtggaagcctcattgccctctacctccacaagatttgaggtgtcctccgtctgctacaccaagaggaagtgctctgaagcaaggaatcccggccggtccagtgagggagttggcaagtaggaagacgaagaagaaagtgaaacccgctgctcgtagaggagtgaagtctatcaagaatttgaagaagaaattgtcgccatgaaaatggagtgtcaagtcgtttgttgctttgctgctagcttttctctaaattttcccttaaattttgttgtagtttcaattttcaatacgtatttgagattttgtttactgatttgacaattatgagaaaaattgtttgccattaaaaaaccctgaaaatttcatcctaaaatcggccgc

SEQ ID NO: 122 - DNA, 3085 bp, Arabidopsis thaliana
  Clone ID: ARATH-23APR03-CLUSTER11824_1
aatccactgaaacattcgtctccggcgaaacaaaaccagaatgagctctcatcatcaaatcctccaaattcgttctgacccatttgttctatcacactgttgccgccacacacgcctcaccagctctcttacgcttcaatctcctctaaagcagcccttttcatgtctccctttccgttggcgccgctcttatcgcggcggagtcaggagctcaacgacggagactcatggtagcaaaaaagaagctttggtgtcggaaacggcgactacatcgattgaattgaaaagggtctatccatttcacgaaattgaacccaagtggcaacgttattgggaagataaccgaattttccggacaccagacgatgttgatacttcgaaacctaagttctacgtcctcgacatgtttccatatccaagtggagcaggattacatgtgggacatccattgggttatacagcaactgatattctagcgaggcttaggcgtatgcaaggttacaatgtgttgcatcctatgggttgggatgcttttggattgcctgctgaacaatatgctattgagacaggaacccatccgaaaactacgacattgaagaacattgaccgctttcgattgcagctcaaatcattgggcttctcatacgattgggaccgtgaactttctacaacagagccagactactacaaatggacacaatggatctttcttcagctttataagaaaggtttggcatatcaggctgaagtaccggtcaattggtgcccggctcttggtactgttttggccaatgaagaagtggtggatggtgttagtgagcgtggtggccacccggttataagaaagccgatgaggcaatggatgctgaagattactgcgtacgctgatcgtcttctagaagatttggacgagcttgagtggcctgaaagtataaaggaaatgcaaagaaactggataggaagatccgaaggagctgagttgaacttttcaattcttgatggggaaggccgagaaactgacaaagagattacagtgtacaccacgaggccagatacactttttggagcaacttacatggttgtggcaccagagcatcagttgttgtcttactttgtaaccgcagaacagaaacagcaagttgaggaatacaaagatttcgcttcgaggaaaagtgatcttgagagaacagaacttcagaaggacaagacgggcgtatttacgggatgttatgcgaaaaatccagctaatggagatgctattcccatatgggtagctgattatgttctagctagttatggaaccggagcaatcatggcggtcccagctcatgatactcgggataatgagtttgcgttgaagtataacattcccatcaagtgggtagtgagaaatgaggcaaattcaagtgatgatgctaagcaggtttatcccggattgggcattattgaaaattcttcaactttagaaacaggacttgacataaatcaactatctagcaaagaagctgctttaaaagttattgaatgggctgagagaactggcaatggaaagaaaaaggtaaattacaagttgagggattggctatttgcacggcagcgttactggggtgaacctatcccgattttaattttggatgagtctggtgaaactattgctatttcagaatctgaactgcccctcactttgcctgagttaaatgattttacgcccactggaacaggggaaccaccactgtcaaaagcagtttcatgggtgaacactgtagatccttcaacaggaaaacctgccaaaagagaaacaagcactatgccacaatgggctgggtcttgctggtactatctgagattcatggacccgaaaaaccctgaagcattagttgacaaggaaaaagaaaaatactggagcccagtagatgtatatgttggtggtgctgagcatgctgttttacatttactatactcgaggttttggcacaaggtactttatgacattggtgttgtgtctacgaaagaaccattcaaatgtgtcataaatcaaggaatcatccttggggaagtccaatatacagcttggaaagatcaagaaggaaattatgtatctgcagatactgaagaacggttaaatgaacatcaacaagtgacaatcccggaagaaaaagttatcaagtccggagatcattttgttctgaaggaggatcctagcattcgtctgattccacgcgtttataaaatgagcaaaagtagaggaaatgtcgtaaatcctgatgatgttgtattagagtatggtgcagattctctacgtttgtatgagatgttcatgggaccatttagggactcaaaaacttggaacacgagtgggattgaaggtgtgcatcgtttcttggcaagaacttggagactagtcattggtttgcctcagtctgatggttctttcaaagatggaaccttagtaactgatgacgaaccaacccttgaacaactccgaactcttcataaatgcattgcaaaggtgacagaggaaatcgagagtacacgattcaacacgggaatttcagggatgatggagtttgttaatgcggcatataagtggaataatcaacctagaggaatcattgagccttttgttcttttgctctcaccttacgcgcctcacatggctgaagagctttggtcgcggttaggccatccaaattctctggcctatgaaagcttccctaaggcaaacccggattacttaaagaacacaactattgttcttccagttcagataaacggcaagacaagaggcaccatagaggttgaagaaggatgctctgaagatgatgcttttgttctagcttcacaggacgacaaactcaggaaatatctagatggacaatcaatcaagaagcgaatctatgtgcctgggaagatcctcaacgttatcctagaccggactaatgtcaaggtcactacaaagtaggatttagaaagaagaaacaattacaaaacctgtcaaatgaacaaaattttatctctattgagagtttccattatatagaaaaagattcttttagaagcaaaaaaaaaaaaaaagggcggccgc

SEQ ID NO: 123 - DNA, 1759 bp, Arabidopsis thaliana
  Clone ID: ARATH-23APR03-CLUSTER11826_1
tgttttcattcttttacgcgtcgagagtcttctccatgagaagcaaattctcagcttcttccgatgatctagcttcacttagatctcatgaactgatttggcgagtttgatgataaagtttgtatttttctttgtgggttgatttcaaattgtgagaaagattcaagattttttgtcgtctcaatgatgcagcagcaagatcgaattggtgatgaaacagatcttgagtctttcacaagtagtgttcctagtagagacgcttctcataggtttagttctcatcagttctcaggaatggttagacaaagagcttatatatttgatggtgatggtaaatactataacaaagaatgggatcttgctgaaggaacagggaaagagttttgttggtatcatgttgaattacctaaaggaaatcagaagctttctcaatctgctcagcatttgattgatgctttatgcccaccattgaagcttcaggacattcttgctcttgctagtaatggacccttttgtgggcatgttgatggagcgcttgtctttagagttaattctcctggtcctgcttctagtagtaatacgtttaagattgctgcgaggattactgagaactctgtgatcactgtttctttaggacgagttcctaggttaggtttctcgcctatgggtcaatcgcttctctcggaagttcctagtgtgattgaggagcatgttcttgagttcttgttgaaaatgaaccattctgaggaagctgataaccctgtgccaacttctgtttcgaatcttgttgtgcatattattgacacacatgttgatcgacttcaagatgttgttactgaacttgagatcgaattggatggggtggagctagaaatggatagaggtggatttgctatgaagaaaaagatgttggatgatagaaggttcccgaaattgcatctcaacttgcagcgtctattgcaggtgattgcgcatggagaacaagtatttccaagagtgaaagaaaaatgttccacgaagccttggtttctggcagaagacatccactcgttggaagagttgattgggaggttaagacgtttaaaagagaatgtaggcttcattgcgaaccgtgtgactgcaatccaagctgggttggatagctggcaagccgaacaaatcaaccgaaagctctattacctctcctttctttccatcatattccttcctctatcaattataaccggagtttttgggatgaatgttggaggagtaccttggacgggacaagacaaaccggagctaagagacggattcagaaatgtgatgtacatctgtttgataatgctggttctagtgttgtgctgcttcggctttccagcgttatatagtcgcatagcgtcttggtggggaacgagagatatgaaaagaagttggtctcttaacagaagatcgtttaagaagataccaaacatagtccaagaaagaaaaggctaccttaggctctaaaccaaacacacttctctctgagtacttcatttactttcttttcacctttcttcatttgcagagacatatatacttctgtcatactcttatggaactttggtttcacatgtattgttgcttagatcttgagtaagactacaatgtacagctgctattcttttaattcttggttctttttcatttagagagactcttgtaagagacaattgtgtatccttttttgagaaaggcaacaagagattgaatggagattgtaagtggagatctttcg

SEQ ID NO: 124 - DNA, 2418 bp, Arabidopsis thaliana
  Clone ID: ARATH-23APR03-CLUSTER118338_1
ggcccaaaccaactcgctttttttctattttctcctaattcgtcttcgcttctttccctaccaaaacacaattcttatctctacaagaataagagaagatctgtagattttaaacaccatttctgatttctacggctgcaaaatttcaaaatcgtcagaggaaattaaaaagaagaaaaaaatggaggggaaaccaaactatgtgatacaagtagaagaagagcttccaactttactgagaaaagccacaacagaagaaatggttggctttgacaattacaaagagaatggtcatccttttcctcactcaatcagtcgttttcatccatcgcatgcctccacgactactttgaatggtcaagaaacatcaagatcaatagacacaatggaagctcatcatcataactacaatgagacaacaccatggactcatcaaagaaaaccatcaatttcaatgccaacttcaccaaatgttctcatgatctccgacccgacaacatctttgtcttccgaaaaccacaagaacagtgggtcgactggcaaatccgtcaagtttctctctcagccgatgaccaaagtctcatctctctacatagaaagcggtaatggtgatgatgatcgtcgtcaaagccatgataatcatcatcatcatcttcatcgacaacatcagagtggtcatcatcaaaatcaaaatcaggctgcgaacaagcttaaagacaacaggtacaactcgttcaagacttggtcggggaaacttgagagacaattcacaagaaaaccagcttctgttgaaccggaggcaccaaaccggaataaccaaaatttgaataccaatgaagccatgcctgtggaccgttactatgacgccttagaaggtcctgaattagagaccctacggcctcaagaagagatcgttctaccaaatgataaaaagtggccgtttcttctccgttaccccatttccaccttcggtatgtgcctaggagtgagcagccaagccataatgtggaaaaccctagccactgcagagccaaccaagttcctccacgtacccctctggatcaaccagggtctatggttcatttcagtggctttgatcctcactatcgccaccatctacctcctcaagatcatccttttcttcgaagccgtacgccgcgaatactaccatccaatcagaatcaacttcttctttgctcctttcatttctttactcttccttgccctcggtgtcccaccttccataattacagatttgccgcatttcctttggtacctcctcatgtttccattcatctgtcttgagcttaagatctacggtcagtggatgtccggtggtcaacgacggctctcccgggtcgccaacccgaccaaccatctctcggtcgttgggaactttgttggggccttgcttggtgcgtccatggggcttagagaaggccctatattcttctatgctgttgggatggctcattacttggttctgttcgtgactctctaccaaaggctaccgaccaacgagactttgcctaaagatcttcatcctgtcttcttcctcttcgttgcggctccaagtgttgcttccatggcttgggctaaggtcactggctccttcgattatggctccaaagtttgttactttatcgccattttcctctatttctcattggctgttcggatcaatttcttcaggggaatcaaattttcgctgtcctggtgggcgtacacctttccgatgaccggagctgcaattgctaccatcaggtacgcaacagtggttaagagcactatgactcaaatcatgtgtgtggtcctatgtgccattgcaacgttagtcgtgttcgcactgctcgtgaccaccattatccacgcctttgtcctccgagatctttttcccaatgacctcgccatagccatcagcaaccgtccgagacccaaacagaatagccaacaccggtggcttgaccaactgagaaacgtaagctcagagaacatcgagaactacttgaaattcacagactccgacagcagtcagagtaatgatgtagaagcttgcaacggcaaaactcaagagagtgattcatcataaattggagaatcacgaaaaaagttttcataacccctaatacagagtcgtatccgaagttttggttttggtttgttgtcagtgtctctgacacaagtgaggaacctagtaacgtaattgttgctgtggttctaatgatcatgtgtttaaagcagtattaagtaaacgggaggggttgtctacaatggtgaaccaatccaaacgacccagtatctcttaaaccagaactgttagcagttatcataatacttcaaagagcatgtatacttgttttgttccaataaataaaaagttttgaggggttttccctgtaaaaaaaaaaaaaaaaaaaa

SEQ ID NO: 125 - DNA, 2796 bp, Arabidopsis thaliana
  Clone ID: ARATH-23APR03-CLUSTER11835_1
aattgcaaatcaaatggatcgtcttgagctctatttctccactttcctttcgaattgctcttccttagcgttattttagtcttttgtttttgtcgtcattcatcttctgcgcttcttcttgttcggtccagccgccccatagatttcgtcccctctaggtatatattctctctgcgttatatgtatgatcctcctcttctagctacgccccaacctaccgttatttacggatcgtctatttttccggcgagtggtaggtctttaggtgcgtgtgctgcgtactgggagcaacagtggagctttagaagtgactatgcccttgaaacagaaaaaaaagaggtagagatagggcataatacaaatctttcattggattgggatagaagatctccaggaggggttagtcctctttaattgcattcatcttgcagttcatgctggattcccatcgatcttgcccagatggcagatcacctcctccaatacatcagtatttactttagctttaaacgatgattgcttggagcctttgatcctgatggtcctctgctaggagctattttttctgcgtctttactatcaattgtgttcttttgaaccgcgctttataatacacacttaccacctaaggtttgacgaaagaagaggactattctgacagcggaaagcacggcaataccggtaagatagaaaattccaagagccttgcctctgtcttcaacttcagtgtcatcgccattgatgaagaacggattgttgtaagcctggtcaagaacggacctcttgctgctagccatcaacgctggctatatgcagacttacattggaggagtctcatgcccttacatatgcaccaggaggctcaaccacggtgtcttattggttggctatggagcggcaggttacgctccggctaggttcaaggagaagccttactggatcatcaagaactcgtggggagagacttggggtgaaaatggtttctacaaaatctgcaaagcccgtactattaatattgatcttaaaaggaaccgaaagctaatctccaaagggaaaaagacgtgtagcagagacctatacatacacctatacattcacgttgcgtgtgataatctactgagggttctatctatattaatccttctctgcttccttcaatctaattgcaaatcaaatggatcgtcttaagctttatttctccgttttcgttttgtctttctttatcgtctcggtttcgtcgtctgatgtcaacgacggcgatgatctcgtgatccgtcaggtggttggtggagccgagcctcaggttttgacctcagaggatcacttttctctcttcaagcggaagttcgggaaggtctacgcttccaacgaggagcatgactatagattctcggttttcaaagcgaatctcaggcgagcgaggcgtcaccagaagttggatccgtcggcgactcatggtgttacgcagttctcagatctgactcggtctgagttccgtaagaagcacttgggggttagaagtggctttaagcttcctaaagatgccaacaaggctccgattctccctaccgaaaatctccctgaggattttgattggagagatcatggcgccgttactcccgtcaaaaatcagggatcttgcggctcttgctggagtttcagcgccactggagctttggaaggtgctaacttcctcgctaccggcaaactcgtcagcctcagcgaacaacagctcgtcgactgtgatcacgagtgtgatcccgaggaggcagattcctgcgactctggttgcaatggtgggctaatgaacagcgcttttgaatacaccctcaaaaccggagggctcatgaaagaagaagactatccttacaccggaaaggacggcaagacctgcaagctagacaagtccaagatcgttgcctctgtctccaacttcagtgttatctccattgatgaagaacagattgctgcaaaccttgtcaagaacggacctcttgctgtagccatcaacgctggctatatgcagacttacattggaggagtctcatgcccttacatatgcaccaggaggctcaaccacggtgtcttattggttggctatggagcggcaggttacgctccggctaggttcaaggagaagccttactggatcatcaagaactcgtggggagagacttggggtgaaaatggtttctacaaaatctgcaaaggccgtaacatttgtggtgttgacagtatggtctccactgttgcagccaccgtctcaaccaccgcccattaagcatctcgtcaataagttttaattactttggtgatttgtatgagcgagctctctttgcgctgctgactctctctatttatctctgcttcttgcttgtaaataaaatgcgttctattgagcaaaaccgtacaatgctcattagcaatgagcccactttaacaagtatcagtttatggcccaatatatgaaagttaaattgagtctgggccgtttaatgagcctttttatcaagtctcaaaaaaatcaaaaaaaaaaaaaaaaaaaaaaaaaaaaaagggcggccgctggtttctacaaagtctgcaaagtccgtaacatttgtggtgttagcagtatggtgtgcgttgctgcatccccagtatcaaccgccgcccattaagcatctcgtcaataagttttaattactttggtgatttgtatgagcgagctctttttgccctgctcactctctctatttatctctgcttcttgcttgtaaataaaatgcgttctattgagcaaaaaaaaaaaaacag

SEQ ID NO: 126 - DNA, 990 bp, Arabidopsis thaliana
  Clone ID: ARATH-23APR03-CLUSTER11861_1
aaaaggaggcgaaaatggtgcagcgtcttgtttaccggtcgcgacacagctacgccaccaaatcgaaccagcaccgtatcgtcaagactccaggaggtaaattggtgtatcaaaccacaaagaagagagctagtggccccaaatgtcctgttactggcaagcgtattcaaggaatccctcacttgaggccctctgagtacaagaggtcaagattatcaggggtccggtggactcctagccccctcatgccgtggagtcttctccccgcctgtggcctggctttgcctggtcgaccctcttacttgagtcaaatttctacggtccaaacgaaaaccctaaaagagaaaaggaggcgaaaatggtgcagcgtcttgtttaccggtcgcgacacagctacgccaccaaatcgaaccagcaccgtatcgtcaagactccaggaggtaaattggtgtatcaaaccacaaagaagagagctagtggccccaaatgtcctgttactggcaagcgtattcaaggaatccctcacttgaggccctctgagtacaagaggtcaagattatcaagaaacaggaggactgtaaaccgagcatacggtggagtcttgtctggttctgcagtcagggaaaggatcattcgggcattccttgtcgaagagcaaaagattgtgaagaaagtgttgaaactccaaaaggctaaggagaaagtagcccccaaggcttaagcttttatgttttattcttctctgttttggaattatggctatgttcaagtgataggacttggtgcagtcatgtgaggacatctatgttactcgaccaatttttaagctttgtattctgttatcagttcttaactttgtcgacaattctcttctcttcagttttggaattgttgaattcatctttaatgttctattgttgatgcatatcacataagctgttgtgattaccttcttggttaatataatatttctgaaaaaaaaaaaaaaaa

SEQ ID NO: 127 - DNA, 1289 bp, Arabidopsis thaliana
  Clone ID: ARATH-23APR03-CLUSTER1190_1
attaaatcctaaaatccattattgattgaatcttcgagttaccaacaaaaaaaaaactctcctttatttcagttttcttttacaaaccataatcttctctttgattccatcttgtgaaccaccggcataagaaaatatgacaattgctttaacgatcggaggaaacgggttttcgggtctaccaggatcgtcgttttcatcatcatcttcgtcgtttcgattaaaaaacagcagaagaaagaacacgaagatgctcaacagatcaaaagtcgtttgttcttcttcatcttctgtaatggatccgtataagactcttaagatccgacccgattcatctgaatacgaggtcaagaaagctttcagacaactcgctaaaaaggtttgaccttttgtttagctcaatcatcttagatctgggtttttaaaatctgaccgccttcgaattaaatcctaaaatccattattgattgaatcttcgagttaccaacaaaaaaaaaactctcctttatttcagtcttcttttacaaatcataatcttctctttgattccatcttgtgaaccaccggcataagaaaatatgacaattgctttaacgatcggaggaaacgggttttcgggtctaccaggatcgtcgttttcttcatcatcttcgtcgtttcgattaaaaaacagcagaagaaagaacacgaagatgctcaacagatcaaaagtcgtttgttcttcttcatcttctgtaatggatccgtataagactcttaagatccgacccgattcatctgaatacgaggtcaagaaagctttcagacaactcgctaaaaagtatcatcctgatgtttgtagaggaagcaattgtggggtacagtttcagacaattaacgaagcttacgatattgtgttgaagcaaattaaaaatcagatggaagggacggaggaatttgagccgttcgatgtatacgacgagggattgaacggaatgaatgatccagattgcgacacgtgggaagaatggatgggatgggagggagcaggaacccgtgattactcctctcacgttaatccttacgcttgataaacgaatgatttcactaattaatttcgaaagaaatcatccaaatgtgtataaataacaatcagagagagactaaaagcacaacaatgtaaataagtgaaatttgtctcggataatgattgcttaaatgtgaataaagtaatctctcctttgtgtaaaaaaaaaaaaaaaataaaaagttttggagctaatctttgagattaagcgaaggttttatcc

SEQ ID NO: 128 - DNA, 1381 bp, Arabidopsis thaliana
  unsure (1)..(1381): unsure at all n locations
  Clone ID: ARATH-23APR03-CLUSTER119141_1
ataacaaaacctatctctctctgtctttactcattgtcgttatggtcgcgccgcctatagccgccgcgtcgttagagctccctcctccgttccccgccgtcttcgaacaaccaatggagaaactcaccttccctaacgagttcccttacgagtttgcctcctcaacgttttcaacttctccggaagactcaacggagacagaagatgaaacaaccgacgacgaagatgacttcttagccgggttaactcgcagactcgctctctcgactcagcgcctctcttctccttccttcgtcaccgacaagtctcagatgaaacccaaagtcacagagtcaactcagagtggactcggaagtcctaatggtccgttttctcaagtcccttcaccgccgacatctccgtctcgtgaagaagactctttgaaagtgttatctgctgcagctggagaagtcgccaagatcaaaaaggccaattttgatgctaaacccatcagctacccaaaccctaaccctaattacttaaccagctttcctcaaaacgtggcgtattataactgctactggttatgggagccgcattatcctcaatctcagatgggaatagttccaaatgcttggcatatacctccttctcccgttagagccttttacacccttccaaccgccgttaaatcgccgtcgactggtaccggcgttttccttccccggaaatactcaaacccttctgattccccgaagaagaaatcaggagatggatgtgttaaggttgttaaccagcaaaaacctaaaattgaagtgttaccggttcgctgtaaaccaaattcgaaagctggtctctctacaggacgcagcaaaatcgattacgtagctggtggtggatgtctgaagcatgaaaagcctcttctacaagaatggatgtactgagtttgaattaggttgtaggattcaggactttttggaagaagaaaatacagaaatggtcgtagttagtgggttgaatttatagtgttgattgtgatggttactggttatagtaaagaataattttgcggggttaagttggattgggatttatttatatttacttaggagaatagcaaaatcagtttctaataagcataattttttggccttgagagagttttgcatcgaactcttctttggcataaggttagtgcaacaacatagaggatgtattgagagtactttagggtgttttctgcagttttggaatctatggggttgcaatgaagtaatctgtatttttttttttttggtttgtttgattaaaagaagcaaagttgtagtgaattatagtggactagtggtaatagaagagattgtatctcaagttgttccctaaagaaaaaaaaaaaaaaaan

SEQ ID NO: 129 - DNA, 1469 bp, Arabidopsis thaliana
  Clone ID: ARATH-23APR03-CLUSTER119_10
acacaaaaacgttttcgaaatccctaatctactctctcttctctatatctctactcttgagaaatggctcttagaactgtgctcgtctccgacgtccctagcctcccggattctgtctacggtttatccgaaggtttagagttgagcaaaccgacgtcgtttaggttaccggggttttcggtgattggacatagaggaatcggtatgaatgtgttgcaatcgtctgatcggagagcgagaggtgttaaagaaaactcgattctttcattcaattccgccgctaagtatccgattgatttcattgagttcgatgttcagattcttagaaattgaaatgaaaaataagaacatgaagatttgaagaaagagagagagatggcacatagagaagcattccaagctttgtgtggtttttcttttgtaggtgacaaaagatgattgccctgtcattttccatgatgatttcatctactctgaagaaaatggtattgttaatgagagtagagtgacggatctgagtctgtctgagtttctcctttatggacctcagaaggaaactgagaaaatagggaagacactgatgaggaaatctaaagaagggaaggttttgaaatgggacgttgatttggatgattctctttgtacgttgcaagaagcttttgaacaagttgaacaaactcttgggttcaatatcgagttgaaatttgatgatcagaccgtctatgaacgagagtttcttgaccatatcctgagatcagtactacaggtagtctctaattatgctaaagacagaccagtaatcttctcaagtttccaaccagatgcagctaagcttgttagggaactgcagagcacttaccctgttttctttctgactgatgcgggaaacgagattcacaatgacgagagaagaaactcgctcgaagaagccattcaagtttgcttggaaggaggtcttcaaggtattgtttcagaggtaaaaggagtgttcaggaacccagcagccattagcaagatcaaagaatctaacctctctttcctcacatacggcaaactcaacaatgtcggagaggcagtgtacatgcaatatgtgatggggatcgatggagtgattgtagattttgttgaggagattatagagtccacgacacgcatgatgataagaccaccaccatcatcatcaccattaccatcaccttccaaggatgatgatgttgccattacaagacctgagttttcacagaaggagatttcttttcttctcaagcttctctctcagttgatacaacattgatatctctgttttttcgttttcttttatcccaagtttctttttagggtttgattttcttattgatttaattattattctgggtgtattacccaatagttggaattgtaaataattataaatttatttcttttttcaaggaaaaaaaaaaaaaaaaaaaaaaaaaaagggcggccgc

SEQ ID NO: 130 - DNA, 1723 bp, Arabidopsis thaliana
  Clone ID: ARATH-23APR03-CLUSTER11_1
atttctcccgctttggtcgggccttctccatatctcgccgtttcgtgggtatctttccgtttctcgcttctttttctccgccggcgtccttccatttcgccggctgctatcgaaccctaacccgcgacgactccaccgtctccggcgtcttcttcttccggcgaaaccggtaaccgtatcttttgtttctatagaattagcttcatgatggcggatactgaaatgcaagagcaagatgtgccgtctggtaccaaaggtgttgtagaggagccttcagaactagagaaagacctaaactctattgaaagacctaagtcccctgttccagaggatacgactcatactttggatagtgatgttcatttatctgatgctcccattgctaatcaaattgaggctaatgaagaggttggtggacagaacagtgttgatgggaggaatggtgatgttgatcagtctgaaaagaagattactagtgatggcggtcaagaggagacaacacttggggaatcaaatcctttgaagggggatccgtcgagtcctcatgttcctgaagaaagtgttaagaagtggaagacatggttgttgagtgatgctgaggccagggaagttgatgaagcaggggcaccacaggatcaagaggcgtttattaaagaagtggaggccttcaacaaggagaatttcctggaatttaaagccccaaagttttacggacagcccttaaattgtctcaagctttggagagccgttatcaagttaggtggctacgatgtggtcaccacatctaagctatggcggcaagttggagaatcgttccatcctccaaaaacatgcactacagtctcctggacattccgcattttctatgaaaaggcacttttggagtatgagaagcatttaaggcaaaatggtgagcttaaccttcctggttcagcttctcttccgtcttcaggcattgaaaaggaggcaagtagccatcaagcttcagggtcaggcagaacaagaagagatgctgcagctcgtgctatgcaaggttggcattctcagcgccttcttggatctggggaggttactgagcctattgttaaggagaaaggcttgaattcaaccccaaagcaaaagaacctcaaaaacattggtgtgcagaaacaaaaaacaacaaccggcatggaccttgttttttcacacgaatcagaaaaacagtcaactgccgaggttatagatgttggaccccctgcagactgggtgaagatcaatgtcagagaaactaaagactgctttgagatatttgccctggtacctggacttcttcgcgaagaggtccgtgttcagtcagaccctgcagggcggctagttatagcaggccaacctgagcaacttgacaatccttggggaatcacacccttcaaaaaggttgtgaactttcccgcaagaatcgatccgctgcacacgtcagcggttgtgagcctgcatggtcgactgtttgtgcgagtcccatttgagcagtgaccggtctcatcccaagtgagctagttctttatttgtctctttgttttcttttaggaattcgtttgtatcagaactaaaaacaaacgatagcaaatgtgatagtttgactgtgacttgagttctgaatattaaagtagagaaatgaatattgatgttccataaaaaaaaaaaaaaaaactcgagggggggcccggtacgtatgcaaccaccaatc

SEQ ID NO: 131 - DNA, 2202 bp, Arabidopsis thaliana
  Clone ID: ARATH-23APR03-CLUSTER12006_1
gaccaatcagctcgtgactactttcagcttacctttttcttctccaagtcccatcttcgtctccgtcatcttcacggcacatcctccaaaaacgcttagcttctctctctgttacgtttactcaagtcttttttagtctcctccttaactctcaagccttttccaagtttcaagcggctccaacggttcaatttcgcactttccgatttgtggcttcactttccgatctgttctagagaacttcaatatatatccatatatggtttcattggtctgtgagccatatcctaaggacgtaaaactagctagctctcttagtatggaggaagaggaaacttgaatttaatgagtacgactttcattcaagagaatgtccgtctgtagacagcaggatgcctctgttcgtgagtttcaaggattaagattactcaacctatctctgttcctttcacttgggaacaagctcctggaagattaaagggcaatgatttcaaaccccaagtttggtgttttgatgaaagaagaagaacaagtttttacaccatgtcttccaccgggtaaagccgttgatgcaaacatgacaagattgcagagttcaaagggtaaacaagttgaagaatcagatgatgatgaagatgatgtgttttctgatgctcttgacactctctctccaaaggactcgttttcttttaacaatagcattagtggtgtgagtgaatatggtggcgttgagaccaagaaaccactggatgctcaatctcgggatttcatgatgagtcgttttttaccagctgccaaagctatgactgtggagcagtctcattatgcttcgaatcgaaaaccatccacttttatggctgaaccaacgatacagataagagagttagtaccgggggagaagcagcaaactcctaatagatatgatgtgtctatagtcccatcttactattaccaccaagacattgatgatgaagaaagcaaggtgggtgaggaagatgatgaagtttctgagtacgcctatctttcaaagagaggttgtggaatgttgccacaattgtgctttaaagactctctcggcatgctgaacacagtgcctggttttaaagctaaacacaactctccaataacatcaccaagtcatgatcaagtgaagtcaagcaaggttgctcaactcaaatatcgattccaatctgttaaaaagctagctcttgattcagtttctaagcacaagttgagtggtaaagttcattcaccagttcatccaagcaatgggaagaagttcaactctgaatcaaacttgatttctgctgcgaagaggtcttcatctccttacagacactctcgctgtatgtcaccatttcgcagtacaggtaacggttctcctttacaccatgcgggtttccctgagactcgtagggaaaccgagaacctgagagctaacaggttgagcaatcatactagaaacataagcaggacgtctcaggagttactctacccaaaaagcaatggttcaatcttggagaagacagtttatgtcgacaccgagaatgatcacatgaccaatgatcagcataactcaaatctcatgatctttccagaggaagcagatatgacaggaaggaaaccagatgccaatcctgaacttgaagcttttgaaaatataagtattagaagtagtgaaatggtgaagggaaatgagttagtagagatcagtagtggttttgatcggtctcctcttgcaccaccttctcccaaaaggccttctgaatcttggctttgtcataatctgccttcagtaacttctcagatcacttcacgtagatatcatccattcaacccccaaaagcaggatcttacagaaaactacagaaatggtaccaagtgggaaactattgttaagacttcctacatgcacagagatcatatccgatattccgaagaactggttgctcatacatctcatcaatccaaaacttgagaccttgatgcttctcgagttctgacctccccgagatcatcaggtttatacctacgtttcagctcaatcattagttatttggtagtcatttcatccactggtgaaaagaaaatatgtgcttgttttatgaacctcatttacatgtgcagcttcaatattaactctaattaatgaggcaaatactaaaaaaaaaaaaaaaacagctctaacgatcattgcttacg

SEQ ID NO: 132 - DNA, 1351 bp, Arabidopsis thaliana
  Clone ID: ARATH-23APR03-CLUSTER12010_1
ggatctgccaatcacaaattaacagaaaacacaactaaattgcgatttgaatttattaaatcgtaaaactgagatcttctctgagatttttctcctcctaaagtttgaaactttgaacataaaaattgtatttttttttttgaagtttccagcaaaaaaaaaattgaaactttcagtgattggaattttaatttgtgttttagtttggtgggtttctttatcgggatcgttgtcgtggatttttgtttgtagcagcttgaaagacgatgtcgtcgtcgccggacattgccggaatcttagataatacgaaggagcttgatcggttaagaaaagaacaagaggaagttcttgtggagattaataagatgcataagaagcttcaagctacgccggagatagttgagaagcctggtgatatttcattgtcaaagcttaaaaatttgtacattcaagcaaaagagctttcagaaagtgaagtaaccgtttcaaatattctgcttactcagttggattctctgcttccatctggaccaactgggcaacaacgcagaaaattagaaggcaacgaacagaagagaaagagaatgaaagtagatacagatgtaacaagagtttctccttccatgagaaatcaaatcgaggcatatgctagtctaaagggtgaacaggttgctgcaagagtcacagctgaagatgccgagaaggatgaatggtttgtggtgaaagttattcacttcgacagagaaacaaaagaagttgaagtacttgatgaagaaccaggagatgatgaagaaggaggtggccagaggacgtataaactatcaatgtcatgtattttaccgtttccaaaacggaatgatccttcaagcacacaagagtttataccagggaaacacgtcttagctgtatatccaggaaccacagccctctacaaggcaactgttataagtaccccacgaaagaggaaatctgacgagtacttgctagaatttgatgatgatgaagaagacggagcattacctcaaagaacagtgccattccacaaagtggtagctttaccagaaggccatcgccagtaattttagatggatacaatgaaataagagacgatttctttgggccagagtgtaagttaagagttgttgcctttgtttgtgatgatgactttgaagaataaaaaggtatgttttaactttttattatttcaatttgtggcaaaactactctagcaacatttgtaacatttaaatgtgtatatatgaatggaaccatgggtatgtatatcatattgagacacaatttaaaaaaaaattacatttttctaaaaaaaaaaagaaaaaaaaaaaaaaaa

SEQ ID NO: 133 - DNA, 3219 bp, Arabidopsis thaliana
  Clone ID: ARATH-23APR03-CLUSTER12022_1
ctccggaatccgccacgcgtccgtgatcgcgtccatcaacgcgtccgaaaaaatctgacttttttgtataaactcttttataaaaaagaataaaaaagtttcgttgaatccctcaaaactttttggttccttacaatcgtcatttgtaactttcccagatcctctcccttttattgcatctctgttcttttagctcagggtttgtctgtcgtgcaaaaagcaaaccctaaatcaaatctgggtttcgtctatctgattcgtcagatctaaagtctcaaggcccaccatcgtcttctttttttgaactctctgctctgctttgctctgcctttggttttctttttttccatttcgagctgcttggttggctttgaggtttcacttcaaagagtttgcatctgctaatgtagacaagttttcgtggagatatgagatttccaacaaatagtcccctactggttcaggatatcattgtcctgaaaacaaacatccaaagttttagaaggtgatgtgagttctccatatgttacgccgtcttggatggttaattggactgagccaaagaagtaggcaaacaaagtcgattgatgctgagccttacgtagccagggttaagccagtgctaatgatcgacactgttcaggagattgctatctatatccataggtttcataaccttgatcttttccagcaaggatggtatcaaataaaaatcagcatgagatgggaggatggtgacaacaactcctgtggaattccttcacgagttgttcagtatgaagcgcttgattcaacctcaaacgactcatatggagtgtggaagatagatgataaggatagtagtttcttaacacagcccttccgcattaaatatgcaaggcaggatgttcgtctctgcatgatggtctcatttactatgcctctggaaagatatgaggggtcagctacatcggctgttatattgaagtttgagcttttgtattctccaatcatggaggatatacctgtgacacattcagatgcttgtgctgcggcagtgcatgaatttcgtattcctcctaaagctctttcaggcgtgcattcttactgtccagtgcactttgatacctttcacgcggttcttatcgatgtaagtgtccacgtcagcgtcatgaaatccgctgcttacaaacggcctgcaattttatcaagtgatgcgagtaatggtaaaaatttgaccagtggcaatattcagtcttccaaaaaagcctttactcaaatcgcttctgctgacaagaagctggtgtcatttgtaaaagccttactcggagctcgtgacactttgcttgaagaaatgcaaaggcttagcaaagcagttggtcaaacagttgacttgtctgagtttgtatccagtatggacaatgctcttttatctgactcaggttcaacgggaaaatctgttgaagttgaaggttcaggacaaggcaagctacaaaacaatcttgagaagttgaatggcccatttgatttagcaagtgatgactggcttcacaacttctcaaaggagcatctatctcgcacattccacttactgggcacccagctccattatctatggaatacctttctgacattgcaccgggataattacacaaaaatcttggaatatcttcgcgatatctggactaaagatcgaagagcggaatggtcaatatggatggtgtactccaaggttgaaatgccacatcattttataagtggaatggaggacatttcaaaccatagttcacacaaaagagtctcgactgggttgaagctgaatgatcctgcacaagttgcatccacccgcgctgaacttcaccgtcgaagtattgcacaaatgcggataaacaaccgggcaatacaagacatgcatatatttggtgatcctatgcgggttcctatagttataattgaacgtgtttggaatgcaccaaggcgtacgttcagtgataattcgtacatgagacatgttgatagaatcgattctagcttacttaatgggcatgatgatgagagtgggacgaaaaaacatattaacccacagcatactgggcgtgagctgaagattgttgtttttgttcatggtttccaggggcatcacttagacctaaggcttatccggaatcagtggctcctaattgatccaaagatagagtttctcatgtctgaggcaaatgaggagagaacacatggcgattttagggaaatgggtcagaggcttgcgcaggaagttgtttcttttttcaagaggaaaaaggataaacatgcgagatacgggcgcttgaaaaacatcaagctgagttttgttggacattcaattggtaacgtcatcatcagagctgcaatagctgatagtttgatggatccatacaggaagtattttcatacatatatatcgctttcgggtccacacttgggttatctatacagttcaaattccttgtttaattctggactttggctcctgaagaagttaaagagtactcaggttattcatcagcttacactcacagatgatcctgatctccagaatactttcttttacaagctctgcaagcaaaagacgttgtgcagtttcaagaatataattctcctgtcttcgcctcaggatgggtatgttccatatcactcagctaggattgagtcatgccaaccagcttctttcgacaactcaaaaagaggtgttgctttcttggagatgcttaataactgtatggaccaaatacgtgggccatcccctgaaactccgcaccaccagagagtgttcatgcgctgtgatgtcaacttcgacacaaccttgtatggtcgtaacctgaactcattcatcggccgtgctgctcacatcgagtttttggagtctgatgtctttgcaagattcataatgtggtcattccaagatctattccgctgacaaatcttggtttgtggagatatgttttgagatagatcagaaagatacaaccaaaaaaaaaaaaaaactgttgtatattaagtaggacaattctttggttagtttttgtgcactcgccagcggaagaagttatcaagtatacgttacctcaacttgtaggaagttattagttttttttacttttgagattaatttactatctgctaatgacgtttgctctatcaaataaaaaaacaaaaatgtaaaatatgtaaagaaaaaaaaaaaaaaaaattaagaattgccga

SEQ ID NO: 134 - DNA, 1775 bp, Arabidopsis thaliana
  Clone ID: ARATH-23APR03-CLUSTER12052_1
accacacgcgcttagctatcttctcccattcaccacacgcgcttagctatcttctccccctcactgtctgctctaggtcgagattttttagggtttatctccggatttgggttagcgaaatcgagctcacggggttgtctcgattattcctttttaggttgcttgaatctgaagctaatcttgggttaattggattgttagaatcgagacctaaatccttcgattggatcagagaaaatatgtcgcgcgttctcacttgcccaccgcttgtgtttgcaagaaaccacgttggcgttcaaaacttggtcgaatcgactaaggttcgttgagctacagatctggtttcttgcttcagttttttttgtgtgattgatttctacggatttcgtaaaacctgattttggattcgtttttggggaaacttatttcaatgtagtaatctttgaatttgggttacacttcttgtgggtatggctatattttcataagtcgcatttttttctctctgaaaccctatcatgtataaatctatataagctaattatcatgtgattatcattaacactatataaagagttgcatattagttttcaataatctcatcatgtgttcactgtatcagcaatcattaacggattaggttggtctttgcattgttttccattctgttagtttgattttgtaggtctagatatgtatatgattaagtttgtaggagcttctttgtttattgtaatggtttttgcacattgagtgggatggttgaactgtggttctgaaagacgtggagtctaaaaccctttactctaatggattaaagcttaaaagaatcacacttgattcaaaaaaggcgcaccggatagagaagaaggaaaagaaggagaagagaaaagaaaagaaagaaactaagcgtgagaaatcgcataaacattcgattaaagcaactgataatcatcacaagctaatatttcttccttccaagaaagtgtcagatgagtctgactcactagagaagagtggtttgacagatgagcttgaggaacctcaaaaacaccttggatatttgtctgatggaagtcagaatagtaagaagaggattagagatgattctcctccggctgttgaaagtctcatcaaagctgcacctgtagcaggtaaacctctacggattagaatggtcttcaaaaaaccaaaggaggaagttcctactctgcctagagaggctgttgtttgctccactacagttgcaaagtcgctcagtcaccaagatgtcataacaagttctatctcaagttcaaaaacatccgagcttgaaaagaatctgccgtcaacatcaatagcggcaatagatgaaacaaagaagagaaagaaacacagatctagcaaagaagatcaatacaatgcattgtttgatggttggactcctccttccatgtgtattgctgatgcatcttcaaatgacaatggtgattattggctatttgggaacaagacgcaagaggtgcttaagcccaaagcagcagtcaaggttgatgatgacacgatgatgagaccgggagattcatcttggcctagagctcaatttttgtctgaagttgggatttattctttaccttatactgtcccgttctaatgctcgattctttttgttctagctttagacttagcttgtacagtgtttgactgtttgtaacaacaattctaatctaacccgattttgatacatcaaaagacttcgtaatacttggttcaattccataatcgatcaagtttcc

SEQ ID NO: 135 - DNA, 600 bp, Arabidopsis thaliana
  Clone ID: ARATH-23APR03-CLUSTER12077_1
aaaaaattggcgaaatccacggcgaaagagagagagagagcgaaagggacgatgagcaacagaagaagaaccggagacgatgacaaaggattgctctggaaacttccccaagttaggatcagagacattggaaaagttggtccagcttttggactcggtgtcggttgcggatttggtttcggcgccggtcttatcggaggtgtaggattcggaccaggagttcctggattacaatttggtcttggatttggagctggttgtggaattggtgtaggttttggctatggtgttggaagaggagctgcttatgatcactctcgttcttattacaacgttggaaaaccatctctgaatgaagttgattcactgattgatgaacttgttgttagcacgaagaagcttgtgaaagctactacaaatgaaatcgacaagtggttaaaatgatgaactcttaggatttgttgcagcttccaagtaaatggtagtgtttggtttgttcgtagatcaataatgtagatttggggctagtgataatctcctttctttttgtacaattttacgtatggtataaagatggattcgcgaaaaaaaaaaaaaaaa

SEQ ID NO: 136 - DNA, 1701 bp, Arabidopsis thaliana
  Clone ID: ARATH-23APR03-CLUSTER12089_1
gttgtagagtcgagaaacgaaagataaacacgtgaaaaacaaaaatttcgtctctacacttccccccaccaacgacacgtatgcgtttctaagagagtttaaaaatctaaaattagacccgagtctaaagatttattttgtttttgattttattttttggacactttggcatttagactcctctttgcatcccccgttggaggtggtcttaggtgttagtgtctcttgtttctggaatggctcagtgtgtgaggtcaactctaaatcctgtgagaacaccccagagctttactaggaaagcgtatgtgaaaagcccagcttttgcatcagtctcgttccttcgagcagtaccggagttcaacaaatacccaaaaccttgttcattggttatgtcttgccagggcaaggctcaaaaccagcaggaggagcgaccacaactgtctcttgacgatttagtcacgagtaaccggaaaggggaggttcttggcacaatcaaagactcgctttctaattgtctctctgagactaatcttcttgccactgttcctggtctgaaatctagaatcaagggaaaggtcagagatatttatgatgctgtgattatctggttcttattacaactgatcggttgagtgcattcgacagaaaccttgcttcaattcccttcaaaggccaggttcttaatgagacaagtttgtggtggttcaataacacacagcacataactccaaatgcaatcgtttcatctcctgatagaaatgttgttatcgcaaagaaatgctcggtttttcccatagagtttgtggttagaggatatgtgactggaagtactgacacatctttatggacggtgtacaataaaggtgttcggaactactgtgggaatgagctctcagatggattagttaaaaaccataagcttccagctaatatacttacaccaacaactaaggctgcggatcatgatgtgcccatctctccaaatgagatagttgaaggtggattcatgactcaagctgaatttgatgaagcaagtatgaaagctttgagcttgtttgagtttgggcagggggtggccaagaaacatggactgatattggtggacacaaagtatgagtttggaagaagtagtgatggctcaatcttattgattgatgagattcatacacccgattccagcagatactggcttgcgggttcatatgaagagcgcttccaaaaaggcctggagcctgaaaatgttgataaggagttcctaagattgtggttcaaagagaactgcaatccgtatgaggacgaggtcctgcctgctgctccagcagaactcgtgactgaattagcttggcggtacattttcttgtatgaaactatcactggatcaagaattgacattattccgactcaggaaccaatacatgaccgaatctcaaggaacacaagccaagcactttcatctctccgtcaactttgatctttaatgtaacctttagccaaggatgcagagagcataagtctgtttctttttgcattcatatgtgttctattgttgtcttcatggattatgaatcaaagacaacttaagttctaattgagcaacaaacgaataaacatgaaaaaaactaattgacacaggcttggtgaattagaatatatagttgatcagatgagaaaggatcagttttgttaaaaaaaaaaaaaaaa

SEQ ID NO: 137 - DNA, 1327 bp, Arabidopsis thaliana
  Clone ID: ARATH-23APR03-CLUSTER12098_1
ggaagcagaagaagaagctcagtcggcggccggattaatctccccatcatctctctctctccctctctctgttcctatcccggcgaattcatatctgaatttcccaaaattcaaacttttccggtggaattattttaggaaaccaagtgacttcttaagctccaaaaattgggtatttaatggcggcgagcgcgaacccgtcggggaacaatcaggaaggttcgtcggcgacgcagaaggtatcgtcttcttcagcggcggcggcgaatggcgctgctgtgaattccgtcgataatggtggaaatacaggcgcggcggcggataattcacagacgattggcgcgttgaggcataatccagggatctctaccgattggactcttgaggaacaatctctattggaagatttgcttgtcaagtacgcgacagaaccgtcggtttttcgatatgcgaagattgctatgaaaatgaaagataagactgttcgagatgttgccctgcgctgtagatggatgactaaaaaggaaaacggaaagcgtaggaaagaagatcattcctcgaggaaaagcaaagataagaaagaaaaagctacagattcttcagccaagtcctcatctcatttgaatgttcatcctaatggtccttcttatgctccgcctatgatgcctatcgataccgatgatggtatttcatataaagctattggtggtgtgagtggagatcttctcgagcaaaatgctcaaatgttcaatcaactttcaacaaatttctcagctttccagctacatgagaatgtcaatatcttgtgcaaagctcgagacaatatccttgcaatcttgaacgacttgaatgacatgccagaagttatgaagcagatgccacctcttccggtgaagttgaatgaggagctggcaaattcgatcctccctcgcccatcccatcaaaggaagtcatgatcgaggcgatagatggttggttctgaccaaggagtctctttaatccgggatcaatgaagaaaggaataaatcgcgggatagagagagagctccactcgtactggttgatagaatgaggggtttcccctgactcatagagttatagtctctttttacaatttccgtcagtctctgaatgttttagcaaatggttaattgatacatgagtagggtcgcgtatcgttgtttaggatgtgaatagatttcaattggtatggtataagtctctctgtataaaattggtatcaagctgaaaggtttgagattagaaagggcctatatcctaatgatgcacacccgtgatgcatttctctcaaaaaaaaaaaaaaaaa

SEQ ID NO: 138 - DNA, 1007 bp, Arabidopsis thaliana
  Clone ID: ARATH-23APR03-CLUSTER1209_1
gatcatcactcgatcaggatagcgtttaaaaaggaaccaaaaataataattagagcctgaaaatggcgaatctgttcactgctacggctcctttcctctcactctcgaagccattcaccaaaacggcatcgtaccaccagtgttacgcctcttcttccaatccgccggagcctgagtcttcttctcctcctcctcctccgcctccgcctcaaccgctggcatcgcaacagaagaggaagaagaacgttgagacgacggattgggtcgcttcttccttgacccggcggtttggaatcggcgcgggtcttgcctgggcgggctttctggctttcggtgtaatctccgagcagatcaagactcggattgaggtttctcaggaagtagctaacaccagagatgtagaagaagagaaagagattgtgttgcccaacggcataaggtactatgatcaacgggttggaggaggagcaacaccaagagcaggagacttggtagtgattgatctaaaggggcaagtgcaaggaaccggacaagtattcgtggatacatttggaaccaaagacaagaagaagatgaagccattggcacttgtggtgggttcaaaaccatatagcaaaggattatgtgaaggcatagattatgtactaaggtccatgaaggctggaggtaaacgcagagtgattgttccaccatcgttaggatttggtgtagacggtgctgaattggaatcgggtttgcagattcctcctaatgcttcgttggaatatatagttgagattgatagagtctcaattgcaccagcttgagttgttgtacgtacagctttggtttcattcccaaatccttcaaatatttggttgtataagtatgagtggaaaacaaagtgtaaatttttgtttcttttggggtcgatgtgattgaaccgagataaaccggatcaaaatcttcggtttgatttatttatttatttaaatagatataaaattacgcaaaaaaaaaaaaaaaaa

SEQ ID NO: 139 - DNA, 878 bp, Arabidopsis thaliana
  Clone ID: ARATH-23APR03-CLUSTER12113_1
gatagatcgtcaaaacctgcctaataatgtcttatcctcacataacacctttttttttatctccatctctctgttacttagaaccctccattcatatatacactaggtgccaaatttggtcacgtgtttggcccttcacgttcttgactcttagctagatccttgtttcttgtggattcttgaatcttaaatcttgaatccctgagttttgttggttcttgattttgattctcgattctttagtcattgattattcgatcaatttgtgtgttagtgtattgagagagagagagagagatagaaagagaaagaaatcgtcatggctcatgggagatatgatacttacaagaagaaaagtggacagattcctcggtttggagaatgggaagaagcaaatgagatgccaataacacaatactttgagaatccaagacaagctgaagccttaaagcttgcttctcaccatccccgtccacgtcacctccacgctcaaagacagacggcggggacgaaggagaaaagaggaccacaaaggcgtgtgcgtgacgtcagtgcacagtcggacaagtattacattgacgtcaacggtgttaagcagttcaaaaacgacgttgctctgacttgtaagccacctaagcccgttgatgaagatctctacaagattcctcctgagtttatccattcttcaacaaggaagagaaggcctagctttttagcttgtttggttccatgcgcatgaatcgaaaaggaagagcgaagaagaagaagaaaaagtaggatcatgaatgaataatgtaatttgttttttgtttttgtaatttcatcctaatatacagatatgatatatacgtggtttgacaaaaaaaaaaaaaaaaaaa

SEQ ID NO: 140 - DNA, 1999 bp, Arabidopsis thaliana
  Clone ID: ARATH-23APR03-CLUSTER12127_1
attttaaatagtctctttcgtttatgtatatcacaaatacatatcacaaatcaaaatccaacaaaccaaatcaaaatccaacaaaccaaactagaaaaatgtcggtagttttactctcttctacttctgcaacaatcaccaaatcccaatccaaaaagattccctttttcttcttctccttcttcgttcttctcgtagcttcaaataagattcatcagaagagtaaataaacatcaaaatccaacaaaccaaactagaaaaatgtcagtagttttactctcttctacttctgcaacaatcaccaaatcccaatccaaaaagattccctttttatctcccaccacaaaattcccattaaaggtctcaatttctccatcaagatcgaaacttttccacaaccctttacgcgtggcggcgccgccgtctgtacccacttcggattcgacggaggagaagcggatcgaagaagaatacggccggagataaggaagaagaagggtctgagttcaagtggagagatcattggtatccagtttctttggttgaggatttggatccgaatgtgccaaccccgttccagctcttgggtcgagaccttgtactctggtttgatcggaatgatcagaaatgggcagcctttgatgatctctgccctcaccggctcgctcctttatctgaaggaaggttggatgagaatggacacttgcaatgttcgtatcatggatggtcatttggtgggtgtggatcttgcactaggattcctcaggctgctacttcaggtcctgaagctcgtgctgttaaatccccgagagcttgtgctattaagttcccgacaatggtgtctcaaggtcttctctttgtgtggcctgatgaaaatggttgggatagagccaattcaattgaaccccctaggttgccggatgatttcgataaaccggaattttcgacggtgacaattcaaagggatcttttctatggatatgatactctcatggaaaatgtatctgatccttcccatatagattttgctcatcacaaggttacaggaagaagagaaagagccggaccattgccgttcctcgtggagtaaagcgggggctggggttacgaaccggtgaatgatgacagtccaaggataaccgcaaaatttgttgctccgtgctattctatgaacaaaattgagttagatgcgaaactaccaatcgtcggtaatcaaaaatgggtcatttggatttgctcattcaatatacaatggctccaggaaagacccgtccaacgtttgcaggcccgtaattctttcagtctctgtaccatgaccagcttggtggcaggttgtaccaagagcagaccgttttgttctagcattcatagactggctcagacggcatggcaagagtcagcctcaatggttcggctccaacccgtataatctgcctctcccttactctgtcttaaccaagcgccagatgctacatagattcactccaacccaagcagaccgttttgttctagcattcagaaactggctcagacggcatggcaagagtcagcctgaatggttcggctccaccccgtctaaccaacctctcccttccactgtcttaaccaagcgtcagatgctagatagatttgatcagcatacacaagtatgctcttcctgcaaaggagcttacaacagtttccaaatcctcaagaagtttctcgttggcgcgacggttttctgggccgccacggctggtgttccttctgatgttcagattcgactggttcttgctggtttatcactgatatcagctgcttctgcatatgctttacatgaacaagagaagaactttgtgtttagagattatgtacattctgaaatcgagtagatttgttgtgtatatgtataatcatcatacaaagtacaaacattgtaaatcaaaatccagaggaacttttagcactataaaaccgatttaaccgtttacatcaaaaaaaaaaaaaaaagggcggccgc

SEQ ID NO: 141 - DNA, 3527 bp, Arabidopsis thaliana
  Clone ID: ARATH-23APR03-CLUSTER12146_1
gaccagcagaatcttagctggattcatcactctattcaaaaagtttctctcttctcttttctcagatcttgaactcttgaagaagaaagaagaagataacacaatgctcttcttcttattcttcttctacttactcttatcttcatcctccgatctagtcttcgccgaccgtcgtgtactccacgaaccattcttccctatagattcaccaccaccgtcaccaccatcaccaccaccacttcctaaactaccattctcttcaaccactcctccatcttcatcagacccaaatgcttctcctttcttccctttatacccttcatctccaccaccaccttctccagcctccttcgcttcttttccggcgaatatctcatctctaatcgtccctcacgccactaaatccccacctaactccaaaaaactccttatcgtcgctatctccgccgtttcctccgctgctttagtcgctctacttatcgctttactctattggcgaagaagcaaacgtaaccaagatcttaacttctccgatgatagcaaaacatacaccaccgacagtagccgccgtgtctaccctcctcctccggcaacggcgcctccaacacgacgcaatgcggaggctagaagtaaacagaggaccaccacgagctccaccaataacaacagctctgagtttctttacttaggaacaatggtgaatcaaagaggaatcgatgaacaatctcttagtaataatggatcaagctcaagaaaacttgaatctccagatcttcaaccacttcctccattgatgaaacgaagtttccgtttaaatccagatgttggttcaatcggagaagaagatgaagaagatgagttttactctccacgtggctcacaaagcgggcgagaaccgttaaaccgggtcggacttccgggtcaaaatcctagatctgttaacaatgacactatctcttgctcatcttcaagctctggttcaccaggaagatcaacatttatcagtatctctccttcaatgagtcctaagagatctgaaccaaaaccgccggttatctccacaccagaaccggcggagttaaccgattatagatttgttcggtctccgtcactgtcgttagcttctttatcgtcgggattgaaaaactccgatgaagtaggattgaatcaaatctttagatctccgacggttacatctctaacaacttcaccggagaataacaaaaaagagaactctccattatcatctacttcaacttcaccggaacgacgaccaaatgatacaccagaagcttacttgagatctccgtcgcattcttctgcttctacatcaccgtatagatgttttcagaaatctccggaggtcttaccggcgtttatgagtaatctccggcaaggtttgcaatctcagttactatcttctccttctaactctcatggaggacaaggtttccttaagcagttagatgcattacgttctcgttcaccgtcgtcgtcttcttcttctgtttgttcttcaccggagaaagcttctcataagtcaccagttacatctcctaagttatcttcccggaattcgcagtctctatcatcttctccggatagagattttagtcatagcttagatgtatcaccacggatatcgaacatttcacctcaaattttacagtctcgtgtgcctccgcctcctcctcctcccccaccgttgccgttgtggggacgacggagtcaggtgactactaaagcggacacaatctcgagaccgccttctcttacaccgccttcacatccttttgtgatcccatctgaaaacttaccagtgacttcgtctcctatggagactccagagacggtttgtgcgagtgaggcggcggaggaaactccgaaaccgaagctaaaggcgttacattgggataaagttagagcaagttcggatcgtgagatggtttgggatcatcttcgatcaagctctttcaaattagatgaggagatgattgagacgttgtttgtggcgaagtcgttaaacaacaaaccaaatcagagtcagacaactccaagatgtgttctcccgagcccgaaccaagagaacagagtcctggacccgaagaaggctcagaatattgccatcttgcttcgtgcacttaatgtcactatagaagaagtttgtgaggctcttcttgaaggcaatgctgatacactggggactgaacttcttgagagcttactgaagatggcaccgacaaaagaagaagagcgcaagttgaaagcgtacaatgatgattcgcctgttaagcttggacatgctgagaaattccttaaggcaatgttggacatccctttcgcctttaaaagagttgatgcaatgctctatgtagccaactttgagtccgaggttgaatacttgaagaaatcttttgagactcttgaggctgcttgtgaagaactgaggaacagtaggatgttcttaaagcttcttgaagcggttctaaagacaggaaaccgtatgaacgttggaacaaaccgaggagatgcacatgcgttcaagcttgatacacttctcaagctagtcgatgtcaaaggcgctgatgggaaaacaactctcttgcatttcgttgtacaagagataatccgagcagaaggcacacgtctctcaggtaacaatacacaaacagatgacattaaatgccggaaactaggtctccaagttgtatcaagtctctgttctgagcttagtaacgtcaagaaagctgctgcgatggactcagaagtactaagcagctacgtctccaagctttctcaaggcattgccaagatcaacgaagcaatccaagtccaatcaacaatcacagaagaaagcaacagtcagaggttttcggaatcgatgaaaacgtttctgaaaagagctgaggaagagatcatcagagtacaagctcaagagagcgtagcgttatcacttgtaaaagaaatcacagagtatttccatggaaactcggctaaagaagaagcgcatccgtttagaatattcttggtggttagagacttccttggagtagtagacagagtttgcaaagaagtagggatgataaacgaaagaacaatggttagttctgctcataagtttcctgttccagtgaatccaatgatgccacaacctcttcctggactcgttggacgaagacaatcttcttcttcttcgtcgtcgtcttcaacctcttcgtctgatgaagacgaacataactcaatctcattagtttcttaaggtgagatctcagctttgtctgtgcatgttgttgtaaaaagtatccagtattggattgttttgtcataatagatttaaatatatatatatagagggagggaattaatgacagaaacaaagaagtgtttttcttttctgcatttgtgtaaaaaaaataatataggtttaccttaaaaattgatcatcttaaattaataatttaagaatcaaataaatttgttttaaaaaaaaaaaaaaaaaaaaaaaaaaaaaaaaaaagggcggccgc

SEQ ID NO: 142 - DNA, 2372 bp, Arabidopsis thaliana
  Clone ID: ARATH-23APR03-CLUSTER1216_1
cgtggctgacggaagaaaaaaaaaggggagagatttagttttatccaacagtgcctgaattacgttctgcaatcaatacggacataaccgtccgttgtgtcctgtttataaagttttgctttttttattttctccattgatgggtcttttctttcttctctctctcgtgtttctttcatggggttaagactagtgtttaccgcgtgaaggtttttttttctttctattttctttcatttcctctccttctacttcttcttctccagttctcatctgggttcttcaatggcgagtgttgaaggtgatgatgatttcggaagttcttcgtcaaggtcttatcaagatcaactatacacagagctatggaaagtttgtgcaggtccattagtggaagttcctcgtgctcaagagagagttttctacttccctcagggtcacatggaacaacttgtggcgtcaactaatcaaggaatcaattcagaagaaatacctgtttttgatcttcctccaaagatactttgtcgagttcttgatgtcactttaaaggcggagcatgaaacagatgaggtttacgctcagatcacattacaaccagaggaagatcaaagtgaaccaacaagtcttgatccacctattgttggaccaactaagcaagagtttcattcgtttgttaagattttaacggcttcagatacaagcactcatggtggattctctgttcttcgtaaacacgccactgaatgcttgccttctttggatatgacacaagctactcctactcaagaacttgtgactagagatcttcatggctttgaatggaggtttaagcatatattcagaggacaaccacggaggcatttgcttactacgggttggagtacatttgtatcctcgaaaagacttgtagctggagatgcttttgtgttcttgaggggtgagaatggggatttacgggttggagtgagacgattagctcggcatcaaagcacaatgcctacttcggttatttcaagtcagagcatgcatttgggagttcttgctacagcttctcatgctgtgcgtacaacaacaatctttgttgtcttttacaagcctaggataagccaattcatagttggggtgaacaagtatatggaagctataaagcatggattttctctcggtacccgattcagaatgaggtttgaaggagaagagtctcctgagagaatatttactggtacgattgtgggaagtggagatctatcttcacaatggccagcttctaaatggaggtcattgcaggtacaatgggatgagccaacaacagttcagagaccagataaagtctcaccatgggagatagagcctttcttggcaacttccccaatttcaactcctgctcaacaaccacaatcgaaatgcaagcggtcaagacccatcgagccatcagttaaaacaccagccccacctagtttcttgtacagcctccctcagagccaagattccattaatgcatcccttaaactgtttcaagatccatcacttgagagaatttcaggtggatactcctcaaacaacagcttcaaacccgagactcctcctcctccaacgaattgtagctataggttgtttggatttgatctcacaagcaattctcctgctccaatccctcaagacaagcaaccgatggatacttgtggagctgccaagtgtcaagaacccatcactccaacctcaatgagtgagcagaagaagcaacaaacatcaagaagtcgaactaaagtgcaaatgcaaggcattgcggttggtcgtgcggttgatttaacactgttgaaatcttacgatgaactgattgatgagcttgaggagatgtttgagattcaaggacagcttcttgcccgagacaaatggatcgttgtcttcactgatgatgaaggagatatgatgcttgctggtgatgatccgtggaatgagttttgcaagatggcaaagaagatatttatatattcgagcgatgaggttaagaaaatgacaacgaaactgaagatttcttcgtcgttagagaatgaggaatatggtaatgaatcattcgaaaatcgtagtagggggtgagagttttagctgttaattaaggttaattcggcgacgtcgttttagtgcgtaagtgtctaaagactttttttttagtctgtgtatataaagtcttgtcctctttttcatgtcaatttttcaagttggcgatttaatatttcggttttgggacagtggttgatggggcggttttacatcttttatgtgtatgtacttgttccataaccattcaattttcaaaaccaagtacattcaattagttatgggttcaaagattaaaaagaaaaaaaaaaaaaaaa

SEQ ID NO: 143 - DNA, 1258 bp, Arabidopsis thaliana
  Clone ID: ARATH-23APR03-CLUSTER12214_1
aagaatctagtgaatttccgattccgattttgagctaaaggaagcgagagaagaaaagatgtcgggtatgggtgacggctacgttggtacggctcaagatgcggtgaggatacggcggcttcagaagcaaagagaggccgaacgcaaaaaaatacaagagctcaagagcaagtctgcctccggcaatgaccaatctggtcttctccaattcggcaccagctcgtgcgagattcttgacactgctttcaagaaggaaacagtgggtttagttacaagagaggagtatgtggagaagagggttaatattcgtaataagttcgaggaagaagagaaggagaaactgcagaagctacagcaagaggaagaggagttgcagctagagaagcgtaacaagaagagaaagattaagggatcttcccgcttatcttttgctgaagattttgagaatggcagtgatgaagatgatggagaaaacaagagttctgggacagggaacttacgctgcggaaaacttggcaaggacccctcagtggaaacgaatttcctgcctgacagtgagagggaggcggaggaacaagctgaacgtgaaaggctgaagaagcagtggcttcgtgaacaagagcagattaaaaacgagcctcttgagattacttacagttactgggatgggactggccatagacgagttattcaggtccgcaagggtgacccaattgggaattttctgcgggctgttcagcagcagcttgcccctgacttccgggagattcggacggcatcagtggagaatttactatatgtaaaggaagatcttattattccacatcaacacagtttctatgagctgatcattaacaaagcgagggggaagagtgggccgctgtttcactttgatgtgcatgaagacgtgagaacaatagcagatgcaacgatagagaaagacgagtcgcatgcgggtaaagttgtggagaggcattggtacgagaagaacaagcatatattccctgcttccagatgggagatttacgacccgacaaagaaatgggaacggtacacagtccatggggattaattctggaccagaacatgcttttgatggatcgtttgttgacatgattgatcagatttggtgtaatagtagtggaatgttcatggcatttttaatgctcattcttcttccctcaatgtaccattacactcgttttttaatttttcttaaaataatggaactgtttgatttcaaaaaaaaaaaaaaaaa

SEQ ID NO: 144 - DNA, 769 bp, Arabidopsis thaliana
  Clone ID: ARATH-23APR03-CLUSTER122265_1
aatcatgattcttcttttgccatcattaccttctaaaggagccttctctctcctctctttaaacgaataatgcaaagggaacacaaaactcacaacaaactttctttcatctatataacgcctctctatatctcacccattaatcaaaacacgtctcacttatctctcttcttcatttcttctctcttcaagctccaagatgtgtttaagttcttcagaaacattttcagacacacccacgagattagttttatacctcaaaacacaaagtcacgttcgtatccctcgtctctccaggaggagacggatgtggcgggaagagaaaaagatggagatgatcaatctaaagctttacgtggagaatcaaaacatcataagagagaacgagaaacttaagaagaaagctcttcttcttcaccaagaaaacaaaactctcttctctctgcttcagaccaaaaaactctcctctgtccataaataaaatcttaccatcatcaccaatcactaagatcatcatattcttctttctttactgaaataataataagatctcaaggctccaagaaaaaaaaaacagaaaaatttgggttttacaagcaagggtttagttattattagtgggtatacatctaatttttatcttctttttagtgtgtcatctctttgtaatctttgtatctgagttcttttgttaaataatggtgtaatctactttcttattcaaagttttggatattaatctttttaatcccaaaaaaaaaaaaaaaaa

SEQ ID NO: 145 - DNA, 1712 bp, Arabidopsis thaliana
  Clone ID: ARATH-23APR03-CLUSTER12244_1
ataatatatgggtttttctttccttcttcatttatgaaacgcaaaaaacattattcccctctgtggtctctctctcacgagcatcgtttcttcatcgatctcatagttaccggcgttgttttgaggccactaccgtcgtctctctccgtaatcgtctccaacatcatcatcttctcaatttcgaagcattttattctctaatagtgctctctctatatctgggttcgtgttcgtctggaagagacctggaaaaacaattcaggaagacgattagttgtgttcgtgttcgtccctaatccctaaaggactcaggaatgaatctttctccgttcaagagagatatcgatgagctgatagacgagtttgtggaggatgatttgacaacctttgctgatatgaagagtgtctggctatctagaaagttttctcatatatatgaagctagtcctaacagcaacctagcctttttcatgcagtcactatatgttcataccattggtcacatggttagtattgattctttttcacggagacttggaggtctttactgtctctattgccttcatgagatccaaccctttaaacccaagttcagaatctatatctcacttcaagagcttgggaaatttagggatcttgtagttgaggcaaaagataaaggtgtagagatagctgctgctgtggcaaaaaaaatgcttgatgagaacatgttaatatttggagctgtggatgagacatctgcaaccaagacaattcatcaattaaccgagctacagaacgcacgtgtgcggtttgcctatgagaagttaatctgtgacactagtattaaccaatttattcatttggatatgggtaaggaagttgatctgaattccctagataaaatgtctatagaatatgcagaggccaagaagcgtgcagtcgaaggtgcaggagaaataatggagattgatgacataaagcatatatcagaagagaaagagttgatgggagagagaatggagaaattgaaagaggaatgggattcacaaagactttacttttatgaacaaaccaagcttgatggttttactacgacaccaaaacagttgacaaatgtggaacatgatgaagatgatgggtttgatgagcttgatcgcttactttctcaaagctagtgttgccattgcaatcactgatcgatatcagagtcaggtttgtaggagagagctacacacacactctcacaaaatcaagagagcatgtttgattaggagaatatattggttagtaaattctgtatctaacaaggagattaagaaaattttaattacggtttttcttacgattggaaattatgtagtttgtcatattctcagagtatatgtgatttgataatcttaagacagaaaaaaaaaaaaaaaaaaaaaaaaaaaaaaaaaaaagagagcatgtttgattaggagaatatattggttagtaaattctgtatctaacaaggagattaagaaaattttaattacggtttttcttacgattggaaattatgtagtttgtcatattctcagagtatatgtgatttgataatcttaagacatccatcaagattagtgagttttttacgagcttacatatattttatagacctgctatatttatcatataacacaaagaaaaatcactgattataattgttgacacacaaaagatattgattagcaaatggctcgtgc

SEQ ID NO: 146 - DNA, 1240 bp, Arabidopsis thaliana
  Clone ID: ARATH-23APR03-CLUSTER12249_1
ctggctgcaaaaatatcatcaatagcgaaaagtcgcttcttttttcttcttccaaaatctttaattttgtgaaaccgaagagataagacgtggagaaaagcagacgtctctgttgtttgtttttgattcatcgggttctaaggatttgtctgtttccaagacacaaactttggattctcttctcttcctgttcgtcttctcttgtcttgatccttttgttatcatcatcatctcttcatcgagagaagagagacgagattagggatttaagttaaggaggatgtattatcagttgaccaagtcttcttacagagactctttgaagattctggaggctgatattgagcacgccaatggactggctgctgagattccaatgggaaagagcggtgtgcgacttcagatgaaattggtgtgcagcaatttggctccattcttcatattcctgctacaatggatggatttctcatgtctgcttccaagatattttgatttcttccacatactcatatacaaggtacgtgctgatgggcggtggaatcgatctaggtacggaaggaaagctacgattagggagttttacggtgttatattaccatcacttgagcgacttcatatcaactttgctgacttaccggacgaaagcttgtggtatccgaatccaaaagccatcaccaagaagcagtatgacattgaaggtagcagatacatgaatagcattgacttggaaagagaagacgaatgcgggatttgcttagagccttgcaccaaaatggtgttgccaaactgttgtcatgccatgtgcatcaaatgttaccgtaactggaacacaaagtcggagtcatgcccgttttgtcgtggcagcatcaagagagtgaactcagaggatctgtgggtgctaacttgcgatgaagatgtggtggatccagagacggtcaccaaagaggatcttcttcggttctacctccacatcaatagccttcctaaggattatccagaagcggccttcttagtctacaacgagtacttgatatgattttatcccgaaacataaatacgggtgtacagagggagagagtgatcccagacctttgattaagtgtacataagaatctggtgatccattaatgttccttcgttttagattatgatttatgaagattgtcataatcttaatgtgtaccccttttattatcaaagatcaaatgagaaagatgatcttcgaaaaaaaaaaaaaaaa

SEQ ID NO: 147 - DNA, 1494 bp, Arabidopsis thaliana
  Clone ID: ARATH-23APR03-CLUSTER12252_1
aaagtaaacgtttctctctctctctcaacgtcaaacgtgtcccctttcaaatctccatcttccatgcgcttccgatcattcttcttctcctcctctatcttctccctttcacattctcgctctccttctctttcttcctctcgtttctcctctctctccgccgctatgtctcctgctctcgagaaatcccgacaaggcaatggtggatgtaatgatgattcgaaatctaaggtcacggtcgttggtagtggcaattggggaagtgttgctgctaagctcattgcttctaatgccctcaagcttccttctttccatgatgaagtgaggatgtgggtgtttgaggaggttctaccaaatggtgagaagctcaatgatgttatcaacaagaccaatgaaaatgtcaagtacctccctgggattaagctaggaagaaatgttgttgcggatcctgaccttgaaaatgcagtgaaggacgcgaacatgttggtttttgttacaccgcatcagtttatggatggtatatgcaagaagttagatggaaagatcacaggagatgttgaggctatatctcttgttaaaggaatggaagtgaagaaggaaggtccttgtatgatctcaagtctcatttccaagcaacttggtatcaattgttgtgttcttatgggcgcaaacattgcaaacgagatagctgtggagaagtttagtgaagcaacggttggatatagagggagtagagaaatagcggacacatgggttcagttgtttagtactccgtattttatggtcacaccggtccatgatgtggaaggagtagagttatgtgggactttgaagaatgtagttgctattgcagcgggtttcgtggacggtttggaaatgggtaataacacaaaggctgcaatcatgaggattggtctaagagagatgaaagcactctcaaagcttttgtttccatctgttaaagatagtactttcttcgagagctgcggtgtagcagatgtcattacaacttgcttaggaggaagaaaccggagagttgcggaagcatttgcaaaaagcagaggaaaaaggtcttttgatgagcttgaagcagagatgctacaagggcaaaagctacagggggtatcgacggcaagagaggtctacgaggtgttgaaacattgtggatggttggagatgtttccgctcttttcaacggttcaccaaatctgcactggtcgtcttcaacctgaagccatcgtccaataccgcgagaacaaactataactttttattgatggtacattcatcttcaaagattgatgaatttgatgtagaggttaacgtttttgtgtgcgcctgtttgctggttagtgaaccttgtagcttgcttggaccgagttttcaaatggacttaaatttaaaatggattttgtaaaacaatggccttcttggacaaagtttgcgaatttataaaattaagcccaatataactaaaaaaaaaaaaaaaaaaaa

SEQ ID NO: 148 - DNA, 2859 bp, Arabidopsis thaliana
  unsure (1)..(2859): unsure at all n locations
  Clone ID: ARATH-23APR03-CLUSTER122594_1
gaaaaaccctcatttgcggagaaaaatcacagagaaaagtagcgaagtttgagagaaattgaatctgcagattctctcacgcattttcccagaaactgtttatcttcactacctgattcgtccttcagaagtgtgaattgaacgaattcacgatgaatcgtttgggtcataaatccgtggtttatcacggagatttacgtttgggggaacttgatgtgaaccatgtatcttcaagtcatgaatttcgattcccgaacgatgagattcgaatccaccatctatctccggctggtgagagatgtcctccgctcgcgattcttcagacgattgcttcttttgccgttcgatgcaagcttgagtcatcggctccggtgaaatctcaagagttaatgcatctacacgcagtctgtttccatgaattgaagactgcagtggttatgctcggagatgaggagattcatttagtggcgatgccgagtaaggagaagaagttcccgtgtttttggtgtttttcggttccttcaggtctttatgattcgtgcttaaggatgcttaatactcggtgtttgtctattgtgtttgatttggatgagactttgattgttgcaaatactatgaagtcatttgaggatagaatcgaggctcttaaatcttggatttcacgtgagatggatcctgtgaggattaatgggatgtcagcagaacttaaaaggtatatggatgatagngatgctgctgaagcagtatattgataatgactatgcttttgataacggagttttgttaaaggctcaacctgaggaagtccgcccaacttctgatggacaagagaaagtttgtagacccgtgattagattgccggagaagaatactgtgcttactcggattaacccagagatccgtgacactagtgtgcttgtaaaactgagaccagcatgggaggagttaagaagttatttgacagccaaaactaggaaacgttttgaagtttacgtttgtaccatggctgaaagggattatgctctggaaatgtggagactgcttgatccggaagcacacttgataagtctcaaggagcttcgagatcgtatcgtctgcgtaaaaccagacgccaagaaatcgttgttaagtgtcttcaatggtggcatttgccacccgaaaatggcaatggtcattgatgaccgtatgaaggtttgggaggacaaggatcaaccacgggttcatgttgtttctgcatatcttccttattatgctccacaagcagaggcatgtgcccttgtcgttccacatctctgcgtagcaagaaatgttgcatgcaatgtcagaggttactttttcaaggaatttgatgagagtttaatgagtagtatatctttggtttactatgaagatgatgtggaaaatttacctccatcaccggatgtgagcaactacgtcgttatagaggatcctggctttgcttcaaatggaaacataaatgctcctccaattaacgaaggaatgtgtgggggtgaagtggaacgaagactaaaccaagcggctgcagctgatcattctactcttcctgcaacaagtaacgctgagcagaaacctgaaacccctaagccgcagatagcagttataccaaataatgcaagcacggcaactgcagcagcactgttaccttctcataaacctagtttgcttggagctcctaggcgggatggcttcactttttctgatggtggaagaccccttatgatgaggcctggtgtagatataaggaaccaaaactttaatcaaccccccattctggctaaaattcctatgcagccaccttcctcgtctatgcattctccgggtggttggttggtagatgatgagaatagaccttcttttcctggtcggccttcaggactttatccaagtcaatttcctcatggaacaccaggttctgctcctgttggtccatttgcacatccatcccacttgaggagtgaagaggtagccatggatgatgacctgaaaaggcaaaatccttcacgtcaaacaacagaaggtggaatatcccagaatcatttggtgtcaaatggtagagaacatcatacagatggtggaaagagtaatggcgggcaatctcatttatttgtgagtgcactgcaagaaattggaagaagatgtggttcaaaggtggagtttaggactgtgataagtgcttacatagagttacagttttcagttgaggtgttgttcacgggtgagaagataggcattgggatggcaaaaactaagaaagatgcacatcaacaagcggctgagaatgctcttcgaagtttggctgaaaagtatgttgcacatgtggcacctctagctagagaaacagagaaaggtccggaaaatgataatggatttttgtgggaaagcagtgaagatgtatcaaacaaaggacttgaagaggaagcgcctaaagaaaacatttcagagttgtgagttttgcagaaatgcaaaatttaggtcgaaagagagatgtgattgtggggaagaagacatacggtatatattcattaccaatgtgagaaaataagcaaagatcaaaaaaggtaacaaagtgtcccaaataagagactttttgatgaaaagatggcctattcctcagggagctagtctcatgactcttgctgttttggtttctagagttttgagaaagtgagtatgaaaccttgcacccaaggctccacctcaattaggctttgtcttgtgtatagtgattgtatatttgtagtctaagttgatagttttttttaaaaaaaaaaaaaaagggcggccgcatgtggattagttagaagggatttatgtagtttttgattaagaaccctttag

SEQ ID NO: 149 - DNA, 796 bp, Arabidopsis thaliana
  Clone ID: ARATH-23APR03-CLUSTER1227_1
aacatactttttacaatcacagaagtaacatactttttacaatcacatttttgaagaactttcattccataaatctacagatctttgtgtatcaagtaaagagatgtcaggaagaggaaagggaggaaaaggattgggaaagggaggagcgaagaggcacagtaaaattcaatggatcatctctccaaatctccttaaaatcacagatctttgggtatcaagtaaaactgtgaagtgatgtcgggaagaggaaagggaggaaaaggattgggaaagggaggagcgaagaggcacaggaaggttctgagggataacattcaaggaatcaccaagcctgccattcgtcgtcttgctcgtagaggtggtgtcaagcgtatcagtggtctcatctacgaagagaccagaggtgtcctcaagatcttcctcgagaatgtcatccgtgacgccgttacttacactgagcacgctagaaggaagacggtgaccgccatggatgttgtctacgctttgaagaggcaaggtcgtactctctacggtttcggaggttaatccgatttgggggattagggtttatgcaagtttggggatttcttcttgtttctgagatctgtgttaaatggtttgaattagtctaaagtaaatctaggagtgttagctactgcttttgttttctattgtgatgtcgttgttagccaatgcggtgtagttgaaaatctttgcaaacttaaagctaagaaaatctaatgaggatgaacaatttactcaaaaaaaaaaaaaaaaaaaaaagggcggccgc

SEQ ID NO: 150 - DNA, 2929 bp, Arabidopsis thaliana
  Clone ID: ARATH-23APR03-CLUSTER12350_1
gactgccaaactccaaacaaaagtaaaaatgttcgtagcatctccggtaaagacgaacttcaacggcgtcagcctagttaaatctccggcgttttccgctctttcatgtcgtaaacaacaccgagttcctatatccagacaggttcgagctgtgatcagccgtgaagaaaaagcggtggatcaagaagacggcaaaaaaagtacaaacaaaccactaataaactcttctcaatttccatggcaaagatctaagtatacgggatcgaagactgttactgcggttgtgaaaatcaggaagaagatcaaagagaagctaacagagagatttgagcatcaattagagcttttcatgaaagctattggtcaagggatgttgattcagcttgtcagtgaagaaatcgatcctgaaactggtaaaggcagaaagagtttagaatctcctgtgatgggactcccaaaggctgtgaaagatccgagatacctcgtattcacagccgatttcactgtcccgattaactttggtaaacctggtgccattcttgtcaccaatcttctttccactgagatttgcttgtcagaaattatcatcgaagattccactgacaccattctcttccctgcaaacacttggattcactctaagaatgataatcctcaagccaggattatctttagaagtcaaccatgcctaccttccgagactccggatgggattaaagaactacgggaaaaggacttggtcagtgtccgtggtgacggaaaaggcgagagaaaacctcatgagagaatttatgactacgatgtttacaacgatttgggagatccacgtaaaacagaacgagttaggccagttctaggtgttccagagacgccttacccaagacgctgcaggaccggccggcctctcgtttcaaaagatccaccgtgtgagagcagaggaaaggagaaggaagaattttatgttccaagagatgaagttttcgaggaaatcaagagagataccttcagagcagggagatttaaggctctcttccacaatcttgtaccatctattgcagcagcattgtcaaacttagacattcccttcacatgcttctcggatatcgataatttatataaaagcaacattgtcttgggacatactgagccaaaagacactggccttggcggctttatcggcggtttcatgaatgggatcctcaacgttactgaaacactgctaaaatatgacactccagccgttataaaatgggacagatttgcgtggctgcgagataatgaattcggacgtcaagctcttgctggtgtcaaccctgtgaacattgagctactaaaggagctgccaattcgaagcaatcttgacccggctctatatggacctcaagaatctgttctcacagaagaaatcatagctcgagaagttgaacattatggaactactatagaaaaggcgcttgaggagaagagattgtttcttgtggattaccatgacatactcttgccatttgtagagaagataaactctatcaaagaagatccaaggaagacatatgcttcaagaacaatcttcttctattcaaagaatggagccctgcggccattggccatagagctctcgctgcctcctacagccgaatccgagaacaagtttgtttatactcatggacatgacgctactactcactggatttggaaactagccaaagctcatgtctgctcaaatgatgctggtgttcaccaacttgtgaaccactggctaaggactcatgcttccatggagccttacatcattgctactaacagacagttgagtacaatgcatccggtttacaagctacttcatcctcatatgcgctacacgcttgaaatcaatgctcgtgcgcgtaaaagcttaatcaacggaggaggaatcatcgaaagttgcttcactcccggaaaatacgcaatggaacttagctctgcagcgtacaagagcatgtggcgatttgacatggaaggacttcctgctgatcttgttcggaggggaatggcagaagaggattcatcagccgaatgtggcgtgaggcttgtgattgacgattatccatatgcagcagacggtcttttgatctggaaagccatcaaggacctagtggaatcttatgttaaacacttttactctgattccaagtccataacatctgaccttgagctgcaagcttggtgggatgagatcaagaacaaaggtcattacgacaagaaagacgagccttggtggcctaaactcaacacaacacaagacttgtcccaaatactaaccaacatgatatggatcgcctcgggtcaacacgcagccataaacttcggacagtacccgtttggagggtatgtcccaaaccgacctaccctgttgaggaaacttataccgcaagaaactgatccggactacgaaatgttcatgcgaaaccctcaatacagctttctaggctctctaccgacacagctccaagcaaccaaagtgatggcggtccaagaaacgctctcaacgcattcccctgacgaagagtacttgatcgagctgagagaagtgcaaagacattggttccaagatgaacaagtggttaagtattttaacaagttctcggaagaacttgtgaagatagagaagacgatcaacgagagaaacaaggacaagaaactaaagaacagaacaggtgctgggatgcctccttatgaactacttctccctacttcaccacatggagtcactggccgtggtattcccaacagcatttccatttagatgtatgcacaacagatttgtatcattattatgtcttatatgctggtagagtctctaatatgaggttacttcttttttttttccaatgtatcaatgataatattatgcacaagaaggtttaataatctctcactgaggttgacggcc

SEQ ID NO: 151 - DNA, 1030 bp, Arabidopsis thaliana
  Clone ID: ARATH-23APR03-CLUSTER12362_1
gtggttagttctcactaatatcaactaaactttgtattcatttccaagtatcactctaaatcatctttttcgaattcgcctcccaagatatgtcgacagagtcgtacgaagacgccattaaaagactcggagagcttctcagtaagaaatcggatctcgggaacgtggcagccgcaaagatcaagaagttaacggatgagttagaggaacttgattccaacaagttagatgccgtagaacgaatcaaatccggatttctccatttcaagactaataattatgagaagaatcctactttgtacaattcacttgccaagagccagacccccaagtttttggtgtttgcttgtgcggattcacgagttagtccatctcacatcttgaatttccaacttggggaagccttcatcgttagaaacattgcaaacatggtgccaccttatgacaagacaaagcactctaatgttggtgcggcccttgaatatccaattacagtcctcaacgtggagaacattcttgttattggacacagctgttgtggtggaataaagggactcatggccattgaagataatacagctcccactaagaccgagttcatagaaaactggatccagatctgtgcaccggccaagaacaggatcaagcaggattgtaaagacctaagctttgaagatcagtgcaccaactgtgagaaggaagccgtgaacgtgtccttggggaatcttttgtcttacccattcgtgagagaaagagtggtgaagaacaagcttgccataagaggagctcactatgatttcgtaaaaggaacgtttgatctttgggaacttgacttcaagactacccctgcctttgccttgtcttaaaagattcctcctactcaaatattttctctatgttgtttctaattatgttcttataatcttcttctgttgcttctgtaatgtcatctttgctacttctattccaatagaaatgaataaagctttaaagagccaaaaataatatcaaagaaagagttttacacacc

SEQ ID NO: 152 - DNA, 1439 bp, Arabidopsis thaliana
  Clone ID: ARATH-23APR03-CLUSTER12375_1
ggtcgccaagcttaaccattagatccatttcagagctaagcgtactaattagtgtactaagggtagtgtgactcattaccacctaaagtagtttcaattttcttctatttttcttggcaaagagttatagtgggaaacaaagggagtggttaataaagaattaattagttaattaagggagttcaagatcataatggtgaggcctccttgttgtgacaaaggaggagtgaagaaagggccatggactcctgaagaagatatcattttagtcacttacatccaagaacatggtcctggtaattggagagctgttcctaccaatactgggctgcttagatgcagcaagagttgtagacttagatggacaaactatttaaggccaggaatcaaaagaggcaatttcacagaacatgaagaaaagatgattgttcatctccaagccctcttaggaaatagatgggctgcaattgcgtcatatcttccacaaaggacagacaatgacattaagaactattggaacactcatttgaagaagaaactcaacaaagtcaatcaagattctcatcaagaacttgaccgttcctcgctctcatcttcaccatcgtcttcttctgctaattccaactcaaacatctcaagaggccaatgggaaaggcgacttcaaaccgatatccacttggcgaaaaaggctctctctgaggctttatctcctgccgttgcaccaatcattacatctacagtgacaacaacgtcttcctctgctgaatcaagacgctctacttcctcagctagcgggtttcttaggacgcaagaaacatctacaacttatgcctcaagcaccgaaaatatcgcgaaattgctcaaagggtgggtgaaaaactcgccgaagactcaaaactccgcggatcaaatcgcttctacagaggtaaaagaagtgatcaagagtgatgatgggaaggagtgtgcaggggcatttcagtcattttctgagtttgatcactcatatcaacaggctggtgtttcacctgatcatgagaccaaaccagacataactggatgctgcagtaaccaaagtcaatggtctttgtttgagaagtggttgtttgaggattctggtggacagattggtgatattctattggatgaaaacactaatttcttctgaagagtttgctttaatcacatggttctaattttaggatcctcatctctatttttttttttgggttttccaaattaactcgcttagattatcgtgagataaatcagtaataattttatttattttccctctttaatttacaattaatgatggggttgcttttaaaatggccctgtgaattctgaaggggcctgaaaaatgtccacccaatgattttagtagtattggtgtaaaatcctatatctattttttatttattaaaatgttgttattgctt

SEQ ID NO: 153 - DNA, 1891 bp, Arabidopsis thaliana
  Clone ID: ARATH-23APR03-CLUSTER123780_1
gctcactagtcccccccccccccaaaatcaagaaactctcaaaacccatttcaaaagagaaacacttctttaaaaagtttttagtaataaataatgggaaagctcttggtgttaatgttagttggggtgttcttggcttttgaaagcttggaagctcttgaatatggagatgcacttaacaagtcaatcttgttctttgaaggccaacgatccggtaaactcccgactaaccaacgagttaaatggcgagccgattctgcaatctctgatggttcactagctaatgtgaatttaattggaggatattacgatgctggtgacaatgtaaaatttgtgtggccaatgtcatttaccacaaccttgttaagttgggctgcaattgaataccaaaatgagatttcttccgttaaccagctcggttatctccggtctactatcaaatggggaaccgatttcatcctacgcgctcatacatctcccaacatgttatatacccaggtgggagatggtaattcagatcatagttgttgggagaggccagaagatatggacacatcaagaactctctacagtatctcttcctcttcccctggttccgaagccgcgggtgaagccgcagccgctcttgcagcggcctcacttgttttcaaatcggtcgattctacttattcatccacactactaaaccacgcaaaaaccctatttgaatttgctgataagtatagaggttcttatcaagcatcttgccccttctacagctcctactctggctacaaggatgaattattatgggctgcggcttggctatacaaagcaacaggagataaaagttacataaattatgttataagcaataaagattggagccaagccgttaatgaattcagttgggacaacaaattcgtcggcgctcaagctttactcgtatcggagttttacaacggggcaaatgacttggcaaaatttaagaccgatgttgaatccttcgtctgtgcaatgatgtcaggaagtagctctcaacaaattaaacaaactcctggtggccttttgtttattagagacagtagcaacttacaatatgtaacaacggctacaactgttttgttccattactcaaaaactcttaccaaagtcggggttggttcaatccagtgcggttcgaccaagttcaccgtatctcaaattcgaaatttcgctaaatcacaggttgattatatccttggaaataatccaatgaaaatgtcttacatggtcggatttgggacaaagtatccaacacaacctcatcatagaggctcatctttaccatcgatccaatctaaaccggagaaaattgactgtaatggaggatattcatactacaattctgatacaccaaacccgaatgtgcatattggtgcaattgtgggcggaccgaattcatccgatcagtatagcgacaaaaaatcagattactctcatgctgagcccacaacttacatcaacgccgcctttattggacctgttgcagctctaatcagttcttccggataaactcacgtttagattggttgtggggaaacaaatattagcaaagaagaatcattactcatcaacaaactattatgactacaaacttaaataattagtcaggggatgtatcgtttgctttaaacatatatctctatatagatgtatatacctacacacatacacacactcacatatatatcattgaatcgtatatcttagctaaaatgaaaactatttaattacagatgtctatataggttttcttatatcattgtattgtatagattttttatgatacattatatatagttcattcttatttactacaaaaaaaaaaaaaaaaaaactcgagggggggcccggtacacgtacgcgcgcg

SEQ ID NO: 154 - DNA, 2037 bp, Arabidopsis thaliana
  Clone ID: ARATH-23APR03-CLUSTER12408_1
agctcaagtgctctgtttttgtttgtttggtaaaaccctaaaagctttcgagccgactcttcaatggaggcgctagcgggaattgaagcagacatcgaatcgtatttcggagagcaggatcaacagaaatcgtcaccggacggctgcaaacaggtcccgtggctgagctgggaagagtgggactctgtgagagagtctctcttctcttcttctccggatagaatcgcttctgcattggaaagggttgcaacatggcgaagtagaggatctcttccagcgcctgtggatgttacttgttcccttattgaaattcaactcaaagatggctttattccgagggagaaacaatcagcagatgcattgtattcagagcatttactgcagatgctatattgcatgggaatactcaggcttgtgaactgtgtcatagaaaagacaaggaggagagaagacgtttcaattgcggatgctgctagagcaatcggtatcccacgtaaattaatcgatcttcgtcatgagggttctcaccgtgagctccctgcactctcggtgcttcgggatgctgcagatgaggctcttgaatggttgaaatcgtattattgggagcaacaaaagtatcaaatccccttaaagagagatggaacagctagcatcagaagagaagtcaaatccaaactcaggaaacttgctttctccttgcagctgaagcgtaatcctcaatttgactcccctttggtcaaagaaaaatgttctaataaaaggataaggaagattgtaagcagccttgttgagttatacccttctttctccgcagaaatttcatctgtgctccttgaattcttactcaaggccttggattcttcaaagtcgacagatcttcagaataaggctgggcaagatttcagggtctttctagatgaatggaaacctgtaataatggaactctcaaatagagaacctgagttacttttgactctactcaaggaagtccttgatatgatccaaaataatgaacggagaagacatgaaaccgaaaagccagtggaagaggtttctcaagttgagcaggtccctttcttgtttgcatggcttgtgagtcttctcaatggatcaaagcattttcagagaaacagttctctagaagtgaaacctccaagcattttccttatggaacttatacgtagatgtcttgtcttgggagccttaggatatgagctggttttgaaatcagcatttctactcgcagagattgtgggaggccgtgtcttaaaggagaagctcataaaacttcctcttatgcataaaagctctgcaattgttccattgaaacagagttctactcttgtaacagctagtacaacgctccttgagcaagagaagaatctcggtaatgcaggcaagagacttgagttcgtcaaacttcaactctcaaagaagaaaggtattgacacagacaaaaccggtaacagatggagaaaggcaaaaacaaggagcccttgtccaattggtatgttgcctcggatcattggatcttctggacgtttacctcttcttgacaatcagaatgctaagagcatctcaaaacaagcacaaggtaacaacaatgcgaagagaggagctgagtgtaatagaaatcaattggagaaatcgccatgcaagcgagcaaggaagagtgcaggagattctgaatcaaatgatgtgacattggaatcatacgaggaagaagctgagatggaaatagaacatgcatatgaggaaactgaaactgtagcagaagagaatctgatgtggaatgatgaagaggaaagtagaagctgccttatgatagatggtgaatggaaaagagtaaatgatggagaactctcggggatggcttctagtgttacaatttgtgtttgagatttcgacagatgtaatcatataatccgacatatttttgagaaaatagttcagatatttgatcaatttttacaggcatagtcgcagacagatagacattgtgacactcaagtaaaagtaaataagtggatttgacaa

SEQ ID NO: 155 - DNA, 2322 bp, Arabidopsis thaliana
  unsure (1)..(2322): unsure at all n locations
  Clone ID: ARATH-23APR03-CLUSTER12409_1
attcttttgagctaccgattttgccgttttcgtgcagtaatttcgagaaagcgtggaccatttctggattccaaagctgaagaagatccaaacattgtgaagatagaatccgtttactaatgttagaagcatcgaagaatgaaaatgtgctgcaagtgaaggaatgaaagtgcgttgtagttcttcgtatcacgactttggcgtgcatagactgtagatagatatcagataacaacctgtagtggaaatatgagaagacctagtcaaatgatgaggcttctattaacatcctttttcggtgttattgttggtttccttatgggtattacttttccaaccttgactttaactaagatgaatcttccatccacattgtttccctcgattgatcttgcatacattgaggataaatactctgacatatcaagacaaagactatttggttcttggtcttcgacaaaaggcctcaaactcaagaatgacatccctgaccctccatataactataatgacactaagatatgggtttcgactaacccccgtggtgctgagaggctaccaccagatatagtcacgcctgaatcagatttttacctccgtcgactgtggggcgaccctaatgaggatttaacagtcaagcagcggtatctagtaacatttacggttggctatgatcagaggaaaaatatagacactgtgttgaagaagttctcagataacttctctataatgctgtttcactacgatggccgggcagcgaatgggaagagtttgaatggtccaagcgagccattcatgtgagcattcggaaacaaacaaaatggtggtacgctaagcgatttcttcatcctgacatagttgccccctatgaatatatcttcatatgggatgaggatcttggcgtggaacactttgattcggaaaaatatctggcggtggtgaagaagcatggtttggaaatctcacagcctggattagagccatatgaagggctcacatgggagatgaccaagaaaagagacgacactgaagtccacaagcatgctgaggaaaggaatgggtggtgcactgatcccaatttacccccttgtgcagcgtttgtggagattatggctcctgttttctcccgcaaggcatggcgctgtgtgtcgcatatgattcagaacgatttgattcatggatggggtctggactttgccgttcggaaatgtgttcagaacgcacacgagaaaattggagttgtagatgctcaatggattatacatcaaggtgttccatcattagggaattaaggacaaccagagcaagggaaacaaccatgggaaggggtgagagaacgatgcaggagagagtggacaatgtttcaagacagattggatgatgctgaaaaagcttattttgaagcatctgctcacaagaatgcttcttcacggcctcacgggtaataaggaaacatatagtctctccctccgacttccactctctttgtttaccctgttaattttgttcccggagctgtgctttgatttcgtgtttatggaagagaatagtctggtcgagagaagataaattgttagcagctaagcacattcattaacatctgattagtctttcttttttcttttcttttcttaactctgttaactcttattgttgatgagaactccggtggagagtagagttagaggtagacaacaataaaaaaagggagattaactgtgatgggtaagaaattaggtgttattaccagaacacgacagaactttttttaattactgttatatttcgagttttttttaaaaaaaaaaaaaaaagccactgccacgtcagaatttgctgatgtggattaaatgaactcagccggctgagttacggtatgttgcggctgacttacgtcaaaaatatatgagtcataacaaaacggcgaagtatgagtataactcagccagacgttacggctgagttgaaaaatgttgcctgagttatagtataactcaggcaacggtatggttgagttaaggatgttcggccgagttataagaagttatacgataacccagccaccaatatggctgagttatgagaaaaaggctgacttatttcctcgacgcggccgagttatagttttgattggcttagttatggaaaaatgtgacggctgagttatggtcgagtgatataaatcagccgctaatagctggattccgatataactcagccataacatggctgacttatttttaaaagattaattactataatatcatgcagttatggccgagttgttgaacgttacggttgagttagttgagttncgccatt

SEQ ID NO: 156 - DNA, 1638 bp, Arabidopsis thaliana
  Clone ID: ARATH-23APR03-CLUSTER12440_1
gttaaaatcagaaaccttggttttggatatagccagccatggtgatcttatctctcgtctcttgttccttctccgttttctcaccgccgattagtctccggcttcatctcccgccggtaacttctctctgctcccatggaaccttccctgcttcttctacatttcggtctcagctacaaccattgcttatcagctgcttaaatcatcgagaacctgctttaactttccgatgtagctgccttagctctccgattgaatccggaagtcaaattgaatctctgttttcgttattccgagatattgggtttatagaagaagaaactgagatgattttagcgaagaacccagatataaagtcgacatctttggataaaatcggtgctcgtgttgcttctcttcagtctctgaaaatcaatggcttcccgcttcagggtttgatagctaagtgccctaatttattgacttcagaagaatttgatctcgttattagtttcttagttgatgaacttgaaggaaggcttgatcctgaattagttgagcgcttactctctgtggtagacacatctatcttgcttagttttaatcagaaggtgagattgcttctcctccatgggatacctaaagaaaagatctctcatgtattgaacaaagtgtacctaaataaattgctgtatcagaaatcagttgaagatattgagagattgattagtttcttggaaccttttggtggaattggtataattgctaggcggccagtgattctcaatagtgacttggatagtcagttgattcctagggttgatttcattaggaatctaagcggggaagacgatttcgctactggaacggtgctacgtagacttcctgccatattgagttatagtgttgagcatatgaacggccaagtagagtttctcaagtcttttgctggcttgacgagtgagcaagtgtttaagattgttcatgtgttccctaatgttatcagcactagtaaagagaggaaactgcgcccgaggatagagtttctgaaggaatgcggctttgattcccccggcatgttcaaattcttgagtaaagcaccattgattttagctctatccgaaaataatctctcgcacaaactcggttttctggtgaagattggatataagcatagaacaaaggaactggcctttgcgatgggagctgtgaccagaacaagctctgacaatatgcagagggttattggactgtacttgagttatggtctttcattcgaagacattctagcaatgagcacaaaacatcctcaagtcctgcagtataattatacttctttagaggaaaaactggagtatttgatcgagtacatgggtcgtgaagtcgaagaacttcttgcattccctgcatttcttggatacaagcttgatagcaggatcaagcatcggtatgaagaaaagttgaagagcagaggtgagaacatgtctcttaacaagcttttgacagtatcagctgaaagattctctaaggcggctgataatatcgaaatgatttgtttatgaccaagtttgagttcattgagaacttacatcaatagtttttatcacaaaaaaaaaaaaaaaaatcaaaaaaaaaaaaaaaccgaggggccggccaact

SEQ ID NO: 157 - DNA, 2760 bp, Arabidopsis thaliana
  Clone ID: ARATH-23APR03-CLUSTER12466_1
atttaattatctcaggatacgttaacataaaagtttttttttctcttggtctcaatgctcactttatccccatgaagttttgctcatactcaagttatcttgcagagaaatagaagaatgggtatggttttatttgctggcttgcttttactactcatattcccaacttgtggctatgcagctataaacacatcaagtcctttgtcaataagacaaactctgagttctcctggtggattttatgagttaggcttcttcagtcctaataatactcagaatcagtatgtcgggatctggttcaagaagattgttcctcgtgtagttgtgtgggtggctaacagagatacgccagttactagctctgcagcagctctcactatcagcagcaatgggagcctgatcttgcttgatgggaaacaagatgttatttggtcaacagcaggaaaagctttctcctccaacaagtgtcatgagctcctctttaacacgaattttgttgtaattgatgatgtttcagggaataaattatggcaaagcttcgagcatcttggtaatactatgctgcctcagtcatcattgatgtatgatacttctaatggcaagaagcgtgtgttgactacatggaaaagtaacagcgatccttcgcctggggagttctcactggagattacaccacaaatccccacacaaggccttataagaagaggctcagtaccttactggagatgtggtccttgggcaaaaacaagattctctgggatatctggaattgatgcatcatatgtaagtccattcagcgttgtccaggatacagcagccggcacaggatctttctcttattccacattaagaaactataatctctcatatgttacgctaacaccagaagggaaaatgaagatcctctgggatgatggaaataattggaagcttcacttgtctctcccagagaacccatgtgatctatatggtagatgcgggccttatggtttgtgtgtgagatctgatcccccaaagtgtgaatgcttgaaagggtttgtaccaaagtctgatgaggagtggggaaaaggaaactggacaagtgggtgtgtgagacgtacaaaattatcttgccaagcaaaatcttctatgaaaacacaaggcaaagacacagacatcttctatcgtatgacagatgtaaagactccggatctgcaccaatttgcaagctttctcaatgccgaacagtgctatcaaggttgtctaggcaactgttcttgcacagccttcgcctatattagtggaattggatgtttggtatggaatggggagctagcagacaccgttcaatttttgtctagcggagagtttctcttcattcgtcttgcaagttcagaattggctggaagcagtcgaaggaagattatcgtaggcactactgtcagcctttccattttcttgatcttggtatttgctgcaattatgttgtggagatacagagcgaaacaaaatgatgcatggaagaatggttttgaacgacaagatgtctccggcgtcaatttctttgagatgcatacaatacgaactgccaccaataacttcagtccttcaaataaacttggtcaaggtggatttggtccagtttacaagggaaagttggtagatgggaaggaaataggtgttaaacgccttgctagtagttccggtcagggtacagaggagttcatgaatgaaataacactgatctcaaaattgcaacacagaaacttggttcggcttttgggatactgcatcgacggagaagagaagctactgatctatgagttcatggtgaacaaaagtctcgatatttttatatttgatccatgtctaaagtttgagcttgattggccaaagagatttaatatcattcaaggtattgcgcgtggacttctctatctccaccgtgactcacgcctcagagttattcaccgagacctgaaggtcagcaatattcttctggacgacagaatgaatccaaaaatatcagattttggattggctcggatgttccagggaacccaatatcaagacaacactcgcagagttgtaggaactctaggatatatgtctcccgagtatgcatgggcaggattgttctctgagaagtctgatatctatagcttcggagttctgatgttagaaatcatcagcggaaagagaatttcacggttcatctatggtgatgaaagcaaaggccttcttgcttatacatgggattcttggtgcgagaccgggggatcaaatctacttgacagagatcttactgatacatgccaagcattcgaagttgcgagatgtgttcagattggtctgctctgtgttcaacacgaagccgtcgacagacccaacactcttcaagtactatccatgcttacttcagcaacagatcttccagtaccaaaacagccaatatttgcagtgcatactctaaacgatatgccaatgttacaggctaattctcaagatttcttatctgtaaatgagatgacagaatctatgatccaaggaaggtaagcctaaggatcttgttatctcactacagaagtagtagtatatacttgtaaattcatgaacatttaaagcttaagattttgatatctcactctattttctttctaagcatgtgatctcataaagccccaatatgtcgttgacacgtcataatattgggtataatattgttattaaccgtcgcaaagataaagtatgctttttgatgaccaaaaaaaaaaaaaaaaa

SEQ ID NO: 158 - DNA, 1102 bp, Arabidopsis thaliana
  Clone ID: ARATH-23APR03-CLUSTER124753_1
aagattatataagattcgggttttagcccttttaagtcgacgttaaacgcgcgtttcagagttttccggcagaggagcaaactcgacgacattagcttctccgaacacaattttcctccggctttcataaatttcggggttacatcgtcctaattcgtctgataggttgccgaatttgtgttctccggtcaagtcaatgtcaggaatcacatatcaactattgttcctcctccttctcgcctctgtctccttgtcgccggtcaggtgtttaggttatggagcaagtagtgaagagagaacattggctatgataaagccagatggagtctctggtaactatactgaagaaatcaaaacgatcgtcgttgaggctggtttcaatatcgtcaaggagatgcttactcagctggacaaggagacagcttctgcgttttacgaggagcactcatcgaggagctttttttctcatcttgttacatacgcgtccggtggtccggtgttggtgatggtattggagaagcgaaatgcagtttctgattggcgtgatttaatcggtccaacagatgcggaaaaggctaagatatctcaccctcacaggttcgatttgttgccaaacacaattcttgactttgcaaactcaaatgtgagggctaagatgaatatagtcgtaagctgtattacttgaaatcgttctctgacttgttatgaatcattaggttgttctttgatcctatttacttataatatggccttctcttgtttctgtagcatcagagcattatgtggtaagaactcacagaagaactgtgtgcacggctcggattcaacatcgtcagctgaaagagagataaagtttttcttcaaggatgtagtttcaggtgacattgctacacaacaacatgacgaactataagaaacaccaatacagcttctttatccatggtgtcttgttgtaatcttgtaactgttggttttatcttatctataatcaattaatcagatacattgtttcatatagcttgatagtattgatttggatcgacctttttgtggtttgctactatgttaagactatcatatcacaaaaatttcaatcattgac

SEQ ID NO: 159 - DNA, 4972 bp, Arabidopsis thaliana
  Clone ID: ARATH-23APR03-CLUSTER12476_1
gaccgcgatagcattccttgttcctccttttctatttacctttctacttttgccatcatcttcgtcgatctacttcccccaaagtctaaccctaaagcccccaaatttctcctgatcaaaaccttgttgtataaatcctgaatctctgaagaaacttcgaagatttgggtttctcaatttggttgagaaattcgcgatgaatcgcaatttttcaccagctgcgatgccaccgatttcatcaatgacaatagataattcattctctcctcctccatcttccggcgacttacctgaaatcccagatgcttggtacggcaacattcagtatctgcttaatatctcggtcattggtctcttatgctgcgtctccatctttctcttcgttaagctacgcagcgaccaccgtcgtatgcctggtccttctgctctcttctctaagctcctcgccgtttggaaagccacgtgtcgcgagatcgctcgtcactgtggtgctgatgctgctcagtttcttttaattgaaggtggaagctttgtgcttcttttctccattgctgttttagctgtttcggttatgcttccgttgaatttatatgctgggactgctttgttgagtgatgagctttcgaaaacgatgattacgcatattcagaaaggttcagctttgctttggctgcattttgtgtttgttgttattgttgttgttatctcgcattttggaatcgctgctattgaagctaggttgaagtttactaggtttagagatgggaatgggaatatcagtgacccgaacgcgaattctactgctgtgtttactataatggtgcagggtttgcctaagaatttagggtctgatagagttgagtttgaagattgctttaggctgaagtaccctgggaaagtttataagtttattgttcccatggatttgtgtgctttggatgatcttgctacagagttggttcgtgttcgagatgagattacttggttagttgccaagatggactctaggcttctaccggatgagtatgagaatgttggagataacggactagtgttctgtgtgtgttctttgtgggttagggtgaaggttttgtggtctcagattacagagaggtttggatttacagatgatgaaaaactgaggaagctgcaagaactgagagctgatttggagtctcagttagcagcttataaagaaggacgagcacaaggcgctggggttgcttttgtgatgtttaaggatgtgtacacagctaataaggctgttcaggattttcgaaacgagagatcaaggcgtactggaaagttcttctctgtcacagagctgcgattacagagaaaccagtggaaagtggacagagcacccttggctactgatatttattggaatcatctgggattgacaaaagttgctcttattgtgcgaagagtgattgttaatactattctactgttgattcttgtgtttttcagctccccattggccttgatcagtgcattggtaagtgccgggagaatcttcaatgctgaagcattggatagtgctcagtattggctcacttgggtgcaaacttctggctggattggatctctgatttttcagttcctgcccaacgtcttcatatttgttagtatgtacattgtaatcccttctgcgctctcgtatctttccaagtttgagcggcatctaacagtgtctggggaacaaagagcagctctcttgaagatggtttgcttcttccttgtgaacctcatcattctcaaggctcttgtggagtcgtcactggaaagtgcactcctgaaaatgagccgttgctatttagatggtgaggattgcaagaggattgaagaatacatgagcccttccttcttatcaaggtcatgcgtttcagctctagcttttctcatcacaagcacgttcctaggaatctccttcgatctactcgctccaatcccgtggatcaagaagaaaattcaaaagttcaggaagaatgacatgcttcagcttgtccccgagcaaaatgaagagtacgctttggaaaatcaagagccaagcagtaaccttgagacaccacttctccctgaaaacatgtttgagtctccaagattcggggacatagaacctatgagccaagacctctctgaatacccaatcagccgaacctcaccaatccctaaacagaaattcgactttgcccaatactacgccttcaatctcaccatctttgccttaacaatgatatactcttcattcgctccactcgtggtccctgtaggcgcagtttactttggttacagatacattgtcgacaaatacaacttcctttacgtgtacagagtccgtggcttccctgcagggaatgaaggaaagctaatggacacggttttgtgtatcatgagattctgtgtcgacctgtacctcgtctcaatgctgctcttcttctcagttaaaggagattccacaaagcttcaagccatattcacacttggagtgcttgtgatgtacaagcttttgccttcggatacagaccggtatcacccagctttactaagaagtattcagaccgtcgatagcatcatcgacggacctgtggattacgaagcttattctcacccaaacttcgattgggacacttacaacaacagatgattctacgaccttttaagtcttacaaattttgctctttgaccaaatacaactggaatctatttgtatatctcttctttgtgtatattccatcttttgtgcaattattttttgttcacgggttaagtttgcaagatttatcagttgagtccctttaatcattaattttggggttgtaatagcttcattcttaaaatatggggtatgaaatcggaagaaagagaattataaaaatagtaggtgggacccagtgttctctgaagtgagtatatcagagttctcttttcaacacatggactgttacactcacctaacgacgacgaagaagaaccagcatagatctcttctcttcctctcaaactcactaagcttcattgttaccccaaataaaccctaattttgctctcactattcgaagatctaaaatcatctcgcattttgatttccgaatactttcctgagttttgctggtcatgatttctcatttgctctttgttttcccgagaaaaatcttcaggagagtaggataatctctcgagtttcgaaatcgtttccaatgtcgtgctgtttcttcaagactactctgttcttgatcccgattttgatgttactgagcttcgggagctgcaatggtcgaatcttcaccttcgagatgcaccatagattctccgacgaagtcaagcaatggtccgattccaccgggagatttgctaagtttccccctaaaggaagcttcgaatacttcaacgctctcgtcctccgtgattggctaatccgtggccgtcgtctctccgagtcggaatcggaatcggagtcgtcgcttactttctccgacggcaattccacttctcgtatcagctctctcggatttttgcattacacgacggtgaaattgggtactccgggaatgagattcatggtggcgcttgatacaggaagcgacctcttttgggtcccttgtgattgcggcaaatgcgcaccaaccgaaggagccacttatgcttctgagtttgaactcagcatttacaatcctaaagtttcaactacaaataagaaggtcacctgcaacaacagtctatgtgcacagcgtaatcagtgccttggaacattcagcacttgcccttatatggtgtcttatgtctctgctcagacttcgacatctggtattcttatggaagatgttatgcacttaacaacagaagataagaatccagagcgtgttgaggcatatgtcacatttggatgtggacaggttcaaagtggttcttttcttgacattgcagcaccaaatggtttatttggtcttggcatggaaaagatatcggttccaagtgttttggcgagggaaggtctggttgctgattctttctccatgtgtttcggtcatgatggagttggaaggatcagttttggggacaagggtagttctgatcaggaagagacaccgtttaatctcaatccttcacatccaaactacaacatcacggtgactcgggtacgtgtggggactactttaatagatgatgagttcacagctctctttgacaccggtacatcatttacttatttggttgatccaatgtatacgacagtctctgagagtttccattctcaggcccaagataagcgccattcaccggattcaaggattccatttgagtattgttatgacatgagcaatgacgcgaatgccagtttgataccgagtttaagcttaacaatgaaaggaaacagtcacttcaccatcaacgatcctataatcgtcatctctactgagggcgaacttgtatattgcctggccattgtcaaaagctctgaactcaacattattgggcgtaagatcagtttttcttcctatcaatcatggaacatccgctaaataatgacattgtttactcttaatgaaacagaaaactacatgaccgggtatcgtgtagtattcgacagggagaaactcgtcttagcttggaaaaagtttgactgttatgatatcgaagagacaaacacaactgttgccggaacaaacaaaacagcagcggtagctccagcaatggcagctggaataaagactcataacaattcctcagagctacacaaaacaaaccaaaccatctccaaaagtaactcctccccaaaccaaatatccaaaacagtagatgtatggtcttttttcagatttgtgttcatattatttccacttgtgtagatttgtaagccccatccaaaacacatgccaatagtattttttttgtatcataacgacactatagggattttttcaggaaatatatgctcttcatacgcaaaataaaaaaaaaaaaaaaa

SEQ ID NO: 160 - DNA, 2693 bp, Arabidopsis thaliana
  Clone ID: ARATH-23APR03-CLUSTER12480_1
gaaggttttaacggccggtgatcggaaattactcaaggtggagcttcggccaggggatacgacgtatgtttcgtggaagaagcttatgagggatgctggtaaggtcaatggtttatcggcttcggttcccgacccgccgaggaaataattaagagcgtcatttttggtatcccgcgcaactttttcttctcagtttcagtttctctacatcgattcatcgattccactctcttgattgctgtttagatcaatccgtctcgaacccaggggttagtatatagtggatcaaactgatccgacccgacccgacccgaattattaatgtcggaagttaatgagatgagtggtggttctattggcggcgaattgttgagagcgtcgccgaaggttttaacggccggtgatcggaaattactcaaggtggagcttcggccaggggatacgacgtatgtttcgtggaagaagcttatgagggatgctggtaaggtcaatggtttatcggcttcggttcccgacccgcctcctaatgctaaccctaaccttgagtttcgaattgcaccggggcatccagtagagattgaaacgaatgaacaacctcattctaaccgtttcaacgctgttattgagaagatagagaggctctataaggggaacgatagcagtgatggggaagagttagacggtgctcctgatgatgatgagtatgacactgaagattcatttatagatgatgctgaactggatgagtatttcgaagttgataattcaacagttaaacatgatggattttatgtaaatagaggcaagttggagcggatggaaccttcaacaacatctaaccagcaacccaaaaaacggcgacgaaaagattcagcaaaaccctgtcgtgatgcagttgacgtatccgataaacacaccaagttgtctataacagctaggaaaaaggatcaatcaactgctcctgggtcctggaaaacacaggagtcacctttgccttctggagcgcaagatgcaaatacttcagtacctctggatgatgtgaagcattctgatagagcaaatcatcagtctaggaatgatacaagtcacaagtcaagggaaactggatcctctagtgcccttcatcagaaatacagcaacaaaagcttacaccaacaatctacgtccctgctaggaaaatctccccccaatgtctttgcagaggtaacagtagtccgtcagaaagaaaacaatggtatgcatcagctggcaaatgtaacgggaagcagacaatctagtcaagcgtctaaaaaagatggttctaatgtgaagtctaaaacctcaatcctcgagaaagccataagggaactggagaaggtggttgtggaatcaaggcctcctgctatcactgaaaatcaagaagctgatacctcatcccaggcagtgaagagaagattgcccagggatgttaaattgaaacttgctaaagttgctaggattgcgcaggcaagccagggaaaacattcaacagagttaatcaaccgtcttatgagcattgttggtcacctaatccagcttaggtctcttaagaggaacttgaaaatcatgattgatatgggagattctgcaacccgagaaaaggatactaggttcaagcaaatcaacaatgaagttcttgatatgataaaggccaaagtttctttgatggaatcacaggcaatcaaaccagaaggtgcaacatcagacgattttcaggactcagtagaaaagccatctttgaagaagtttgtcatggatgcggcattggaggataaattgtgtgacctatatgacatatttatcgacggattggatgaagatcaaggtccacaaacaaaaaagctatatgtcaatttggctgaactctggccaaatagattgatggattatcgtgggatcaaacatgcaattttccgggcaaaggagagacgaaaagcattgtatggaaaccttgcgaaagagatggatcaaacaaagatgaagaagagtatgaagcagttggtaccaagaacagactgtactgctcagcccaacaccgaattagtggttcagagacaacacagtggggaaaaaaaattgattgttgatccaaatgcaaccagcacttccgtggtcactagtcaaactatggttgacagatcaaatcagcagcagcctgagaagctaaagggaatctcaagctcttgcaatcctacagaggaaacaagagtggtcaagagaaagaacgaggctgtaatggctgagaaacaagtcgttcttgccctgaagaagcccgaacatccacagacacgtgtaatcccagctcctcagaatctgaacatcccacgaacaaccccggacctgaacttgccaagttgacatcacgattgacaaaggagctcttagaaacgccggagacaataacctctggcctcttccttccttgtattttgaggtggcacggcattagtcctggcgatgccgatgcttggtttttttagctacaaagcatggtttataaagttgtctgtattccagtttggctcttattaagttagttactctatttacgtgtcctttttcaaaactctaatgtataaagttatgattttacgggcaactctttacttttgagtaaaaaaaaaaaagaaaaaaaaagtaggccgcttcgcgtggcggggcccggtacccgatcg

SEQ ID NO: 161 - DNA, 5662 bp, Arabidopsis thaliana
  Clone ID: ARATH-23APR03-CLUSTER12483_1
aaaaatctccaggtaaagcttctccctttttctctgttttctctgttttgttattctcccctttctccattgcagctttttcctgtaaagtgggattgatagttttgtttcatggatttcaaatttgtgttatttgactcgataccatcttaaatgcagagtcttttcgtgataataaaattatggattcgtttcaaagtttttttttttcgtatggaaaacacttgagctctctcaatcttgtagtcttgactcttgatgattcttctatgttctcgttgtgattgcttgtcactgttctatcttttatatatgattaaatgcaattttgcccctttttacgcgcgaatgtatttattatctttcgcactctgggtccatttcttgtcacttgagcacataatgattgatttatgactttttaaagttatgaaaatttattatttttgttgctatggttttttggaattagaagctcatttcaaagttgttgattttctttgcagggtagggaattggtgtggtagcttgtgatgcactgtgtttgagggaaaggaaaggataacgatggggtttgagtttattgaatggtattgtaagccggtgcctaatggtgtgtggactaaaacaagtggctaatgcatttggtgcatacacgccttgtgctactgactcttttgtgcttggtatctctcaactggttctgttggttctgtgcctgtatcgtatatggctcgccttaaaggatcacaaggtggagaggttctgtttgaggtcgagattgtataactatttcctggctttgttggctgcgtatgctactgctgagcctttgtttagattgatcatggggatttcagttttagattttgatggacctggacttcctccttttgaggcattcggattgggtgtcaaagcttttgcttggggcgctgtaatggtcatgattttaatggaaactaaaatttacatccgtgaactccgttgctatgtcaggtttgctgtcatatatgctcttgtgggggatatggtcttgttaaatcttgttctctcagtcaaggagtactatagcagttatgttctgtatctctacacaagcgaagtgggagctcaggttctgtttggaattctcttgtttatgcgtcttcccaatttggatacttaccctggctacatgccagtgcggagtgaaactgtggatgattatgagtatgaagagatttctgatggacaacaaatatgccctgagaagcatccaaatatatttgacaaaatcttcttctcatggatgaatcccttgatgactttgggatctaaaaggcctctaacagagaaggatgtgtggtatctagacacttgggatcagactgaaactctgttcacgagtttccagcattcctgggataaggaactacaaaagccgcaaccgtggctgttgagagcattgaacaatagcctgggaggaaggttttggtggggaggattttggaagatcgggaatgattgctcacagtttgtgggacctcttttactgaatcaactcttaaagtcaatgcaagaggatgcgccagcttggatgggttacatctatgcgttctcaatctttggtggagtggtgttcggggtgctatgtgaagctcaatatttccagaatgtcatgcgtgttggttaccgactgagatctgctctgattgctgctgtgttccgcaaatcgttgaggttaactaatgaaggtcgtagaaagtttcaaacaggaaagataaccaacttaatgacgactgatgccgaatctcttcagcaaatatgccaatcacttcataccatgtggtcggctccatttcgtataattatagcactgattctcctctatcagcaattgggtgttgcctcgctcattggtgcattgttgttggtccttatgttccctttacagactgttattataagcaaaatgcagaagctgacaaaggaaggtctgcagcgtactgacaagagaattggccttatgaatgaagttttagctgcaatggatacagtaaagtgttatgcttgggaaaacagtttccagtccaaggtccaaactgttcgtgatgatgaattatcttggttccggaaatcacagctcctgggagcgttgaatatgttcatactgaatagcattcctgttcttgtgactattgtttcatttggtgtgttcacattacttggaggagacctgacccctgcaagagcatttacgtcactctctctctttgctgtgcttcgtttccctctcttcatgcttccaaacattataactcaggtggtaaatgctaatgtatccttaaaccgtcttgaggaggtattggcgacagaagaaagaattctcttaccaaatcctcccattgaacctggagagccagccatctcaataagaaatggatatttctcttgggattctaagggggataggccgacgttgtcaaatatcaacttggatgtacctcttggcagcctagttgctgtggttggtagtacaggcgaaggaaaaacctctctaatatctgctatccttggtgaacttcctgcaacatctgatgcaatagttactctcagaggatcagttgcttatgttccacaagtttcatggatctttaatgcaacagtacgcgacaatatattgtttggttctcctttcgaccgtgaaaagtatgaaagggccattgatgtgacttcactgaagcatgacctagagttactgcctggtggtgatctcacggagattggagaaagaggtgttaatatcagtggaggacagaagcagagggtttccatggctagggccgtttactcaaattcagatgtgtacatctttgatgacccgttaagtgcccttgatgctcatgttggtcaacaggtttttgaaaaatgcataaaaagagaactggggcagaaaacgagagttcttgttacaaaccagctccacttcctatcacaagtggacagaattgtacttgtgcatgaaggcacagtgaaagaggaaggaacatatgaagagctatccagtaatggccctttgttccagaggctaatggaaaatgcagggaaggtggaagaatattcagaagaaaatggagaagctgaggcagatcaaacagcggaacaaccagttgcgaatgggaacacaaatggtcttcaaatggatggaagtgacgataaaaaatccaaggaaggaaataaaaaaggagggaaatctgtcctcatcaagcaagaagaacgtgaaaccggagttgtaagttggagagtcctgaagaggtaccaggatgcacttggaggggcatgggtagtgatgatgctccttttatgttacgtcttaacagaagtatttcgggttactagcagcacgtggttgagtgagtggactgatgcaggcactccaaagagtcatggaccccttttctacaatctcatatatgcacttctctcgtttggacaggttttggtgacattgaccaattcatattggttgattatgtccagtctttatgcagctaagaagttacacgacaatatgcttcattccatactgagggccccgatgtccttcttccataccaatccgctaggacggataatcaatcgattcgcaaaagatctgggtgatattgatcgaactgtggccgtctttgtaaacatgtttatgggtcaagtctcacagcttctttcaactgtagtgttgattggcattgtaagcactttgtccttgtgggccatcatgcccctcctggtcttgttttatggagcttatctttattatcagaacacagcccgtgaggttaagcgtatggattcaatttcaagatcgcctgtttatgcacagtttggagaggcattgaatggcttatcaactatccgtgcttacaaagcatatgatcgtatggctgatatcaacggaagatcaatggataataacatcagattcactcttgtcaacatgggtgccaatcggtggcttggaatccgtttagaaactctgggtggtcttatgatatggctgacagcatcgtttgctgtcatgcagaatggaagagcggagaaccaacaggcatttgcatctacaatgggtttgcttctcagttatgccttaaatattactagcttgttaacaggtgttctgagacttgcgagtttggctgagaatagtctaaacgcggtcgagcgtgttggcaattatatagagattccgccagaggctccgcctgtcattgagaacaaccgtccacctcctggatggccatcatctggatccataaagtttgaggatgttgttctccgttaccgccctcagttaccgcctgtgcttcatggggtttctttcttcattcatccaacagataaggtggggattgttggaaggactggtgctggaaagtcaagcctgttgaatgcattgtttagaattgtggaggtggaaaaaggaaggatcttaatcgatgattgtgacgttggaaagtttggactgatggacctacgtaaagtgctcggaatcattccacagtcaccggttcttttctcaggaactgtgaggttcaatcttgatccatttggtgaacacaatgatgctgatctttgggaatctctagagagggcacacttgaaggataccatccgcagaaatcctcttggtcttgatgctgaggtctctgaggcaggagagaatttcagcgtgggacagaggcaattgttgagtctttcacgtgcgctgttacggagatctaagatacttgtccttgatgaagcaactgctgcagttgacgttagaaccgatgccctcattcagaagactatccgagaagaattcaagtcatgcacaatgctcattatcgctcaccgtctcaataccatcattgactgtgacaaaattcttgtgcttgattctggaagagttcaagaattcagttcaccggaagaaccttctttcaaatgaagaaagctctttctccaagatggttcaaagcactggaactgcaaatgcggagtacttacgtagtttagtactagacaacaagcgtgccaaagatgactcacaccacttacaaggccaaaggaaatggctggcttcttctcgctgggctgcagccgctcagtttgctctggctgcgagtcttacttcgtcgcacaacgatcttcaaagccttgaaattgaagatgacagcagcattttgaagagaacaaacgatgcagttgtgactctgcgcagtgttctcgaggggaaacacgacaaagagattgcagagtcgcttgaggaacataatatctctagagagggatggttgtcatcactctatagaatggtagaagggcttgcagtgatgagcagattggcaaggaaccgaatgcaacaaccggattacaatttcgaaggaaatacatttgactgggacaacgtcgagatgtagataagttcatgttaaactaggaatcattgtctcttccgtaagaaacatatatttatcttaaccaaaattattagtttggtttccatttcataaacttaattttcacctgcaaagaaaatcaaaaaaaaaaaaaaacatcgtgataagtagagaaattacttgagtatccttctaactcaaaaaaaaaaaaaaaaaaaaaaaaaaaaaaaaaaaaaaaaaaa

SEQ ID NO: 162 - DNA, 650 bp, Arabidopsis thaliana
  Clone ID: ARATH-23APR03-CLUSTER125188_1
gtaccgggccccccctcgagttttttttttttttttttacttataaagtttctctttaatacactaaagatacatttacatattaaggtgccttaatttgatgatttattacaatgtttcccgtccacttcaatatacacaagaatatgaagtttctcttaaacttaaaacaaaaagatgaattaaattccatctttccctttgagtgattaattattacttccacgtatactctaacttgggcattttttggccatgggtgaaatagatcccatcatctctaacatcccaaaagttctttttaccataatgaactatcaaaccaccaccttcatatgccgtaaatgctgcatgcaacttgaaattagggccttgccataggtcacaatagaattctgatttgaaaagactatcgtggaaactaaaatcgtaggtttgtccatggcgcaaaaagtggaagcctagattgtcatcatttgatatgcaatttactttcaagactttgttccgaccaagagaattcgtaaagatgacagagtttttctcattccactttccgctactcaaccctacggataatccaatgacgaggagaaaccacgagagactatgcattgcctttgttgtcgaattggcctcttttttttttt

SEQ ID NO: 163 - DNA, 556 bp, Arabidopsis thaliana
  Clone ID: ARATH-23APR03-CLUSTER125322_1
ttttttttttttacactaagatttctactgtttgaaagtgttttcaggcaaagatgaaagtggaaacttaacaatgtcagaatcagacatagcaacactgttttcttctggaactgattctggtccatccatggatggttttatcactgtaatgaacaaaatgttgtagaacaaggtaagagctaagagaacaaaagctgaacttgtgaggaacgatccggagatctcaggtggttcttcaaacatgattggatcattgttggttctgaccacatctgatgatgtcttgttgatgattcttggtttctcatcagcttgagattctatttgttgatcaagctgtttcagagcttctctagctttatctctatcgatttggaatgaatcttctctttcagtggcttggacaatacgcatcaaatgtctcttcttctttgtctccatgattcttccatgtgtgtaccatttaagagactgtaagcctaacaccaccaccattatcagtttcctctgtttcttctgctacaccactctggaagatgatatttttttctgt

SEQ ID NO: 164 - DNA, 1921 bp, Arabidopsis thaliana
  Clone ID: ARATH-23APR03-CLUSTER125353_1
tttttttttttttttttgagaagataataagatttatatataaaaaaaaataaagtaataagctctctccagcatacaaatgatacaaatctcatagtatatataaagttgatttattggtttgttacataacagccttgtgtagtatacaaagaatgataaatgttattttttgatacccacttaccaaagaatagagagaggtgtgtaatataaaattggcaggaacgttttatattaaagggttaaggattttctgacttgtaagatccaaagtgcaaattgcattacccaaagccttgcttcaacagagaacccttcaagccataccttcagccatttcatcaacgatttcttttcagctctctttgcctctaaaaccgcttgggaagatactttcccgatgatcaagaacgactcgagagacgatccttgcattagctcattgttaactgaccggagacagtcgtttgttttcagcatcagaaggatcactcgtggcaatctcctgagaagctctgagatttcggagaagtactgtgatgcatacatctgtagctctgatacatcttctttgttgccttggatgactaaatgatccacagatgtgtcgatgacttgcttccatggtctcattgtaagtatcccggcgaataggacgtatagatcatctccagcgcctaatttctcactgtgttctttaatggctttagcatccgaaaagaccaatgctttccacagtgaagcatagttgaatcttgtgttgaagtcaagctccttgtacaagccatggtcaagaatcactaattgcggttttctcttgccatatatgttcctcttaccagaaggatctggacgaacaatcaaattggcagcgtgtgggtcacagtgcacaaacccatgtttaaacatcatttctgcaaatgtttgactcacgagctttgatacttcatagggctgaatcccaagctttctgatcttatcaacatcgttcacttgagcaccatccatgaactccattgtcaacaacttagaggtactcaaattccaatagattgttggcgcataaacatactctgcaatatggggagacagcttcctaaaattatccagacatttctcattgtttttcgcctcaaccaaaaaatctagttcctttggtaagctttcactcatttcgtcgagcaaccacctatagtcaaatgatggaaatattcggtgcaaggtattcactaaaactccaacagctgcagtgtccgcagctgcagtgtctgtcatgtgcgcatgttgaaccttgacagcaaccttttttccatcatgagtgcgagcaacatgaacttgagcaagggaagcacttgcaattggaacagggtcaaattcagcaaatacttggtctggcatctctccaacctctttcttaaaaacctcacatacttgctcatatgaagaaatagggcatttgttcaacatggactccctcatagtacgaacatactcttcaggcacaagatattctagttgtcctatatgttggccgagtttgatatagattcctccatttttaaaacagagctcttgaagcttttgagctgaccttaggtggacttcatgtttgaccttagctctctcactgcttccctcagccaaacccaacaatgagtactcataatcaaaagcaatagaggcggcggtaacggtattgcggtagagacgaacggggatggaggtgcaaagcttgagggttgttgatgggtcatcggaggaagcaatgaaggcggcgccggaaccaccgcataaggcggtaccaacaacgaggagcttcgtacgggttctccatagggatcgtgccgccattgaggaagcacgtaatgaacgcacgcctcagcagatcggaggagaaatagaaagcgagcgagcgaaa

SEQ ID NO: 165 - DNA, 910 bp, Arabidopsis thaliana
  unsure (1)..(910): unsure at all n locations
  Clone ID: ARATH-23APR03-CLUSTER125470_1
cccatnnacttnnntntngantttttcatcattatcaatttatcatcatcatcaaactaactaaaagcaaaaagttaagctttcttttctttctgaaaagagaaatctgtcaaatcaaaccaatgacatctcaaaccaaaccaaaccaacaaatcgaattatagatctttagaaacatcgcaaatggttgttgtgatggttatggttgttgtggccgtgaccaccgtgactatgccggcgatgagtctccttcgtcgataacttcttgaacatgcttaaactcatcaacaccgcaaggaatcgtaatcggaccatcatgcttgaatccatactctttttcagcttctttcaagagatccaagaacaaaggatggctcaagaacaccaacggaacaacaaatctatgtagaccttcttcatcgtcttcgtgtcccaccataatcgctacacagcctttaggaacatcatggtggtggtggtggtggtgatgagggagtatgtgaagatgaggaacatggaagtgaaacttgaacaccatatgcttgatatgattcggactctgttttggactctgtttttggttttcttcaaaacccattaagaagaaggaatctttttcaccgaaaaaccaaacaagaaacacaaagattggtttaaaaacgatcgacgaggaggaagagaagtgttaaacggtggtggttgttagagattttccggtgagttttgttgatgctaaaaaacggtgatagaaaaaggccaaggatcaacagcagaagagattatgagagtaaatagagaaagatctgagtcggtgagagatctagggatgttgctcatgataggctaagcatgaagagagaaaaaaggtttttattttggttttttagaggagcccgggaanataggaccg

SEQ ID NO: 166 - DNA, 856 bp, Arabidopsis thaliana
  Clone ID: ARATH-23APR03-CLUSTER125586_1
tttttttttttttttttgcgaaatattttatcaccatatattattgaaaaaataaaagtgtaacaacagttaatgagacctgagaaagtaaatactaagctctgtgccctgaccactaccttcagggttgatcatatacaatgcttcagagtccttagagccaatcactctatcgaatcgagctctcatgtaagtcatttctccttctgtctcttgatcatattggttcttacatggtaaaactccagcccccatagaaacacctctcaatgcatcaatcacatacatctcctcctcactcatgttctttctccttatcgaatacccgattttccgtccgttacagtaaatcccccacacgtactcctacaacactttcttcctagacgtctttgtctcgctttctaaagcaatcctcacagtctctgaggccatctccttttgcagcgccgaagtcagcatcgggagctcgatgatgaacattggcaggcaatgaggatcttcttgtatagcaagaaagactcttcctttgcgaaacccgaatattgttcccgttgttgcgtagtccttaagtaagggtcttcgatgccctcgactcaacaagttcaccatcttgcaaccagatgataacattggtataagcttgaacattttgagcaccccaccaccgatgcttccagaagatttcttcgaatttttagagtccatggaggttcccgtgtgccgcaagagcgagagcaaggccgagctatccatattaaagaaggggttagatcggatcggcatagtttttacttgtttttccttgtactcaccttttcttgttgttcttattgtgtgttttgtggatgaatat

SEQ ID NO: 167 - DNA, 991 bp, Arabidopsis thaliana
  unsure (1)..(991): unsure at all n locations
  Clone ID: ARATH-23APR03-CLUSTER125650_1
ttgctttctttttttgatataaactgagctcaatttacacaaatgtgccaatgtagtatacacatcataaataaatatatatgtacgtgagttaaaactgtcgatgttacatcaattgggtacaattttgaggagttcaacatcaaagaaaagtgtcttgtctatgagcccttggttcctcagcacaaaatctaatgcacgttgtccaaagaaagtcatcggcctcggcccactcttgttgtagtcattatccgggtatcctagttctggcggtacaattatccttctgataccaccgagagccatcccagagacagcctcctcaaaagcaggtatcacctcattggatcctaaggtaaatttgaaaaattccttatcatcgccctcaaaagaacccccttttgttttattgcgagcttcaaatatgcgtccatagtaccctattgtgtaaccgtcccagtcaaccacaactttgtctcccttttttgctataggcccagttcctactcgcaaatccttatactgaagaccagactgtgtttctgtataatctggatacttcatttttgttttgccataatccttccctttaagcgctggcatgtcagcaaattgagaagctgatgcaaagtctccatctttagaatcgtatgacaatgctccaatcaacaaaccaacagaagaaaccaacaactttctgcgatcaaactctccagaattattaacacatccacaattcccaccagaagaacgaagaggagcgaagtcatctgattggtcagctaatcgagcagccacagtcgtccggcatctggtggtggaggaagttccggcgagcgctgtggattgagggaagcagccaaaggacgaaattgacgccattagagtgaaacttaaaaaactgatttttttgtacgtctaaagagagatgagagataaagtctcagctttttatgttcctgggccgaattcctcagccgggcacctnnct

SEQ ID NO: 168 - DNA, 1896 bp, Arabidopsis thaliana
  Clone ID: ARATH-23APR03-CLUSTER12577_1
tctccataatatctcctagtctcaactctcaaatagagagagaaaaacagaaagacagagagaggttctatatattatagataaagtacattacacaattgtacaagtggaaaaatcatcacggatctctcttcaaatatataaagaagatttgtatatcaaactctctaagcttttgttgagccatggctgtgatgaagataaaaggagcagcgaccgtagcaggaacatggctgaacgaagccgttagcttcgtcgtgttctgtatcttagacatcgttgattcatttctttgtctcctctacaaagcagctgattatctcttcgaagccgagtggaagccttgctattgcttgtcggacaaggaacccatcaccacaactcgagggaagatccttttgtctcacaataatggcgagtccaagatcctcactctttctccgcttcaagaactcggcggacgttccaagattgagctggaggatatctccgagaccctttacacacgtccttctcttatttccgacatctcaaccatctccgttaacgagctcaataagcggttcgttaaggttactcggtcagagtctgagtgtagcggccataatgagaagaccaagaacaaaaggaggagatcattaacgaagtcaagcttgacggtgaacttcacggtcgttgagatgcttcggggaaagatcagaccgcagaatttgaaccacgatatctctcgatggtcggattgtgattgtgggttttgtacatcgtgggcctctacttctgacaaaaaccattccctctttgtcaaaactcaaatcccaaatggggtaacagcgaaagaggatgttcttttcatacatggtttcatatcttcatcagcgttttggacggagacggtgtttccaagcctgtcagcctcctcctcgactcatagactcttcgccgtggatcttctaggattcggaaagagtccaaagccagctgattcactctacacgttgagagaacacgtagagatgatcgagaaatctgtcttacacaaatacaatgtgaagtctttccacatcgtggctcactctttgggatgcattttggcgcttagcctagccgctagacatggcggcttaatcaagtcgcttaccctccttgctccgccgtactatccagtaccgaagggagagaaaaagccgaggcagtacgtgatgaagaaggtggcgccgaggaaggtttggccaccaatagctctcggagcgtcgatggcttgttggtacgaacacattagccgtaccatttgtctcctcatatgcaaacaccaccgtgtttggcaattcatcgccggtgtcttgacccgaaacaacaggactgtaaactttttaattgaaggtttcatgtgtcacacacacaacgcagcatggcatactctacataacattatatgtgggacaggaagcaaactcgatacgtatctagacatcgtacgagataaactaaagtgcaacgtgaccatcttccacggaggagacgacgaactcatccctgtcgagtgtagctacaacgttaaacagcgaattcctcgggcacgagttaaggttattgagcacaaagatcatatcactatggtcgttggcagacaagatgagtttgccagagagctccaagagatttggaagacttcttcttgctaaaattatgtttgatgagagaacttgtgatttattatgattgttctatgtaatgggttggtaaaaatattcttaagagttttataattacaaattaaggaaatccttatgtatcatgagataatccaggaaatggagtattaaataataatttcgcatctgttttatatgctaaaaaaaaaaaaaaaaaaaaaaaaaaaaaaaaaagggcggccgc

SEQ ID NO: 169 - DNA, 1003 bp, Arabidopsis thaliana
  unsure (1)..(1003): unsure at all n locations
  Clone ID: ARATH-23APR03-CLUSTER125828_1
angnaaagttattgntttttttttttttttttgcctcgagttgtttggtctcattgatactgtcaacaacttaacccattacagctaatttaacatgagcaaaagcataatgaagcatcattccaaatctttataggcatttaagaaaccaagatcatcagcttatttgtactggttgttgattatagctttggttacgaaatgcgaaacgattccaaccggacagaagagaaggcaaagtgaaaccgaatgcctcgtctcgatctggttctctaacccatcattataaacttgccgtgcagcgaaaagatctacaacaagaagatgaatccaagcagaagcaagagtcatttcacttgagaacattttagctattccagacaactctggcaacatgtatttactagaaaacatgtatttgagcgtctcgggtgtccaagaaatgtataacaaatacacatataatacgcctaagatgatatacggtacgctactctccatacacttcttggtaatttcagcttttggtgctacaaccattagagtatagaagggtaaaaccgcggtagttccaaccgcaaatacactgcttgcaatctgagtagtagttaaccatgaagctcgtacaccggagaatttcttgtgaactacggtgtaagaattggactgaacagagattcttgatcctccaatgaagctccaacgatgatctaatctaatctttgaagaatcaagacaaagttccgatcttttagcagaaacgttgcgtttcatcaccgagagagatgaagacaaaggctgagaaatgaaagaagaaaaacccatctctgattcaaatcttcaccactaattgccaaaaattgatctttcatcaccttcttcaacaaactctctgcatatatataatgggaatggttgcgagatttccactggataaaaaaaacgaaagtggaagggaaaaaagttgtctttcactctttctttgctcagtgtcgacaattat

SEQ ID NO: 170 - DNA, 670 bp, Arabidopsis thaliana
  Clone ID: ARATH-23APR03-CLUSTER125903_1
ttttttttttttttttcaaacaaaaatcatagaactttttgattatttacaaattgagccgtacatatacaaagaatccaaagaacaaatcttctcccacaaaaattaatgtttcagaaacttataaataaaaaataacagagtaggagatcaaaccatgaattaaggattataaaagtggccattgcaatgacatttccatcccataggtttgtaattagagtactgatcaagaacggtggttagagaagaaggaggtcgtacgaatccaccggaaaacgggttaactcgtgtgaagcgggagcgagtcgggagagttggtacttgaatagccatgcaaggatggcagttgttgcatctgttgtggcagcttggtggtgttgaacctaatcttgctttatcttcaatcaaagcgacttgaggagaaataggaggttggataggttgaagaaaggatgagacttgtggagtgatgagaagaatgagaatgagaggaagaagaagaagggttgatttgtatatagcaaacatttttgagttggattcaagaattactactataaaggaggagcttcatgtgggtctagtgaaatttcaatattttgtttgaaaaagaaaaacagagagagagagagagatgatgaagttggagaaggtttggatcagaagt

SEQ ID NO: 171 - DNA, 1201 bp, Arabidopsis thaliana
  Clone ID: ARATH-23APR03-CLUSTER125935_1
ttcgggggtgttccgggcccccccgcctgctcccttacttttgttcccctgaatccggcattttttttattgcaaaaatttgttactatacaagcaatgttgtttattattaacgaagaatgaaattaataagatcaagatcagaattctaatcccgaattacatcaattttctactatgtgtgagtactgctaaaagttacaggttgttcttattccctccggcgaatcttcagtctgggagatttgacagctactctctcaaagctagaacagaggccaatggtaagatcggaccaaaagcatcatccccacaatgaaggttgaagaaagaatgcagagtccgaacaaacagtgaataggaagagtttgtcaaaatccgcagaggatgaactttgagaccgggaagaacaacccctgcagagcaaagaagaacaatagttatcaaatactgagagaaccaagtaacaggtttccacttgatctcaacgcttgaactcttcatcctcttcccactcatcggctctttcgacaaatcaaagctcgaccctttcatcctcaactccaaaacacaccgtgtaagcgctccaattatcattcctctccctattaacacctctgtaaactttccagaacacaaacagcttagcttgaacaagaaacaccagaaccaatgaagtagctaatgacactggcagaaggtatccaccattttcttgcaaaccgcattacttttcaccacgtcagcatcatcagaacaagaagaagagtagacaagtgtgaagaagaacccatggaagactaggaagaaacaacaaagctgaaagatctctcttttgattgactctagtcttgattctttaagaagaacacgacgacagaacaaatcttcttctctttgccataacttcaaaagcaacaaatgtcctggactctctgagatttcagacaacggatgctgctgaatcactttgagtattcccattcccggatttgagaccgcaaccaactgttgttgttgttgtctctctttatgctcttcatctactggaatctccactacatgagaatctttagttccggccatagagaaaaaaaagattgagactttatgaagaaacagagatcggaataggaaagcaattagagagtaagatgaagattgaagatttgagttcgttgtgtttttttagtaagaattc

SEQ ID NO: 172 - DNA, 1282 bp, Arabidopsis thaliana
  Clone ID: ARATH-23APR03-CLUSTER126008_1
aagcttcttcttgtgtgttttactgattttgattactttaagtcctaaagggaaccaacataggcatctaatgcttgtacctcttttgcttttggtcttaattcttttctctggtggttcaggtatgttgaactgtattaaaatacaacattggtcttggcactgtgtcttgtggatcaattatggatctgcttcatagaaagataatatctttccagtttctttatcttggaaatagtacaaactccgatctcggttcttggatagagttcactaggtctttttcttttatacaagttgtgggtaagcaaatagaaatatagttgaataaacatgccaaagctaaagactttgaagatgactactgactcagagaactgtaccgtattctttttcatttcttcgtcgtgcaattacgagaaatcaggattccggttggtggaccggtcatctgaagttggcacctcccgtgcagctgataagagtaatgaatcattccaaaatgagctttgactttgaaggcaagcctaccaaactagagatcaaacggattggttccaacctcgtctcatgctttttctgcaagaatggctggaccacttgcgctgcaatcaatctattgaagaagaagagctcaatccgaagcttctcaaacttcacttctatcttcttattagggttagtgaaattcaccagcatggacaaatcgccgttgaaaaactccggcgtgtcgaagtagatcgtgtgtaggtttgcgtttgggatgtcgaaaacaggtattcttggtctaatcgcaagaaacactatcaaagtggcaatcgcaaaaaagataagcaaaaggctgaacacaaaacagaaaccggcaacacaccatatccagagactggtcctgctactccttggctgacggagaatcaccctatctttcctcggctctgcatcaagaccgttgaatctaaccgttgctggctttgttaagaccatttggccaactggtgtggattgtgtgctctgtggtgttctccatggtgtggttcttggagtataccatacagacgatggtgtttcccatgatggcgtttcgggcggttgcaactgcggtggaggaggaagatgaggtagatttggcatgagttatgtgatcaatgaaaggaaaattggaaatgtgtaatggttatggattaaataggaaaataacagaacttttgtttaaaaaaaaaaaaaaaaaaaaaaaaaaaaaaaaaaaaaaaaaaaaataaaaaaaaaaaaaaaaaagcttatg

SEQ ID NO: 173 - DNA, 1817 bp, Arabidopsis thaliana
  Clone ID: ARATH-23APR03-CLUSTER12622_1
gagtttcccactctcgctgtagagagagagagagagagctttaacgaagcttttgttttttgtagagagagaaaaagcttcaaacttttttcactaaaagagagaattaactcgaagaagaagaagagctgccagaagataataaagcttccttctttcgagtaaaggaagcaaaagcaaagtgtgtagttactcagcaatggcgagagacttcaagcttatcttctccatttcaattctgcttctgcttctagactgttgttacggtggcaaggtcggagtttgttacggaagaagcgccgacgatcttccaacaccgtcaaaagttgttcaattgattcaacagcacaacatcaaatacgttagaatctacgattacaattctcaagtcctcaaagcatttggaaacacaagcattgagctaatgattggagttccaaactctgatcttaacgctttctctcaatcccaatcaaatgtggacacctggcttaagaacagcgtcttaccatactatccaacgaccaagatcacttacattaccgttggagctgaatctactgatgatccacacatcaatgcttcgtctttcgttgtccccgcgatgcagaatgtcttaaccgctctgagaaaagtcggtttgagtagaagaatcaaggtttcgactactctttccctcggaattctctctagatctttccctccttctgctggagcattcaacagcagctatgcttatttcttgagaccaatgttagagtttcttgcagagaataagtctcctttcatgatcgatctttatccgtactacgcttacagagactctccgaacaatgtgtctttggattatgtgttgtttgagtcttcctctgaagtgattgacccaaacacgggtttgctttacaagaacatgtttgatgctcaagttgatgctctttattacgctctcacggctttaaacttcaggacaatcaagattatggttactgagactggatggccaaccaaaggttcaccgaaggagaaagctgctgcgtcttctgacaacgcggagacatacaattcaaacataatccgtcatgtagttaccaaccaaggcacacctgcaaagccaggagaggcaatgaacgtttatatattctcattgttcaacgagaatcggaaagcgggtttggattcagagagaaactggggattgttctaccctgaccagacaagtgtttatcagttggatttcacgggaaagagcaacgggtttcactctaattcgagtggtacaaactcaagtgggagtagtaatagctggtgcattgcttcttctaaagcttcagagagagatctgaaaggtgctttggattgggcttgtggtcctggaaatgttgattgcacagctattcagccaagccagccttgttttcaaccagatactttggtttctcatgcttctttcgtgttcaatagctatttccaacagaacagagcaacagacgttgcttgcagctttggaggagctggtgttaaagtcaacaaggaccctagttatgacaaatgcatatacattactgcaggagggaacaaaaccaaggcgacgaatgcaactgcattgacctcctctgcttcaactccacgtggaaacgaactactccaatggattttgaaactctgtctcatgatctcgttgttcttcagtttgcaaactatgaattcacaggcactgtaaccgaaatctgaaagaaatgtagcaatagcaagaaaaagcaaaatttgttcctgtaaaaaaaaaaaaaagggcggccgctctagaggaacaaagctta

SEQ ID NO: 174 - DNA, 838 bp, Arabidopsis thaliana
  unsure (1)..(838): unsure at all n locations
  Clone ID: ARATH-23APR03-CLUSTER126231_1
ntttccnaaaannttaacgggnnnncanttnnnccttnccccntccaggggggncnnnnntnggnaagggnnnncgggnngggcccnttcgtnanncccccnntggngaaanggggantnnnnncccaagcnntaaagnggggnnacccccnnggttttccccnccccccccnntgtnaanccccggcccacgganntgtnaanccccccnccnntaagggngnaatggggncccgggcccctcccccaaggtatatttaatttatttatcccttaatttatatttttttttttttttgaacgatgaatttcaatcataaagcacttaataatagagattcaaatgcactcaatcaatgatgaatcagtatagaagttaaaaactgcaatggagtagttttattgttatcattggttgttgtaaacatcaaccatatcagtttcttcttgactatcgagtatattctgtaaatggtaaagatgagaagtgatccaccattcttgtcaacagatcatgttgaaatgatcagatgcagcctcccaacaaaatggcttccatttcttcgtttgaaactggcgtgcgctttggctgcgatgatgccttcccgccaatagtcttttggatgttgttcaaattggagaagaacaatgtatcagcttcatttgccacctgactctttccctctgaagctgaaggattaatatgtctctgagggaatttgatgcgaggaatcctcttcaaaccgtgaactacgttcatcttcttttcgctctttcgttctcgtctgtgtaccaaaaggagaatgttgacgacggcgactggaaattttctctctct

SEQ ID NO: 175 - DNA, 876 bp, Arabidopsis thaliana
  Clone ID: ARATH-23APR03-CLUSTER126244_1
ttttttttttttggaaataatctctaatcgaattatttacggactgaaacccggcatcaaacatttaacctaaaccgatagaatcctaacaaacttctgataaaatccagagagctaacctgtggaaagctagtcctaacaaacttctgataaaatccagagagcaaaccagtggaaagcaaaaccggcatcaaacatttaacctaaaccggtaaatcaaatatagaagctttaaaaaaccaaacctaaaccggctaaaatcgatagacctaaccaaccactagcagtttcccggccgccgcttgaatgatgaccactgcggtgcgttccaccgccataaatcggaatcggacgtattcctcctcctctgctagaactccctcctccgcctctgctagaacttcctccaccgcctctgctagaactccctcctccgccgaaactgcgtcccctcctccaccgaaactacgtcctcctccgccgaagccgcctccacctctgcctcctcctccgccgcctttcttaacaacgactgttaatttcggtaaattggcttcgattacgtcaccgtctggcttcaattctacttcttgaaacgggagatcatcatggtttggatcaacgaaggctaaacttgttgaagatcgcgagaccgcgtgagcaaagtggtgttgcagttgcaggtggagacagagaagaaggaataaaaacaaagatgctttcttcaaatccataattcgtttcgtttcgtttctttctttttctgtgtgacttacaatttatacaccgaattgtttataaccgcgtgactatatgactattctaatttgaatatctgaacgcgtattttaatatatccgactaattacaaaatat

SEQ ID NO: 176 - DNA, 1115 bp, Arabidopsis thaliana
  Clone ID: ARATH-23APR03-CLUSTER12636_1
gcaccagtcacactctctttcttcttcattcatcattctcacttacgtttcccagaaaataaaagagctatgaagtttggtaagagtctcagcaatcagatcgagcaaactcttcctgaatggcaagacaagttcttgtcttacaaagaactcaaaaaacgactcaaactcatcggttccaaaaccgccgatcgtcccgttaaacgactccgtttagatgagttttccgtcggaatatcgaaagaagagatcaatttcatccaattgttagaagacgagttggagaaattcaacaatttcttcgttgagaaggaagaagaatatatcatcagactaaaggaatttagagatagaattgcgaaagctaaggattcaatggagaagatgataaaaatcaggaaggagattgttgatttccatggagaaatggttcttcttgagaattacagtgctcttaattacactggattggttaagatactgaagaagtatgacaaaagaactggtgatctcatgcgtttacctttcatccagaaagttcttcagcaacctttttacactactgacttattgttcaagcttgtcaaggaatctgaggcaatgcttgatcagatcttccctgctaacgaaactgagtctgagattatccaagcagagttatcagagcataagttcatggagagtcttcatatgaagagcacaatcgctgccttgcgggttttgaaggagatcaggagtggaagttctactgttagtgtgttttcattgccgcctctacagttaaatggcttagatgagacatggaagaagattccattgttggagcaagaagccaaatagagagtgagacagaggcacactcgctctattccacttttttatacaatagaagaagctaacagattaaacaagacattatcatcaatgtacacaaaaaggcagaagaaactataggatcatgtttctggatatcatctttggtcggtcataagtccttaggttacacaaaactgcaatgtaactttgtttctgtgttgggtgtgttgtagttgatgtaatatataccacttcagattaattattgatttcttcttttccaaaaaaaaaaaaaaaaa

SEQ ID NO: 177 - DNA, 2486 bp, Arabidopsis thaliana
  Clone ID: ARATH-23APR03-CLUSTER12637_1
gaattcaaacgggagatttcgttttccgatcatcaccgatcaacttcttcgccggagaacaaataagtttcaaagcttctctcgaggtcttagggttttagctgttgacttgtcgcagcttcactggagaattgaatgaattttcttatggtttcaggaaggtgatgaatgttgagatcgatttgatttcaatcaacgttcaatgaagatggtgatgatttctcataagatggatttgattttggttttcataatcgtaatcggaggatctattttccgacgagtttctgctaatttcaccgaaccttgtaacggaagatgcggtggattgactctgccttatcctttcgggttttcaaacggttgttcgatccgattcgattgctctgcggcggagaaaccgatgatcggagacttttccgttcaaaacgtgacggaaaacagtatatttgtcggtctctctcacaattgtactcggaagattgaagatatgaatccgcttttcggcgagaatttcgcaccgacgtcggagaacagtttcttgatggagaattgtaaccgtaccaccgatggttgctctatcaagcagaagtttctggagaatgtgctgaaactcaaaagttgtgatgctactggaaacataagttgtttttctttagatagtaattcgagttcgaagaactcagctaagtttttcagtatgaagacattaaggaacagctcgtgtagtttgttgttctcgtcgatagctttcgagtctgtaggtgtgaatgcgggtatagcgttagagtttgagcgagttcggttaggttggtggcttaagggaggttgcgagagcggaacttgcgcggctaacaccgattgtacagacgttgaaactcctcatggatatgcaggacaccggtgctcatgtcttgacggtttccacggtgacggatacaccaacccttgccagagagcactaccggagtgccgtggttccaagctcgtctggagacattgtagatctaatcttattactattgtaggaggaactgttggtggagcgtttttactagctgccttggcttttttcttcttttgtaagcggagacggtctactcctttgagaagtcatttaagcgcaaagcgtcttttgtctgaagctgcagggaactcgagtgtcgcctttttcccttacaaggaaatcgagaaagcgacagatggtttctctgaaaagcagaagttaggaataggtgcatatggtacggtctatagaggaaagctccaaaatgatgaatgggttgctatcaaaagacttagacatagagattcagaaagtcttgaccaagtcatgaatgagatcaagcttctttcctctgtgagtcacccgaatcttgtccgtctcttagggtgttgtatagaacaaggcgatccagttcttgtttatgagtacatgccgaatggaactctatcagaacatctacaaagagatagagggagtggccttccatggaccttgcgtctcactgttgctactcaaacagctaaagcaatcgcgtatctccactcttcaatgaacccgccaatctatcaccgtgacatcaaatctaccaatatccttcttgattatgatttcaactccaaagttgcggatttcgggctctctagactgggaatgacggaatcttcccacatatcaacggctcctcaagggactcctggttatcttgacccgcagtaccatcaatgctttcatctttctgataagagcgacgtctacagctttggagtcgtccttgccgagattataacgggattgaaagtcgttgatttcacacgtccacataccgaaatcaacctagcggctcttgctgttgacaaaatcgggtcaggttgtatcgatgagataatagacccgattcttgacttggatctcgacgcatggactctctcatccatacacacggtggctgagcttgcatttcgatgcttagccttccacagtgacatgagaccgacaatgaccgaagtagcggacgagcttgaacagataagactcagtggttggattccaagcatgagcttggattcaccagccggttctctccgttcatctgatcgaggaagcgaaagatcagttaaacaatcatcaataggaagcagaagagtcgttatccctcagaaacaacctgattgcctcgcatccgtcgaagagattagcgatagctcacccatctcagttcaagatccttggttaagtgcacaaagctcaccgtctacaaatacattgctcggtaacattccaagatgatagtatgatctcaaaacacgattaccactttcttgtttatataagtccctcttttgtgtagctttcacaatcattcagtgtttataatgctaagtagagagattaacaatggtgaaaacaggtttatacatgagttataatgtaaacgatcttgaaacaagatctttcaaccagtaccacaatgtttagtaag

SEQ ID NO: 178 - DNA, 1137 bp, Arabidopsis thaliana
  Clone ID: ARATH-23APR03-CLUSTER126388_1
tcaaaccctcctcgagtggtaaatgtagcagacaacagctgctcctgccactgcaactgcaaccgctgccacagctccaccggaaccaacagcagtcacattcggcgaccatgacttgaactcaatgccattcagtggctcctcaaccacattcttcaatccattgatcatcttctcagcatcatccaactgtttctgtaactccacaatctctgattccaaagccaccactttcttctctgaatctttcaacgaatcttccacaaccatcttctctgttatccacttctgcaactctgttttcccttttgctacatctgattccaaactcttaatcttctccttcaaatcatgaacctccttctccttattgtcaatcttctccctcatctcttcctctgcacggaactttttgttcttctcatctaactccttcacctccaaagcaccaagctttgactccaattccttcattctcttctcattctcctccttgacagtccttaaaccagcgacctctttctccaattcctcaattccaccacctttctgtgaaatctcagacctcagcttctccgcctccgccgtagcctcttccccttccgtcctggccgtgatcagttcatgctgcagccgtgcaacttcggtctctaactccgaagctctagaagctatggcttcaagaaccttcctctcctcatcggacttgtcaatctctcgctccatctcacccatcttacgcttggccttggattcggctcctctcaactcctcaatctccgccgtcaagctctcaattttacgattgatagcatcgttatctctggccagttcctgattctgagactcgaggtctccgatcttctgattgagttccgtggacttgccgtcgtcgccttgctgatcagaatcgaagaaactctcatcatcctgaccagtcgcttcgccgttcaagctcctctcttccgccatctccagcaacagcgagaaaaaggatcagaaaatggaatcgaaggaggaaagtgataaaccccaaggaaagtttcgatttttctttttattggaaaaaggtttcgacttttctctgattctcgtaaaaaattgggtgagagattaaccaaaaaaaagattagcttt

SEQ ID NO: 179 - DNA, 4373 bp, Arabidopsis thaliana
  Clone ID: ARATH-23APR03-CLUSTER12639_1
aaataggcttccgttgttaaataaaagttgaacatttaaataaagtagagaggttgtgttggttctgcaaacatggatatgcttcacaccattctcaattttcttcttcctcctcttactatcagttttctcgttctcttttacccattttatctttttatcaaacttgtgagatttcttgttaagcaccttcgctttgaaaacgttaccgggaaagtagttcttatcaccggagcttcctccggcatcggagagcatgtggcatacgagtacgcaaagaaaggagcaaagttagctcttgttgctcgaagaaaggatcgtctagagatagtagcagaaacatcacgtcaattaggatctggcgatgtcatcatcatacctggtgatgtttctaaagttgaggactgcaagaagttcatcgacggaacgattcatcatttcggaaaactagaccacctgatcaacaatgctggagtacctcaaaccgttatattcgaagatttcacacaaattcaagacgctatttctataatggatatcaacttttggggctcaacgtccatcacttattttgctattcctcatcttcgaaaaagcaaaggaaaaattgttgtgatttcttctgctacggcaattatacctttgccagcggcaagcgtctattcagcaagcaaagcagctttagtaaaattctttgaaacattaagagttgagatcagtcccgatatcaaaataacaatcgctctttccggatttatatctacggatatgaccactcctcagtttaaagaaatgtatggttcagatttcatacttttggaatcagtgagtcgatgcgcaaaagcgatcttcagaggtattggtagaggagaggcatacgtcatagagccatcttggataaaatggatctttttgataaaaaatgtttgtcctgagatcgttgactacttactcgactatatatttgttagttatctaaaaccttatttcaagcgtgattgatcatatcgatctatccaagttctctctggttttcaactgtggttgtgttgtcattatggccatgaaacttatactttatgttgtattagttattgcactaagtcttggcctttttccctttcttcgtatatgtttcaatttgttttagaaccaaacatttcatatagatagaggatttcttaattatttaataaagatgattcaaatgtatataattgttcaactagttcagttcgcttccaaaaaaacagcgacgtcttctctctcacggcgataaaaacagagaaccttccatttgtttctttgagcgcgtgaccggcgcgtggcggcttagttagcgccggcgtcggtcctccagtctggttttctttagggtttcattctctacttagtctggttcgtttttagatcctgatttgatgttggcaaggtgaagaatttttggatcttagatctgtaagagccatcgttgtgggctttgattcgtcgaaggttttgtgcgatcggaactcccttttctctgttttgagaaaattatgggtttctcctttgttcttgcagatcttgtttccgacgaaggttgcaaacgaaagttatgacggcggctaatgttattggtggtctggctccttctttgggatagggtggcaacggtacaccggtattttagtgttagttgtctcataattgggttttgcgctttcgttaaccttgttctcttcatttctcttttgggttcctatcctttagtcttcattgttggcttgttggtagcgtttatggaatcaactttattctcagtcttttgtggtctagtatcttgaactcttgcctattctatgtcctgccgagtttgcttgtttctcgatccgattcgttctcttgccgtctccagtcttcggtttgttgcgaattgtatgggctcggtccttgtctctacggtttagacttgatcgaggtctctcttttgcattggtgtcttactaggcgtgaaccaatcttggttttgtttgcttcgatttcgccgtttccagaagttgtgtgggatttctagtcgtctcccattcttgctggtatggatgctttggttctctttatttgtgaggtagtcttcatttggtataggaagagtcgctatccggtgtcgtggattttctcgtctccattggctagccactaattcaagcgtttctcgtttttggattgataatttgcaagatgtttggtgctagattctgagttatgagttttaattccctctgatgtttgctttcttagccgtcagtgttttgacttgtttcttttgtagtgttgttatttgctccccattttcttggacttagtttcctaggatatcttgttatccttcgggttagttttcgggatcatgtattgatcgtcgactccttgtatttcacctagtactcatcaatgaaaattaatcttccagtgaaaaaaaaaaaatgtatataattgttatggaatttctgtgtccagtccatattaagctttttacatatatatatagcatcgaccgcgaagtccgtaacaccatctcttctagaagactcggatttcattggcagaggcgtatgctcctttggatctgatagttaaaacaccaaatcttgtgtaactttcttgtatataatgctctgtttaactttcatttttttttagtaatatttacattcctagcaacaaatatttatttatagcaattaatatatatttttagtaataattacattcctagcaacaaatatatatttattttttaacaaatacacaaatatatttttagtagcaattaacctattttcctaacaagatacaacagaagaataagaaaatagtagacagatagatccacttgctaccatttcctctccctgtagccttctgtgtctattaaaatagacttcacttgtaaagtaaaagtttgaacattttaacatataaaaaaaaaaaccaagtagagaggtaagtggtggtattggttctgcaaaagaacattatggatatacttaccaccattctcaatcttcttcttcctcctcttactatcatctttctcttcctgttttacccattttatcttttgatcaaacttgtgctttgtcttcgtaagaaccttcacttcgaaaacgtagccagaaaagtagttctaatcaccggagcttcctctggcatcggagaggttagttagctttggatgctatgcccttttgttagttagtatattttttttaccaatactaagtaactgagtagatttagtctattatactattactgattcaaatatatgtgtgtatatacataatatagatccgacattggtgatagtgtttatggttttgttttcgaggtcctattttgtcgtggaatctcttgcaactatatgtgtgctatttgatctatttgataatagacgactaaaaataactaaatgtatagatccacataaattgatatgatatttggttgagaacttgagattgttaatgttcttgtcttgtttggttggaaaaaaattaaaaagcatgtggcatacgaatacgcaaagaaaggagcatatttggctcttgttgctcgaagaagggatcgtctagagattgtagcagaaacatcacgtcaattaggatctggtaatgtcatcatcatacctggtgatgtttctaatgttgaggactgcaagaagttcatcgatgagacgattcgtcatttcggaaaactagaccacctgatcaataatgctggtgtatttcaaactgttcttttcgaagatttcacacaaattcaagacgcaaatcctataatggacatcaacttttggggtacaacatacatcacctattttgcaattcctcatcttcgaaagagtaaaggaaaaatcgtcgcgattacatcgggttcagcaaatatacctttgccattggcaagcatctatgcagcaagcaaagcagccttattaagattctttgagacattaagaatagagctaagtcctgatatcaaaataacaattgttctcccaggagttgtatcaacagatatgaccactcctcactgtatagagaagtatggttcggattttattctatcggaatcagtgagtaaatgcgcaaaggcaatcttcagaggtattggcagaggagagacatacatagaagaaccatcttggatgaaatggctgtttataatgaaaaatgtatgtcccgaaatcgttgattacggacttaactatctatttgttagttatctaaaaccttatttcaagcgtgattgatcataacaatcaatcccaaatctataatctttttaataagggttgtgtacttgtcttcctatgatgactatttttcaat

SEQ ID NO: 180 - DNA, 1622 bp, Arabidopsis thaliana
  Clone ID: ARATH-23APR03-CLUSTER126667_1
cataaaaattcaccagattttttttgggcgatatctcgaaactaggccccggcccccccccgggctctgtctctgtcttctgctccttccttttgtgtctgtgtcccttttcttacaattttatataatacaacttgatttcttgaagttgtaaaaattgcattttataaaaacaatagcatttacttgtgaaggcaattaactaagcttttgtttagtaactttctcaatctccagacttagtttgattctgatgctcttgtagatacatttcagctaaggcagcaaacgttgctgatccaatgggaagcacattctcgtcgaggaagaaataaggcgaatgaaccgaacgcacagaaccgatttcttcgtttcttataccgcttcctatgtagtaaccgggtattttttgttgatagaaagcaaaatcctcacccgccattaccttgttagccggtttcaccttctcgggtccaagcaagagtttcaaaaccttttcagtgaattcgtgtagcttgtgatcgttcactgttgctggatacataggatgatcgtccttcatgcatatctatatccgctttgcatctttgtacttcagcttgtccttcaaccacctctttcaaccgctttatcaaccagttgatgccattggttgtaagactcctcaaagttcccccaaattctacatatgccggaatcacatcaaactcagacccgccacttttcataaatgtaacagagagcacatggcttaagagaggatcctacttctctggagataataagttgcaatgctaagatggtagatgatgcagccaacaccggatcaacacaagaataggtctccgaagaagcgggtgatttaccactcattcttacactgaaaatgcttgtggatgccaaagcaggacccgagattgttgctaattctcctgtaggtaagccagtatgaacatgcatcccaaatattgcttcagaatcacccaaagcaccttcttttatcatatgaaaagcacctgcaccaccttcttctgctggttgaaaaagaagcctcactgttccattgagcatacgtttgcgtttgctaagcaatttagcagcaccaaggagcatagtggtatgagaatcatgaccacaagcatgcatttccatcgattttgctcttatgatcccactcaacaagttcttgtaagggaagagcatccatatcagcacggagagcaacaaccggaggataaccggatccgatttgagctacgatcccggttttcgcaaccgggtaagaataagaaacccctaattcatcaagctcgcgacgaatcagagcacttgttttatgtaactcgaaaaggagttctgggttttcatggatttgtcttcttacagacactaaccattctttatcacctaaagcttctgttagatattgatttggatactcttgatctcctccattgacggaactagcgataacaaagagaagaagaagagctacgattgaggaattagccatgtcaaatttgaagtcaacggaaccctaaaaagctatgatcggaaaattgactctgttcacacttggttatattctaagtgaagaagctgaccttgaagctcgaaacttg

SEQ ID NO: 181 - DNA, 1235 bp, Arabidopsis thaliana
  Clone ID: ARATH-23APR03-CLUSTER126819_1
tttttttttttttttttggaaaaaaactgagggtttcattgttaattacaatttacaagctattctacaatggaattacaaaatgaaaaaagaaaagtcatgatacagatacaacactgtcacaaattatacattgatttgaaaccaatttatccatggcacttccttgttcaatttcgaattttctgctaaacttattccacaaatgcaatccatagcttctcttctgcatttcaagaaccttgacttgaactctctttgaatctttctctgttcttggaaccttgaatagcttctcaatctcaacccaattcactggataaaacgcaggaggtgtcaagatggtgaagttatagccatcggttccttccacggctcgagccactcgtgaaacaagatacggtccgttatgtccccaaacgtttccattaaaagtcaacgcaaattcttcaatggatttgagcaagaatggatgattcttgtcgaagatcaataccgcattgttcaatcttgtccagtttctcgaaaccggctccagagtctgcgcaccgatcacgttccttagagttttaaagctctttaaaacaatcatgtctgtgtctagataaacacctccgaatttgaacaaataagcaagtctcatgaggtttgatagattctgagctagagagatctttcctggatctcttttaccggtctgaatctcttcaagccaagattctccggctgtgtccttgagaagaaaaggcaaatccggcgtgaccgccataactcgaacaattccgcaggtgagatccatgtcatcatgaacttgacctcacaatcatctctcaaaaactctgttgctctctgttgaaacttctccgacacgtctttgcctccaaaaacttcaagaacttgcagtttgttaatctcttctttgactgtgatttgttgcttgatcgaatagttattgttgacttgatcacttacctccttctctgagcttagaggtaagtaaggaacaattgtcttgatctctattgtcaccaccttcgctgagaaatcttctctcaccgataaattagagacgagaacgatggtgaaaacgaccagagctataaccgtggaagcaaacgctgtgaagagtgatgatccagagcggtttaactacggtgatcaaacatcgccctgactttcgtcgtgatgtcatgatccattttttggaaaataagttaggagaagaaaaaaatagt

SEQ ID NO: 182 - DNA, 1097 bp, Arabidopsis thaliana
  Clone ID: ARATH-23APR03-CLUSTER126880_1
tttttttttttttttttgtcaactatgtcataatgacatctcaaaatttgaatcaaaatcatttattagtttggtaatcaaaagtagtaagcaacaagattttttggtttggaataagaagaaattcacattgagaatgtgagctcttctaaatcttctcgaccctaaacgaatccatgactcttcttagatctttttcttcttccaggaaaactttctcgggtgtttggagtctaattgaatagagtctatcgttatcaactcctagaactgcaaggtagcgccggttccattccaaacgagccactcgatcttgtggcatcacagctagctcgttgttgtttgcgtatgactttatgttcacctcaacttggtagtagagtttaccatcatctgcaactctagaggaagtgcttagaatgttggcctggcgcttaaccccgagtctagtggacataaactcagtcaagtactgtctaagtactctctttcctacttcttcaggggatcccaagtcttcaagtgacgtgtaatttgaggaagaaggcgaagaaaactcgactgaaaggttctcgtcgaggacaacagggtctctaaagaatatatcagcaccagctcctcggacttggatccaattttgagggtacttgaaggagtatccatcaaatgtatctatgtattctctaaacactggagttgaagcaaatgctgttggaagattggcttgtgaaactattaaaccagacatgagcaagcccatcatcatgctcttcctcctcccaactgcacaaacctgtttggcatcggttaagcagtttatggcgactggagattccggtttagcggacttggcagattggtatttaggaccggaagagatgggtctggagaacaaaagatggaaatctgtaaccaaagatcgagaagaagacagagaagttgatttgaaagaatctgttgaggctcctttggttattatgtaagaaggaaacgcaaatgcagatgaagccattagagtggatttttgaagctcagaaaaattgaaactttggactgtaagagtaatccactgggaaaattgagaattttggttgggt

SEQ ID NO: 183 - DNA, 995 bp, Arabidopsis thaliana
  Clone ID: ARATH-23APR03-CLUSTER126999_1
tttttttttttttttttaactttgatgaataaaaactctttaccaagtttagtgaacaactgtctgaaatgtaaaaagcctcaaagcacaattgcttgaggataacattcagaaacttgcaaatctaatgatctccaaatgtgtttgcattcttcccaccttgaactcatcctctccagaaatttttcagcccacacttccttgctaccttccatactcagatcatatggcactgaaaaacttgttagctcttctaaatgagagtccttctcggtggtaccattcctgcatactagaactttgaataggcggagggatttggtggataggttgtagattgcttcttctatgtgatctgtgccaaatagatacacaactggatagtccagcagccatccgtttaaggttgggattgtaactttagtgtcttgtaaacaacagctaagatcaatgcataaagaagtctgagaagatttggcctcatcaagtaccgtagtggtatcagtattgctgtcatctaaaggaaatgtcgaagagaatagcttctgaatcgatctaagctgcatccccagattgctttcattgctttgtgttaccatctttggaggatcttgttccaagtcaatgaagaacaactcgggttctgaatctaagctggagcttacaaacttgggcaggcttcttacatttatgaggtatatcatatcctctataaccataaccttcagatctttaaaaactggtaaaccctctcggatgagctcaagaagtgacagcaaacgattctgtagctcaggcatctttccaccatagtcaatcatcacaactggtctcattcctgtgcataatgccagaacatctatttcgagacggcgtttggaattgctcttgagtcgccatttgatctgagagaggcaagaactcagaaactgaagtagttcctcagagcttgggacctccatattcgcagaaaaattgaagctttcttcttctct

SEQ ID NO: 184 - DNA, 1468 bp, Arabidopsis thaliana
  Clone ID: ARATH-23APR03-CLUSTER127091_1
ttttttttttttttttaataaaagaagctttgtgttattaatccttaactgtaataaaatgaattaattcataatatatacaacacttacatgtaagaaattgacaagaatttgtgtcttcagtgtgtataccctctctgtgcagctacaatgaagaccattagaatcggagaagcaagaagaatcacatataggagtgtctcatttatccccattttcctctcctttcttttttctcctgcgctttgtaattcgttttatcttcaacaaaggcttcaaagtagtcctgataaccagtgtttccttcagcaaagctcgaccccttaaccttcagcatctccattgcctgaaaactgaacatgaactgcctcgctttcttgctcactcccgggtttggatgggaaataagcttctcatacatgcgccttgctttgtctgtctttcgaagtgaatcctgacaaatagaccactgcaaagccgctagtccatgaagctcactctgcacaacttgaaaactattttctccatgaccttttcatagtatggcaaagcttccttgagtttcccagaatccataagcgagttccccacgtctattgccttctcacactcaagtttgagtttgggatcaatgttcagtccgagtgattccttgtaggctatgagcaatttttttgtcttttgttctctcacaatcctctcttcagcggtctcaactgaatcccccggtcggagtgtccttccacccccaaacgtcttagagatgttgctaggtcttgggaaaactccccatgtagaaactttgggtttatacacatcagagtttccatctccttcttgctcaacctcctttactttctccgcaaatcttgttttatcaccaacaataaactccacctcaggtaagtctccttcaggaagatagtcaacaacaggaacaagtcccgctggaagcccccttgtgctcttcttatcagcaaagccaagccccatgaaatcaatgctggagactttcaattctttcttcttaacatcattatcttcaacaaccttatttgttaatctaacaaaactttgctctgtattactgggtttagcttttgcgactgcatcagttccaagtcctttccttttcttataagcattggctttttgcatagcagccttaacagagagcggcaattcctcgtcgccggcgtttttctctggttctttttgctctgatttcgatttcttataagcttcggctttcttcaatgcgagcttcaccggatccacatcgagctcaacctctgacgagcggtccggtgaggacgagttgctccgagttcggaaaagtgagagtttcaaggattttgggtgtggagatggaggaaaaaagaaagtgggagtttcggtgagtggagaagagagccaagagtggttgaaagaagccatggattggtcgcgcgcgcgccggctgctgagc

SEQ ID NO: 185 - DNA, 2248 bp, Arabidopsis thaliana
  Clone ID: ARATH-23APR03-CLUSTER12714_1
tcgacgcatgtcctgcacttaacctaccaaaaacaatctctcctaataagagagaagaaagaaaaaaaattataactcagatattttcacacatatataaataaagttttgtggtgacgttattttacacgaaaaagctcaaccttgtatggaagtaattagctgctacctattactgattattcttcttcttcttctttcttccaatttcttgtcttcttttggtacaatttcttggctttctcttgtcaagttttcaccagtcacaagatttttgaggagccttgttttttccgagaatcttgttaatcatattgagagattaatggagagtaatatgcaaaacttgttggagaaattgaggcctcttgtgggtgcaagggcttgggattattgtgttctttggagactaaacgaagaccaaaggtttgtgaagtggatgggatgttgttgtggtgggacagaactcatagcggagaatggaacagaagagtttagctacggaggttgtagggatgttatgtttcatcatcctcggaccaaatcttgtgaatttctttcccatcttccagcttccatacctcttgattccgggatatatgcggagactcttctgactaaccagactggttggttgagtgagagctcagaaccaagttttatgcaggaaacaatctgtactagggttttgattcctataccgggaggactagtggagctctttgcgaccagacatgtcgctgaagatcagaacgtggtggattttgtaatgggacattgcaacatgttgatggacgattctgtaacgataaacatgatggtagcagacgaggtcgaatcgaagccgtacgggatgttatccggtgacatccagcaaaagggttccaaagaagaagatatgatgaatctcccttcgtcttacgatatctctgctgatcagatccgactcaatttcttgcctcagatgagtgattacgagacacaacacttgaagatgaagagtgattatcatcatcaagccttggggtatctcccagagaatggtaacaaggaaatgatgggtatgaacccatttaacacggtggaagaagatgggattccagtgattggagagcctagcttgcttgtgaatgaacagcaagttgttaacgataaggatatgaatgagaacggtagggtggattcagggtcggattgcagcgaccagattgatgatgaagatgatccaaagtacaagaagaagtcaggaaaaggatctcaagccaagaacctgatggctgagagacggaggaggaagaagctaaacgataggctttatgctctccggtcgcttgttcccaggataaccaagttggacagggcgtcgattcttggcgatgcaatcaactacgttaaggagttgcagaatgaggcaaaggagcttcaagacgagcttgaagagaactcagagactgaggatggatctaataggccacaaggagggatgagcctgaacgggacagtggtcactgggtttcacccggggctttcatgtaactccaacgttcctagcgtgaagcaagatgttgatcttgagaattccaatgataaaggacaagaaatggagccacaggtggacgtggctcagttagatggcagagagtttttcgtaaaggtgatttgcgaatacaaaccaggaggcttcacaaggctaatggaggcactggattctcttggactagaagtcacaaatgctaacacgactcgctacctcagcctggtctccaatgtcttcaaagtcgagaaaaatgataacgagatggtccaagctgaacacgtaaggaactcgttgctggaaataacccggaacacatctagaggatggcaagatgatcagatggctacaggctctatgcaaaacgaaaagaacgaagttgattatcaacactatgatgatcaccagcatcacaatggtcatcatcacccatttgatcaccagatgaatcagagcgctcatcatcatcaccaccaccaacacatcaaccattaccacaaccaataaggaccaattccccaaagctataaagatgtctgctttacaagcaaaagaaacattttgcatcaacaaactttgaagatcttttcatttcaagatatataaggataaaaggaatgtcagttcgagaacagttcctgtatccaataccaggaataaaccaaagcgaaacaactttcccttaaaaaaaaaaaaaaaaaaaaaaaaaaaaaa

SEQ ID NO: 186 - DNA, 533 bp, Arabidopsis thaliana
  Clone ID: ARATH-23APR03-CLUSTER127253_1
ttttttttttttcaaatacccgataactgtgatagaagtaacagagctacagagaagacctgaagaactgggaaatccaggtataccatattcgcccatgtatgcaatatgctctaaacagaaaacttgcatactaaaacttgaatgattgaaactcttttttaaatgaagtcttttaactcttaatccatccaaaaccacattgtcaaaatacattgattactcatctactggcgaaacatcacgacctatagaatgctaaagacatattgattccaacacatttataagttttttttttgtagaaactaacaaagatgaaacctcattctcattcgaatttaggctctgccaccacgaaatggtatgcaatgaccattatgaagatgaaaatccccagaaaattggcaaagaagccgaggtcttggtcgtcaaacatctttggagagctcaaaagatacagacttccttctttgattcttccctctatcgactctacgaagcagatcgaaaaagaagaagaactgaagaat

SEQ ID NO: 187 - DNA, 1137 bp, Arabidopsis thaliana
  unsure (1)..(1137): unsure at all n locations
  Clone ID: ARATH-23APR03-CLUSTER1272_1
atagccacataaaaaatggcgatgatattttgcaacactctctactcttcttcttctccatcatatctctcgccgttaacttcaaaaccgtcgcgattctcaaagaatctcagacctcgagctcaattccagtccatggaagaccacgacgatcacctccgccgaaaatttatggagttcccgtatgtgtcacccacgcggaagcagctcatggttgatctcatgtcgacggtggagaatcgcctccaatcacaactccttccctgtaacctccctccagatgtacgaaacttcaataaccctaacggttccgccgaagcatctcttcatatcagatccggcgacaaatcttctccgattgattttgttataggaagttggatacattgcaagatcccaacaggagtatctttgaatataacaagcatctctggattcttaaactcatcaacaaaagctccaaactttgtggtcgaactaatacagagcagttccaagtcgcttgtgctaatccttgacctcccacatcgtaaagatcttgttcttaacccggattatctcaaggagtattaccaagacactgctcttgattctcatcgacaatctctccttaagctacctgaagttaacccttatgtgtctccttctctctttgtccgttctgctttctctcctactgcttcgatgcttaagattgatgcggaggaagaggataagttggaggagatattgagagatcatgttagtccagctgctaaggaggttctcgaggtttggttggagcggtgtgtgaaggaagaagaagagaagattgtggttggggaagaagagagaatggagttggagagaagagataaaagctttagaaggaagagcatagaggacgatttggatttgcagtttccgagaatgtttggtgaagaagtttcctcccgtgttgtacacgctattaaagaagctttcggtgttctctagattatgtaactatatatatacatcagttaatgttcattgtactaaacatttactttcatcaatgtcacaagaacgcaagatgaccatcaaaaaggggccggncccattcccctttnggagnnnntacaatnacnggccgngtttaaacgnngnacgggaaac

SEQ ID NO: 188 - DNA, 646 bp, Arabidopsis thaliana
  unsure (1)..(646): unsure at all n locations
  Clone ID: ARATH-23APR03-CLUSTER127353_1
tttttttttttttttttgacacaaagtgttatactttatttaatattattcttcatnagacattaatagatatgcttaacaactttttagtaagcatcgatagtccttataattacgttctaatcaacaacgaaacacacaccaacactgtaaaacattaatagataaacccatacttttggtaccagcaaacttatagtgcaaggaaacaccggatagggctcttatttaggggaattaagtagtagttactgtggtggtggacactggaaaccgataggaaaaaccctattgcaagcaaaaaagatttctctaacggccacatcaataccgaaaaccaacggaatcggcctgaagataaagcagagacaatcggttacttgaacattagtgaggccattgagggcagtgcaacactgtcgtgctctggggtcgccagctgtaacattggctaggccaaggacgttggcacatacgcctagttgcaatgggtttctgggacatgagccaaagttgttggtcggtgtaggcgagcttaagaggtttgcttctgcgaggctgatgaggaggatgatgatgagggaaatggtggttgagctctttgaggccatttttttattttattctgtggatatgaaagtgtgga

SEQ ID NO: 189 - DNA, 1369 bp, Arabidopsis thaliana
  Clone ID: ARATH-23APR03-CLUSTER12749_1
agaatcagaagagagtacatgagtttcctcttctgcctctttggtgattcttagcatttattattactcactcatcttcttttcattacataaactaacccacagtagaactaaattacacttctctttcaatcatttgcgtctcaccggctaatctcattcctctgtcatttttacagttcttcgatcgaaaaccggatgtgagaagcctcgaggttcaaggatttgcagaggctcaaagctttgctttcaaagaaaaagaggaagaaggcttacaagatacagttccatttctacagatgctgcaaagtgaagacccctcatcgtttttttcaatcaaagagccaaactttctgacgctactgtctcttcaaaccctcaaggagccttgggaactcgaaagatatctttcacttgaggattcacaatttcattcaccggtccaatctgagaccaaccgcttcatggaaggagccaatcaagctgtgtcaagccaagaaattccctttagccaagcaaacatgacactcccttcttctacctcatcaccactcagtgcacattcaagacgaaagcgcaaaatcaaccacttgctgcctcaagaaatgactagagaaaagagaaagaggaggaaaacaaaaccaagtaaaaacaatgaagagattgagaatcaaagaataaaccacattgctgttgaacgaaacagaagacgtcaaatgaacgaacatatcaactctctccgggcccttctcccaccttcctacatccaacgaggagaccaagcttccatagtaggaggagcaataaactacgtgaaggtcctcgagcaaatcatacaatctctcgaatcgcaaaagagaacgcaacaacaaagtaacagtgaggtagtagaaaacgcacttaatcatctctcaggcatttcgtcgaacgacctgtggacaactcttgaagatcaaacttgtatccccaaaatcgaagctacagtgatacaaaaccatgtcagccttaaagttcaatgtgagaagaaacaaggacaacttctcaaaggaatcatatcacttgaaaagcttaaactcactgttcttcatctcaatatcactacttcgtctcattcctctgtttcttattccttcaacctcaagatggaagatgagtgcgacttagagtcagccgacgagattacggcggctgttcatcggattttcgatattccgacaatttgattaaacacatataattccaaaaatattaacagctgacaaaatggtatcttttttttttttcctacttgtaccaattttttaagaattaagagaataaaaaaatttcgtttttcgttcaaaaaaaaaaaaaaaaaaaaaaaaaaaaa

SEQ ID NO: 190 - DNA, 1382 bp, Arabidopsis thaliana
  Clone ID: ARATH-23APR03-CLUSTER12750_1
atggtaaatttggtaaacgtatttaacatgtcaaagtcaaacccttcaaatctcaaatattacaatctccatccctcttttaaacaccataaagccttaaacctcaaaagacatttcaacaacattcattttcattctcactccccaccaaaaaaaaaaaaaacagaagccatgaactcctcgtctcttctaactccttcatcatctccttctccacatcttcaatctcctgcaacattcgaccacgatgatttcctccaccacatcttctcctccactccttggccctcatccgttctcgacgacactcctccaccaacttccgattgtgcccccgtcactggattccaccaccacgacgccgattcaagaaaccagatcactatgattcctttgtcacataaccatcctaatgacgctctcttcaatggcttctccaccggatctctccctttccacctccctcaaggatcgggaggtcaaacgcaaacgcagtcgcaggcgacggcgtcagccaccaccggtggtgcaacggcgcaacctcagacaaagcctaaagtccgagctaggagaggtcaagccactgatcctcacagtatcgccgaacggttacggagagagaggatagcggaaagaatgaaatctcttcaagaacttgtccctaatggtaacaagacagacaaagcatcaatgctcgatgagattatcgattatgtcaagttcttacagctccaagtcaaggtactaagcatgagtagactgggcggtgctgcttctgcttcttctcaaatctctgaggatgccggtggatcccacgaaaacacctcctcctccggcgaggcgaagatgacggagcaccaagttgcaaagctaatggaagaggacatgggatcagccatgcaatatctacaaggcaaaggtctttgcctcatgcccatctcgttagccaccaccatctccaccgccacgtgtccttctcgtagccccttcgttaaagataccggcgttcctttgtctcctaacctatccactacaatagttgctaacggtaatggctcatcgttggtcaccgttaaagacgctccctccgtttccaagccgtgataacggccatttgtccatttcattttcccttttttgggtgggaaagagagaaaaaagtttagaagacaaagacaagtgggataggtggttttggtcaaagtttagaaagaataaggtcgtgttttcggatacgacaccgtatttgcgtacactttggttttctgtctttacctactacaaaccacccataagcacactcatgttatcatgtttttttttttttggtttataaagttatatccttaagcaaaaaaaaaaaaaaaaaaaaaaaaaaaaaa

SEQ ID NO: 191 - DNA, 1235 bp, Arabidopsis thaliana
  unsure (1)..(1235): unsure at all n locations
  Clone ID: ARATH-23APR03-CLUSTER12752_1
aaggaataaacttcgtgaagagaaatgactctagaagctttatcatcaaacggtcttttaaactttttgctctctgaaactctttcaccaactccattcaagtctctcgtcgatctcgagccattgccggaaaatgatgtcatcatatcgaagaacacaatttcggagatatctcatcaagaaccgccaccacagcgacaaccaccagctacgaatcaagggaagaagcggcggaggaggaagcctagggtttgcaaaaacgaggaagaagctgagaatcaacgaatgactcacattgccgtcgaaagaaatcgaagaagacaaatgaatcaacatctctctgtcttgcgatctctcatgcctcaaccttttgctcacaagggtgatcaagcttcaatagttggtggagccatagatttcatcaaagaacttgaacacaaattactatctcttgaagctcaaaaacatcataatgctaaattaaaccagtcggttacttcttcaacaagtcaagactcaaatggtgaacaagagaatcctcatcaaccatcttcactatctctatcgcagttctttcttcattcatacgatccgagccaagagaataggaacggctcaacaagctcggtgaaaacccctatggaagatcttgaggtgactctaatcgaaactcatgctaacatcagaatcttgtcgagaagaagaggtttccggtggagcacgttggccaccaccaaaccgccgcagctttcgaagctggtggcttctctacaatcgctgtccctctccattcttcaccttagtgtcacaacattggacaattatgctatttactccatcagcgctaaggtggaagagagttgccagctaagttcagtagatgacattgcaggagcagttcaccacatgctaagtatcattgaagaggagcctttttgttgctcatcaatgtcagaattaccatttgacttctctttgaatcactcaaatgtcactcattctctctgagaaatctcttttttgttgttgttattccttcttttaattttatcacatagcacatctttagtttttttttttcagaatgaagaaacacataagctttcttttaaaaatcctaggttctttttctgactttggaaggctaaatggngaaatttataatggcacataacatattaggtggtttactcttaatttttatgcattttcngtaaaaaaaaaaaaaaaaaaaa

SEQ ID NO: 192 - DNA, 792 bp, Arabidopsis thaliana
  Clone ID: ARATH-23APR03-CLUSTER127556_1
tttttcatattcaaagaagccaacttttactctgatagccattacagaaacacaaagcacaaaagtagtagcttacagattttaacaaatcaacaacatcacttgtgtccttttaaacggataattcaatctgagaaacaaggataccatcagtatctgcataaagccattcgccatcgcatatccgagtgcctgcaatgttcaaagagactctttgttcaccaagtcctttcttactagcctttattggatgagaagctaaagctctcactccaatgtcgcaaccattgatctcatcaacgtctctgatgcatccattcactatgatccctgcccatccgttgttctgcgcttgtacgaccgggtttcctcctagtatcgcacagcgtaaactccctccaccatccaccacaagaactctaccattgcctttctcttcgaggaagtgacggattaagccattgtcttcaaagactttaacagtaactactggacctgaaaatatttgacgacgaccataaatctgaaaaacgggttgcagagctcggagctggccacttcgaatcatctcttgattcgcgtcacacacttccgcagtggtcacaaacgccattttttcttctcacctggaatagaagaaactaggacgaagaagagaaaactctgtgtgcgtaaatctctgagaaatgaagtgatgataatttaaaggagaacaaagtcatcaacatacttgtttcggtcctcttctgtcgtcttctcgcagccgtacggacgcgtgggcggacgcttggg

SEQ ID NO: 193 - DNA, 2262 bp, Arabidopsis thaliana
  Clone ID: ARATH-23APR03-CLUSTER12756_1
ctaaataaaggagagagtgggtcgcagtgatggtgagagcggtcggaacaggatgtacccatgagtggagatgcgcctcagtacccaagggttgtcgttcatgtcggacctaagtgaggtcaccttagtgatatccgtagtttgtgggagagggtacgaagagagaagatcaatgaactgtcttagagaaagaaaaaaaacaaaactagctcacaaaaaggaaatcatattttgatttaatttgtagtgtctctaatggcacggtttgagccatataactataataatggtcatgatcctttctttgcacacattaaccaaaatccagagctaataaatctggacttaccagcttctaccccttccagtttcatgcttttctccaatggagctttagttgatgccaatcacaataattctcacttcttcccaaatttattgcacggtaatacgagaagaaaaggaaataaagaagagagtgggtcgaagagaagaagaaagaggtcggaagaggaagaagccatgaatggagatgagactcagaagccaaaagatgttgttcatgtccgagctaagagaggtcaagctactgatagccatagtttggctgaaagggtacgaagagagaagatcaatgaaaggctgaaatgcttacaagaccttgttccaggatgctacaaggcaatgggaatggcagtgatgcttgatgtcatcatagattatgtacgatcactccagaatcaaatcgagtttttgtccatgaaactctcagcggcaagtgcatgttacgaccttaattctttggatattgagccaacggatatatttcagggagggaatattcatagtgcagcagagatggaaaggattttaagagaaagcgttggaacacagcctcctaatttcagttcaacattacccttttgatcataaaaaaattatgaattttcagagaaattattctcttttttaaaaattaagatcaatggcgaattgctcatgtgtaccacgactcatcttcagcaaatcttgactgagatgataacttcgagaggagccattgcatgaatccaggaatggggctaagtgttgcaaatgtagaaacatgtggcatgtcttttttcaccaacgtaatcactcgtttgatcagaaattttccgaggtttatcccagctaagccaggctgagttgaagaaatagagtaaaataaagcgcatgttgcttggttctctggtatgggaggattgtcccacaaaacttcctgaattgtctgagcaacagtctccataagagcaacttctataaaaataagtggctcaccaggaacagatggatgaaaatatccaaagcatcgacggcctattcccaatcttcttttaagatccaagaggttgctgattggatgcaccgcctcatatgcaacaattttctcaagcaatgaagcaggatcatcccaagtaatttgatgaagctctaaagtggcaggactaagccacataccgagtttctccttcagaaaagaatctaatgttcgcaaagacggcgtgttctcttttgagagtatcgacagaagatcagctcggaggatggacaaaaatctcaaccctccaggatgtgtattcaacctctcaaataaaacttcatatgttggcctaagagcatgcctcagattcctctcaatgcgatagaaaacagaagataaagcccccttatcatcatcactagctggagtttcaagtccaagatattgcttaacaagttctcggacttgctctcggttaacatcatactccttggctaaaacaagcagtaacttctcgcggtcttcaagcgaaaggctaaagtaaccctcttgaaaatcattaagagtaatgtctaatacaccagttttactagctgagatagctgagtgcattgtctctcgaacaacatcataaacccttccagtggtaccaaaatcattagaattttgcacaatgtgatctctagaatgattctcttgaggattagattgaatttccttaggaaattgagagagggaaaatttggagggattgttggatctcattctagcacgcaacagaatcgctagatttttcttgctcatatctgtttcattatgatcatcatcatcacggttaaaatttcatcggagaaaaaaaggaactcaggaagaagaaaaaagccatttcgcaatcagacatgacaggaaccttaaaatctggccggacgcgtgggcggacgcgtgggcggacgcgtggg

SEQ ID NO: 194 - DNA, 1945 bp, Arabidopsis thaliana
  unsure (1)..(1945): unsure at all n locations
  Clone ID: ARATH-23APR03-CLUSTER127583_1
cgtattgggtgccctcactagtcaaagtttcgaaccaactaaaccgggtaaggtaagagacaacttgctgccttggctgtaccctgataatgatgtactcactagtcactgtgtccaaccaactaaaccggttaaggtaagagacaacttgctgccttagctgtatccagaaaataatgtaaagactaaagactgagagcatcatttgcaagaggcaggggattttattaactctctcttggccctgggtatagccttctaagagaactacatcgacgcttctgctttctacctgttgagagtcttccagatgcatgcaaagcctcttctgccatagccctccagtgttgagcgcaggagtaataaatgccaatccccacgctgagtcctcttaacagatctactgtgcgaagaacagaaaagagttcctctgcaaatgcctcatccgaaatctttttgatcgaagagtcttctgacaaaggttgcagagttgccgcaccaggaggcatccctgtgtccaaaattgtttttgctaactggagaagctcttgtcgctcattcttacacttggcgaccgtagctttacccaagttccctaaagctatgccccgcctgtggacgcgcagggcagagccctccctgcccccagccccgcggggccacccctcacccggtcagggagttctttccccgggcctgggcccccctgtgcaactcccctctttagttgtctggcctctgaacctttaccaatcaagatattcccaggatgtggatccgcatgaaagaaaccactcttcagtatcatttggccatatgcttgggacaaactgtgtagtatattgaattttgctgcctctgccattttaccatgaggatttatccctctttttgccatctcatcaccaaggctccaggatcgggattccgttcatgaattccataaccagacccttcctggtcaccaaatttggaaacaccctgggacccagaccaggactctttctattgttatcatatagaaaacgtcggatcttctccattgcattggcctcccttttaaagtncgaattcatacccaatctgcttctctatttcctttgtcatggagaacaagtcaaatttgatatcagttttctgcatgtataatgcaaatatttgcaagtttctgatatcaaccatcatcaacttctcaacgccaggatgttggacctttacaacaacatccctcttgtcaccctttactcttgctcggtgtacctgagcaatagaagcagagccaagaggcttctcatcaaatgtttcaaacacttgttcgatgcttttacctaactctttctccaggacaactcgaacggcatcaaatggtgtggcaggagcttgatcacacaaagtgacgagttttctcacccaagcagctggagccaagtcaggtttccctagaatttgtgcaatcttaaggaagaaaccaccaaggtcagagcacatagaataaactttatgagcagcaagttcatgttgtctctcccacatctcctcgtgcttattaacatccttgacgaagttcatacgaagttgaaatacccatcaatcaaagagaaaccttgtatccggtgtagatatcagtggcacgagcccagaactgaaacgatcgttgccaaggccggaatccatcagagagcttctcctgaatctctttgaaatcgatcgcatgcattttcgaagttttgaggaagagtgataaggatgagaggataaagttaagaattgtttatgtatggcgtcagagtggagtttgctgctctctacgaatccattcgagagtgttaattactgtttcgttaaattgtaaaggaaacaaaatccgtttgtcttatgtcacactcactgtgagtccgggggggggggggggggggactagtgagctcagcaccagctcgtgcgg

SEQ ID NO: 195 - DNA, 1150 bp, Arabidopsis thaliana
  Clone ID: ARATH-23APR03-CLUSTER12780_1
actttctctttgttttctttctaacctctttccacgaaaagtcacgatgggagataccgcagaggatcaggacgaccgagctatgatggaagctgaaggagtaacgagcttctccgaacttcttatgttctctgacggcgttctcagctcctcttccgaccaccaacctgagggtaatgtcggcgatggtggagaagacagtttaggttttgtattctccggcaaaactggctcaagaatgctctgttttagtggaggctatcaaaacgacgacgagtcactcttcctagaaccttctgttccaacctccggagtctctgatcttgacccttcatgcattaagattgattgcaggaactcaaacgacgcgtgtacggtcgataaatctactaaatcatcaaccaagaagagaaccggaacgggtaatgggcaagagtcggatcaaaatcgaaaaccgggcaagaaagggaaacgaaatcaagagaaatcatcagttggaattgcaaaggtcaggaaagaaaggttaggggaaagaattgcagcgttgcagcagttggtttctccatacggcaagacagatgcagcttctgtgttgcatgaagcgatgggttacatcaaattcttacaagatcagattcaagtcctttgctctccttatctaatcaaccattctcttgacggtggagttgtcaccggagatgtaatggcggcgatgaaagcgaaagacttgagaagcagaggattatgtctagtacctgtctcatccaccgtacacgtggaaaattccaacggtgctgatttctggtcacctgctactatgggtcacactacgtcaccgtcgttacctcaaggattttaattaaacggtcgtaggctgatatatattagtagtattttagtagccttttttcttgggttttgtttttggctgaagaactattactagtaaatgttacacccagacatttttttgggattatctgggtggtataaaaaggttggaatcttttgtgtttgtaaaattagattgtctaagttttcttaaagtttctttgatgtcactgtcacagttgcgacgagtagtgatggtacttactgaaaggctaagcttattcacgctcttaaagttttgcaaaaaaaaaaaaaaaaa

SEQ ID NO: 196 - DNA, 669 bp, Arabidopsis thaliana
  Clone ID: ARATH-23APR03-CLUSTER128006_1
tttttttttttttttttagcagtataataaatatatgatccttgcccatatcataaacatgtgttcatgtcgatgcatattacgcaaactaattttgctctccactctagttttcacattcaagacatggaaaaatcaagaacgagattgaaaaatgtaaaaaagatgatacattacaagatgactaaatgggttcataaggaaaaatccatagttcatgtgtcaaataggtttaaacccaaaaggcaaaaattatttatctgaaagacaatctgagaaaatattgagatcttgttgactgactgcaactcccagtttttcatttgctctctgcatcatatatatccgttacaagatagaagccatgagcaaaagcaccgacgaggacaagaccgaagagacgatctcttagaactggcttatgccttaaagacaaccgaatcaaaggaagcgcaggtgcgtagatgagaggtactaagaatttgatcggagctcctttcttcttcctctccattactggttttgaaggatcgcttgacgacgccatgacggattcttcagagagagatcttttttttttcaaattgcgatttgcgattcaatttagggatttcatctttttcactccatttttttttgtcttggttttcaacacttttaaacattttt

SEQ ID NO: 197 - DNA, 1622 bp, Arabidopsis thaliana
  Clone ID: ARATH-23APR03-CLUSTER128102_1
atacgctcactataggccgattgggtaccgggccccccctcgagttttttttttttttttttttattttgtgttttcaaatcatatataaacaaagtttacaaatattcatacaatgcaatctagtaaaattcaatattccttcttggaataaaaccaaatacagtatgtcaacaattccaaactaatccttttttgaggcaatccggttttgatagttctccccacagccacaggcgctaagtcagcgcaatatctctctgaaagatgatgatagggagtttctgtaagacctctctgctactgtaacagagctttcttagtttggtctgttgattttggtctctgtttgtagaaatttggaagtggcttcgctttgaagcatagcctttgccttagtttactctcttccttctccacactcctttcctccgccttctggttctgtgtctccatttccttgaatttcccctctagcttcttttttcttctctctgctctctcctctgttcttaagccaaacggtgtaaaacagctcggtgtctccgcagggaggaaattccatcttcctcgacctgtcttggcagaagaattaggagctatcttccctcttgtgttactcgataaaggtgtggacaaggagtcttcaaccattccctttgcagacaccttgtttgatggtgtccggagaggagttttgcagtctttggttggtttagaagaagctcttgacccatcaatcttccttatgatggacaccaatctattgaactcttttgcaggcgtgaaagtgtacgagctgctcttgttattagactttttacttggagtcctctccgatgaattgtacttagagactcttggtttagtactactctttggttgtgaatctttggatttcttcttcacagactttagtataggcttctcctcatccacttgttcttcagctgtgcggccattgatctctgactcagccatgccacagttctctttctcatcagattgtctattactaaatcggccttctttctctgcaagtaatttcaattgagcagaaacatctaaagatcctcttggaatctcaagatccggttttgagaccatccaatctttcttttctccttcattgatatcttcttcttgaactggagacttctctggttggggtttagggatttgctgctgaagcaagagtgcctcttcagcagcagcttttctagcagcagcgactttcttgtagtgagcttcaaagaaagctttcttctgagcaacagatccgggcttagagtatctctctgcctcagccacgtaagggttctgtgtggagaaagcagaccatttctcccagtcaagtttctccgacatgaatcttccgaaggacacagactgtcctaaagcaccaagagaatctccctgtggagctgcataagagaagggctgcatgagacaagcagattctcccattcttttggaacaattgtagttcaattccaaaaatgtatttgttaagtgttttagtttagaagaaacatgtgtgggtgaatgaaagaaaagaaagtagaaggcgggggggggggggaactagtgagcccctctctccctctctccccgggggccatt

SEQ ID NO: 198 - DNA, 1174 bp, Arabidopsis thaliana
  unsure (1)..(1174): unsure at all n locations
  Clone ID: ARATH-23APR03-CLUSTER128198_1
tttttttttttttttttgataaaagggacattcgcatttttattaccatcattgaccccagatattatattatacacataagtgatgcaaaaacagagtaacatggttttcaagtttttcattcatcttctgaagcttctcctttctttgggtgcttcatcttcctctggcaacttcacaatcgtgtaggttcctgctccaattaacgctccaagtattggggcagtaaggtaaatccaaatagctctgtaattgtttgctgcaatggctggacctagtgttcttacaggattcatcgaagcagaagttgcaggtccagctatgagtatgttaagcatgaccgttgctcctacggcaattcccgccaactctcccacagctctcgtgtcggtggctacggctgtgacaacgaacatgaggttgaagctgataatgaattccaaggcgaaagcttggctgagacccaccgttggcaccgtcacgtcaccgctcatcgttggttcaaacactgctttcagtgcaaacgccgcactcacggaggccatcacctgagctccgatatacaccggcacgtgtttccaagggaagtgtttgagagcagcaaaggcaatggttacagccggattgagatgtgccccggagatgtgaccggtcgataatataacgatcataaccgccagaccagccgaggcggcgcaaccaataagcgtctcagctccatctgtcttctgattcacgatcgccgtcgctgttccggcgaatatcaggatcaatgtcccaacaaactctgctcccaacttgcggtagagggaaacgttagggggagggagagagcaagtgaccggagggagtcttccatcttcaagagcccattcattgtcaacactgaaacatttgcagcttttgagaagtgactttggtgtgtatctaccattgtgtccattcctcttcccttcgaatcctccaaagagcggcgctcctggagtccccggggttgtcgccggcgttgagggcgtggatggaatttcctcatgatccatgtcgagggtagagatagatgagatctaattaatttgaggatatatgtttttgctatgattgtttttatgtgatgtnnaactaagggatgcgtagggtacggtatttatagaggaaggcatgagagttgacttat

SEQ ID NO: 199 - DNA, 1826 bp, Arabidopsis thaliana
  Clone ID: ARATH-23APR03-CLUSTER128337_1
cctttggcaaaaaaaaaaaaataatctatgacaaaattttgtaatatcaaatgaaaaagaaattgcaacataacaaataaaaaaataagacaataaaaaaataaaagaggatgtgaaaccaaatcactggcactgcaactattggcctaaaactattcaccctttctgtttttcttatttatttacattcactcctcatatttcctagattctctcagagaagcccctaatgttttaatagtcacatttcatccccaagaaatccaaagaccttcatacgaagaacctatatgagttacttcataaaaattgaaataaccgatgtattcagaccatttttttctctataatcaaatgattgaatataaaaccaaatcaatatgttgccaaaaaagaaaccaaatcaatataagccaaaacttgaagaagaaagaaactctctcttcatagcctacgcattctcttggctggtggagaactttgatcagaatcatcaaaagacaatcggcgtttagcgccacttcctgaagccggcggttcgcgagaaaccgctatttccggtggaggtgtcatatgtttcctctcctcaatctctagcgttctctgataacacaaatatacattttcctacaaaacccaacactcctaagattatgatcatcaacatcaaacaatcaaaatcgaataaaaagacaccaagatttatacattctcattagaagtccaccaagagatcgaaccaaacttgttagctatctcttctctagtcaatctaatatccgatgaggtagaagaagaagctagcaatgtagtaacagcagcaacaacaaactgtcgatactccgtaaaacttatctctttagttaaagcaagaagagaatcagaggatcttaacaacaccaagtctttagaaacagaatggttgtcctgagagattttagcaaggaagtagttgaagtaatgaaaaggagtgatcaagttcatcttccagtccaatgtggatagaatcaacagttcagttttacgaatgacatcgggtttgaaaacgaagtcatgatcttgagggtattgtgataaaccaggaacaatacgttcctccattttagcagctaatgataaacaagctactgataacaatcgcatcgcccatgtttcatctttctgcaaaccgatgaatcttttgtggagaaacagatcgaagtatgagattgcaatgtaagctgtttgatgttggaacccaaatcttgttcttgtagtgagaatccaatcgatagcaatcaatctatcggaagacgacgtcgttttagagggtagggtttcgaatcggagattctctttaagaacaaggtctgccacataatcttcatcatcgatcgtagtagtaaagtgaggttgcttatcagatctctcaatcgtctcgtcgtcgtcttcgtttagagaagactccgattcgtggcagaggaagagagcgagactgtctttaggctcacccatttaacggcggcgatgatgatgaagacgacggcggcggcggagatagaagtgttcttcttcttctgcttctgcttcggtggtgtgtccgtacacatcaaaaggggaattataaagaatttgtgagaagagtgttttttttttaatttatgagatgagaggcaaagttatcgcagtgaatataggggaagaataagaagggaagctaaatcatcgtatttgatttttcttccattactcgatttgggattttaggagcaagtgacgaaaaaacaaagaaaaaagagagagagagtggagagagagagagagtctcccgcgcccacgcgtccgct

SEQ ID NO: 200 - DNA, 2644 bp, Arabidopsis thaliana
  Clone ID: ARATH-23APR03-CLUSTER128367_1
acctcaccaaaacctatattaatttttgtttaactgtgtattacaaaatgtttataaacttgacatcaaatgatatactcgtacacatacatctttatatcttcttatattcatctatcaaaaacaaacacaaaaaaaaagaatcagaaaaggagaaatcataaccaaagacaaaaaaaatatgatttgagagggcaaaatcatctgaatggctccactggcattgtttcctccaaagtaacggcggcttgaaaacactcaacggcttcttgcatcgacgagacggacccttcagctttgaacatctttccaagattgtaccaagccgagtggttcagcctatcaatcctaagagcctccattagaaagcttctaacaaccgctatgcctgatcggttaccgacctccagcagtatctcagccttcgatgttaagcttgggacgtgcatcggatctatgtcaagagcggttgtgaacgcctccattgcttcttctaattgcccccgtctattgtacagtacaccttcaatgtggtatctaacagaagagtaaggtgcaatgagtcttgatctcgagagacatgactctgcgtcacgccattgcgagaggtttatgtaaatatgagccagatcgtgccacgtcccaagctccagactcatcaattcctttacatatcccttaggcagcttctttgcagaattgaagcttttgctttgaacctgaaggagtgctagaagttgtgtgtaagtcttaatcgcatctttcacttctcctttagctaaacgaagctttgccttcaaacgtaacagcttcccctgttcccatttccctgtctcgttaagcgctgcatccacaatggtctccgcgtctgaaaaccgcttctgtgcagataaaacccgagccaaaagtaaccatacttcaagatcagactctgctccaagtttcaacgccctctttagcatatgctaatgcagaatccaagtttccctctgttctgcattctccaacgcaagacggtgcacaaccctcgggtttgtcatatctgcagattccagggcctgaatcccctcggattgcctagctatcctctcagtctctgtaacagccattctagagctttccgtgagcgtgatccctaaaacgaaacgcgctgctccatctaattgactgcattccttccccaagtttccgatagctttccgggcataatctaacccttcctcagcaagaccagacctctcaccgcatattttggaagccatcagcaaacccgaagtcctgtttggatcctctcgttctgaaaatagcttcctcagtaaacctaacgcaacaagaccttctcctgcaccttggtaacacaaagacaatgtatgataaagttccctctgatccaagagctcaggactaagctcttcaaactgcttagccagagcggttagatcgcctgcgattgtaagagcgaacgagagatggtccaagattgccgcatcccatgagattcttttcagattaactttcctgagaagtaacatcagaagaagaatagcttcttccacattgttcctcggaatgaatgagccctcagtctgagaacgtaggtttggcggcactgcttcttccccggaatagaggagaaacactgcgtactctttctgtatcctcgccgtggtttctggatcgagtttccagtgattgagaagcgctcttctatacgacaaaatagcatcacgaggtgaatcagcaagcttccacaactcaggaagcagctcaaccgcttttgtcagtgtctcctgcaacttaatatctccagtcacattatccgacgcaccttctgctaaagaagtctcgactatatcaagaataactctgcaagactccgcagcttcttggaaccttccaagacgctggagagacttggctttgagaaaaatagcttcgaaaagtaaactaacagcatgtttagacatggcaggtgaaggagcagtagaaaagccgcctttagaccgtcttctatgtttccggtcttctctaacggttagagcggttttcatctttactgtgataccattgatatctatcccttcaaagactcgcaatgccgcctctatatttcctttctgatactcaattcttcccaaaagcgctctcgcctcctcgtagttcaatgaactcgtctcacgcagagataactcggcttcttcgatatttccattatctagtttcttagcattctcgctttctgcggtcgataaagctgagcttccattgtagtctctaccactccaacctcagatttcttgtcttcttcttctctatgcctcatttgttcaccagaacacaacacttcattctgatcttcctcaaactttttcttagtttacgtaaatgcaacttctcaggcctaatctcgctgttcttcataacttctcaatgatctttgagaatcagagaaagaagaagagaaaaagagaaagccgacagccatggccgcctcgaaattcttcagacttattccaattcgaagcaatcaagcaaaggaaaaggaaacaatccacccaaaattaaaagaaaaatctgatctttcttcttcttcttctttagttttttttttcacccttttactttctctcctctgccttttgcc

SEQ ID NO: 201 - DNA, 1304 bp, Arabidopsis thaliana
  Clone ID: ARATH-23APR03-CLUSTER128383_1
tttttttttttttttttgaaacaacatagaaaccatatgatgtttttatttctcttgccacaacaataagccgattgaatattttcagtacaattccaagttgttgaaatctctctctagtacaaaaaaagagaaacgaaattttctagaatttctgaatgactacagaacttgctagaccggcttgttcaatggtctgagaagggtcagtaagtggctttggtgggaaccccatgacctgaagggtatagttgtttggattccctggtcgagaaaactcaatgaaaccacgaatgtcgttaaccgtgtgatggttgttgaactttgctaccatgcgtgtcccatccgcgagtctaagctggatcgatgtggatggaagagtttcatctactacaaggctctgtaacggtgattgaaccgctgctacatcagttaggttactttggcttgaagctgttgatgagcttgcaccacctagagtccttccaactccttgaaatgaaaccttaagcttttctttctcagggcacttctcatctcttctcataagattaacatgtacaggagctcttttatcaacaggctcaagctctttcggacattcagactttcgaatgctatcaagaaaagaagcattctctggatcatccaacttcctcaaaggtccatcatctacagtgaatccattagaccagaaaataatattgtgaatcacaggctcaggctgttgaagagccgttggcacactttctccagaaagcaatcttcctgttcctgtaaagcttctagaactcgaaggatgctcaagaggtccttccacagctcctagctgtcttgcttgattaaatatctcatcaacatcatcgtgttttggttcttttgtaggatcttgaacaagcataccacttttttcgccaccggtgaagtattcttgaggtccatcggagtcactatcggaatcaggttctgatcttcggttcagatcggaaagtgtacggataccaccagtacgaccacttgttggcttcgatggtttcttgtccttagacgacatatctccgatgcttttttcgctgctttgatcggaataaaaaggaaacggattaggaattaggaaatcgaacttatgaaataataatacgctaaacaaggcttttacgcgaaaaccaagcgcgtgtaatacactccttgttaattctaaagcgtgttctcttatgcgcgtgtgcttagccagaaacaaaactagcattaattattaaattgttaatatgctttatgttatactataatcgtttgagattatc

SEQ ID NO: 202 - DNA, 2354 bp, Arabidopsis thaliana
  Clone ID: ARATH-23APR03-CLUSTER12840_1
ttctctaaaaataaaaagacttcagcatctgcttcctctcgacaatttcgacattactctttcgtttttcaccccttccttcttctcctttagccgcccgtcgtcgatctctgcaacactttccgacgatttctccgtctgatctcaagtgacagtgaaaaccatttaaattcgttacttgtgagcctccttagaagattatgggtgatttagagaacttgcttttggaagctgctgggagaacaaattcagcagggaggagtagtcatcctccatcatcgaggagacgtgagggttcttactctgatggtagtagcgattcaagggatgattctgatgaagatcgtggctatgctagtagaaaaccctctgggtctcaagttcctttgaagaagagattggaggcagagagagaagatcgagctgctcgagttgaaggtggttatggtgatggaccatctgatcgtgaaggtgacagcagcgaggagtctgattttggagatgacctttacaagaatgaggaagacaggcagaagcttgctggaatgactgagtttcagagagagatgattctctctgaacgtgctgataagaaaggtgataagaacttcactgagaaacttaggtccaagagagaaagtgagaaaacccctgtttctaaaaaggagactcagcctcttccggcctctcgtggtgtgcgttcatctgctagatctgcagacagagccgctgctaaggatgatgccctgaatgaattgagggcgaagcgtatgaagcagcaggacccagcagctctcaggaaactgagagatgcatcaaaaggtggttcaggtagtcgagatttctcatcaacgaagaggaaaccgttagcttcctccaatttgagtagttccagccaaagtgacagtgatagtaggtctcagagtgatgatgaaggctcgaatggaggaatgctagacagtgatgatgacaggtcagatgtgcctacgtttgaggatgttaaggaagttaccattagacggtctaagcttgccaaatggctaatggagcctttctttgaagagcttatagttgggtgctttgtgagggttgggatcggaaggtcaaagagtggtccaatttacagactctgctgggtgaagaatgttgatgcaaccgatcctgacaagacctacaagctagagaataaaactacacacaagtaccttaacgtcgtctggggaaatgaaacctcggcggctcgatggcaaatggctatgatctcagatggtcatccgctggaggaagagtataggcaatggatcagagaggttgagcgaacaaatggtcgcatgcccacaaagcaagatatatcggagaagaaagaagcgatacaaagaacaaacagttttgtttactctgcggaaactgttaaacagatgctgcaggagaaaaaatctgcgtcagtcaggccaatgaatgttgcggccgagaaagatcggcttagaaaagaattggaaattgcgcagagcaaaaacgatgaagcaggtgtagagaggatcaagtcgaaaatcaaacagctcgacgcttcacggaacaagaaaggggtagataaaaaagcgcttaaacttgctgagatgaacaagaagaacagagccgagaatttcaagaacgcatctgaggtaaaatcaataactgctagtctcaaagccggtgaagcagggtatgatccgttttcaagaagatggacccgatcatcaaactactacaacgggaaaaacaaggggaaagatggagaagagaacgaggcagcggttgcagcagcggttgagaccaatggagcagatgcaggagcaggtgttgaagcgacagaagcagctttagaagcagctgcagaggcaggaaagctaatagacacaagagctccaataggtcaaggagcagaacacaatcagcttcataactttgaattgtcgttatcgctaacggctttacagaagtacggaggacctcaaggagtacagaaagcgttcatggcgaggaagcaactgaccgaagcaactgtgggatgcagagtcgcagagaacgatggcaagagacatggccttacgttaactgttagtgattacaagagaaggagaggtcttctctgatttatttgcatttttttcaagtctcagtgtttcattatcttctgaaaactgcttcttggttcttcttttcttcatatctttcttttgtactccacaaaatatgtttagatcagtttgttttttcttgaaatatttttgtactcgtttttgtgtgaactctcctgattagtgtatgactgcatgaaattagaaaaaaaaaaaaaaaaaaaagggcggccgctc

SEQ ID NO: 203 - DNA, 1667 bp, Arabidopsis thaliana
  Clone ID: ARATH-23APR03-CLUSTER128497_1
ccgggccccccctcgaggttcttcgcatcgaggttttttttttttttttttaactgaaaattcaaaatcagtaatcaaaacttgtttatctgatactgcttccaaaagggagagctaaattctgtacaaatccataattagacattttattatttgtcgcttcttagtagaccatctaaaaactgccgccattttctttcatttacaatgttgtctcttcttatatttgacctgcgccagattttggaagaaatctacaaagacttgctcgtagtctggcagttttccgtaaccaggaaaatagttgatgtcaataacataaaacacgtttttgctcccatgttccctgatcatgtctatgttgaaaagccgaagtcccaataagcttcttagctctttcacaagcgcctcgaggaaaggctttggaggtagctcagcaacacgagggtccaagtctgcgttatcagctgaagcagcagctgatgaaacccttgggaattggaagacgccatcaactttggctttttcacaattactcacatttggtagagaaaaccgtctcatgacttttataacatcacccaccacaaataccttgaacataactccaccatgattaacaaactcttgaaggactaaaggcggatcaagctctgcaagcgagcgcctgtcataagccaagtacaattgatgtgactttggagtcccatcgatccagagcggctttgcaactagtggaaatttgagaccagcttccacaactgcatcagcactagctgctgaatctttcaagacaaccatttgctttggaacaaaaaggctgccactgcaatctgacagtttcaaatctgccataccctgaagcatcgattgtcgattatatatacgctgtattgatcctggaggatcaagcacagtcacttctgggtgtttttgttggtaatcctcaataacctcttcccactcttttcccaacaacttatgcaaaacaacatcaaatggcccttgttcagataggggccggttcaaatcgatggcgacaaagaaaatgccttttctcctagcaagaagttcaagcttgggctgcaagaaactcttcttcttcttagaagtcagagcatacccaacaacgagcttctgctgctgctgcagaaacaaaggttgttgaaactggaacggcgtcgtttcgttcaccaccacttggtcttcttcctcctcctgctcttcacctttgtatggcaccatgttttccccttcgaatctcatagcaaagtcttcaaatccaccgcaggaaacccctaaattggacgtaatccccaaattacggttcagtctggcagtttcgatttcgccggaagcaagagtccgaaacattaatagaaacggtataaaaaagaagaagcaaagggagaatctttaaatattcctctcagattctatatccgctgacacacaacacaagtggtgaaattggcactgcctacaaacgagatagagcacgagaccgagagagagacagagagagataaatcaaaattcgaagcaagaaatcagagagatgagatgaggaaatgttgagggagagattggtctgaagatcataatcatttatagagagaataatttgcagaaaaaaagatgctacagtgaaatggtcgttcccaaag

SEQ ID NO: 204 - DNA, 3236 bp, Arabidopsis thaliana
  Clone ID: ARATH-23APR03-CLUSTER12852_1
gtctccgacactcatgacccatccactctctctctctcacataacacagcagaagtaggtggaaagcaatgtccccttcttcttttctctctatctctttgctaatacctctctgctattacacatctagcgttcgacggaataaccagagagagctttctgcgacggctttaatggtgttgatgctggttctttgaggcctgtgcggagatttgggttttgggtgaattgtttgtagctgttgtcgttttcaattgtttgtatcgaaagagggtgaaattgaaacccaattggagcaggatttgtcgaatttagctgggtttcgtttcgaggttggatctggagattatgctgttgaggcaatggaggcttctttagcggctttggagcggccacgaggttcagcttctaatacggttttcaagagtggtccacttttcatatcatctaaaggattgggttggacgtcttggaagaaacgctggttcatcctcacacggacttctttggttttcttcaaaaatgaccctggtacactaccacaaaagggtggtgaagttaacttaactctgggaggaatcgacttgaataactctggaagtgttgtggtgagagaggataaaaaactgttgacggtattatttccagatgggcgtgatgggagagctttcactcttaaggctgagacatttgaagatttgtacgagtggaaaactgctcttgagcaggctcttgcacaagcccctaatgcagcactcatcatgggtcagaatggaatattccgtgctgaaactaacgaggctattgaagggcgggagaagcgtccattaaaatccttggttgttggaagaccaatcttacttgctctggaagatattgatggaagcccatcattccttgagaaagctcttcagtttattgagaagtatggaactaaaattgaagggatattaagacagtctgctgatgtggaagaggtggaacgtagagttcaagaatatgaacagggcaaaacggagttcacttttgatgaagatccacatgttgttggagactgcattaagcatgtattgagggagttgccttcttctccggtttcagcatcttgttgtactgccctgttggaagcttacagaatcgagtctaaggaggctcgcattagttcattgcgctctgctatagcggaaacatttccggaacctaatagacgtctactacaacgaattctgaaaatgatgcatactatctcgtctcattcccacgaaaatcgaatgaacccaaatgctgtagctgcttgcatggctcctctgctcctacgtcctcttctggctggtgaatgtgatttagaggacgattttgatggtggtgaagacaattctgctcagcttcttgctgctgctaatgctgccaacaatgctcaagccatcattacagttcttctggaggattatggaagtattttcgatgaagaaaatattcaaagatgttctatatcaactgaatcacatattggaaatagtgggcctgatgattcaagtgatgatgacaacaacatgaaaaatggatatcacaatgcagataatgaagttgaaccagtgactgatgacgataatgaccgtgcattgagtggaaaaatgagtgagagcagcggttgcacaggcagcgatctctatgaatacaagggatttgttgctgatgactctgatattgaatcaccaagagacacaaatggcccaagatgtaattcaaacatacgaacagatcatcttatgagaaatccttttgtcaattccacggatcaacaagctggagagcagataggcgatgatccaacaaaatacggagtaaactcgtgtctcgcacatgttagtgagtcttatcaacaatcagggacgggtctaaatgtacccactcatgggaatactttggctgctcctggtcttgaatcaccaagcgcgaaatccgtgaataagggcacaccctcctctgttcatgcaaaacgcgcaacattctggggtcgaggcagtgccagaaagatatccacagatgggtcttttgattcttcaggagaagacgagcttgctatacagaggctcgagaccacaaaaaatgaactgcgacaacgaattgcaaaggaggccagaggtaatgcaatattacaggctagcttggagagaaggaaacaagcactgcatgaacgtcgtttgtcgcttgaacaagatgtgtcaagattacaagagcagctgcaagctgaaagagatctccgagcagcactggaggttggtttgagcatgtcttctggacaattcagttcacatggtgtagattcaaaaacaagggctgagcttgaggaaattgctcttgctgaggctgatgtggccaggctgaagcagaaagttgcagaacttcaccatcagcttaaccagcaacgtcagactcattttggttccttctcagatgcacgtgatactcatcagtatctccagaatcacaatcctcaaaaaaggtttcttcagcaagattttgattccactcttgcctatgtaaatcatgaaaggaaacaaagacacgaggagaatgtactgggagcggagtggagaaatagtaaaggggcaggatcttttggtgttggcaatagcaggcaaccatctcgtaaacaaataccagaatcaacaaacacaactgactctaaaatcagtgaagagtctggaaagatatccgtggacaagctctcatccatagattctccatctattccgtcgacttcaagagtattagatataacagagtacccaaggcttaatcatccgtcagctgctgcatcagcagctctggtagagttaacaacacgtcttgatttcttcaaggaaagacgttcgcagctcatggagcagctccagaacctcgaccttaactacggcggctcatcttcccaagatttcatacaccggccatcatctccaccttggaactaacaacatgagaaaaaaagaagaagaaaaggctctatttgttctgtatatccttttggtgattgattaatgatgttagcatttgctctactcattttctcccccagaagactataatgaccttattcttttgggcaacagtcttgtgtgtatataaaggtattttgtaatgcaattttttttgttacgtgaggtttgttcatatgtgttaactctaaagctgtattgatatgttagtctctttatgctcttgagtttctgacc

SEQ ID NO: 205 - DNA, 2966 bp, Arabidopsis thaliana
  Clone ID: ARATH-23APR03-CLUSTER12857_1
cggacgcgtgggtttttagaccaagctcaggctatcatctctccgttaattagggttttcttctctatctcgatttcaataccattgttgatccgctgagctagggttgttcgatcccgataattgtgtcgcttagctctgatctctgttcatcgaatttggttaatttgttttgattggttaagatacattggaaagcgatgccaccgaaggttgtgaagaggggaggcgccgcgagaagaggtgggaggcttacgagatcggcgctcaaggcgcagaatcctcacgtggaatcttcccatgacgaatctgttaatatcggtgagctctcaggctccgatgcactggaagccaaggaggtgactccggaggttgataaaactgttgaggaagagaatccattagatgtgccgaagtcatcggattcaattgatgattctgaagctgcagcgaatccgcatgttgatgttccgtcgaaaaaggagactgaggtagaggaatctgtggatgattttggaaaagatgaaagattggatttagatgacaatgaacctgagtatgaggctgaggaatatggcggggaggagtttgaagagagggaattgggacaggaggaccatgagttggtaaatgaggagggggaagaactggaggaagagattgaggtcgaggaggaagctggtgagtttgcagacgagattggagatggtgcggaggaccttgatagtgaggatgatgatgatgatcatgctattgaagaggtcaagcatggagaaactgttgatgtggaagaagaagagcatcatgatgttctccatgagaggcgtaagcgtaaggagttcgaaatatttgttgggagtttggacaaaggtgcttcggaggaggacttaaagaaagtgtttggtcatgtgggcgaggtgactgaagttaggattttgaagaatcctcagacaaagaagagcaagggttctgctttcttgcgttttgcaactgtggaacaggcaaaacgagctgttaaagagcttaaaagcccaatgataaatggtaaaaagtgtggtgtaactgcaagccaagataatgataccctcttcgttggtaacatatgcaagatatggaccccagaagctttgagggagaagcttaaacactatggagttgagaatatggatgatataacgttggtagaggacagcaacaatgtcaacatgaatcgagggtatgcctttttggaattctcatctcgctcagatgccatggatgctcacaagcgtctcgtcaagaaagatgtgatgtttggagttgagaagcctgcaaaggtctcttttactgattctttcttagacctggaagatgagataatggcgcaggttaagacaatcttcattgacggtctgttaccttcatggaatgaagaacgtgttagagaccttctgaaaccatatggtaaacttgaaaaagttgagcttgctcgcaatatgccatcagcaaggaggaaagattttggctttgtaacttttgatactcatgaagctgctgtgagttgtgccaaattcatcaacaactcagagctaggcgaaggggaggacaaggcaaaagtgagagcacgcctgtctagaccacttcagaaagcaggtaaaggccgacaatctagtcgctcagaccagcggtctaggcatggggctggacggtctggaaggagttcatttgctcgtcttccacctcgtagccttgcttcctctcggagtgctagaggcgctggatctcgggccccatcttctagtgcaaagagagcttctggatcaagaggaagacgtcctcgcccacctctacctccgcctgcaagagctaggcccttgcctccacctgcaagagccaggcccatgccaccacctgcaagagccaggcccttgccaccacctgctaggtcatatgatagaagacctccagttcctctgtatccaaaggctagcttgaagagagactatgatcggcgtgatgaacttcctcctccaagaagcagaccagctgtaagctatagttccaggctttctcctgagaggcatctgtcttacagagatgattatccaccccggggttcgggttattcagatcttcctagaagttcttctcgctctgaaattaggaggccattcgtagatgacctttacagtccgagatttgaaagacctccaagttacagtgagggaagacctcgtgcttatgaacctcttcctggatcaaagcgtccatatgctgcactggatgaccttcctccccgttatgctgatgttgatgttcgtcattcaagaccccgtctggactatgatgttggcccatctcaatatggggaatcctacggggaccggattcctaggtctagtctaggatatggaagcagccgaaattctatgtcaaatcatgactcgcggggcccatacagcagtcgtcagggaatggattatggaggaggttcttatagtggcagcgatgtaggaggtatgtactcgtcaagctatggtggcgacttacccagaagagatggaggaggtagctcgtattcttcaatttactccagccgtggcttgggtggtagtagttactctggtggtggtccaggatcatactactgaataatttcacatgaccgaggctgctaaaaaaggaggtttggccatgcaaagttgtgtatgtagaaaggaagctaccagctgcgaaaggattaaagccagcttcggtgagactgttggaatattaatgggcttgcatctacaactgcacttgtatcttttttcggatggaatgataagctcgagttttatagagatggttcatagttgtgggactcgttatctatcttatctatctctatctcttgaataatggatggatttgttggaacagagattaagctgtgtttgtattattgatccatcagtttagttaagctttcaccgtcttctcagctt

SEQ ID NO: 206 - DNA, 858 bp, Arabidopsis thaliana
  Clone ID: ARATH-23APR03-CLUSTER128755_1
ctcgagtttttttttttttttttatagaaaatatccatttatggtcgttccgggccccccctcgagttcttttttttttttttttcttttttttttttttgccttaaaactttcttattattaatggtgcttaattaggaaaatacgcaaaagcagaaacagagcaaagatcacagtccataattagctaagaagaaacttctagaaacatagattttgaaaccgtcaccaccacaaccggaatctaagaagagatctcaccacaatcagcgatcacaacaggcttcgtcggctttccagaagaagatccaatcttctcaatagccttaacaacgtccaagccttcaaccacctgaccaaacaccacatgcttaccatcgagccaatcagtcttcaccgtacagatgaaaaactgagatccattagtgttagcaccagcgttagccatcgacaaaatccctggtcctgtgtgcttcctctcgaaattctcatcctcaaacttggctccgtagatcgattcgccaccagttccgttacctttggtgaaatctcctccttggcacatgaaatttgggatcacgcggtgaaacgaagatcctttgaagtgaagtggcttgccgctacgtccgacgcctttctctccggtgcatagagctctgaaattctccgccgtctttggtgtcttgtcggtgtaaagctccatcacgatcttccccgctggtgcaccgccgatggtcatgtcgaagaaaactttaggatgcgacgccattgttgttgttcgattttgggaacgaggatttaaaaagtgtgtgacctagattttctggagaagttgttgaggacgaagagaagatattt

SEQ ID NO: 207 - DNA, 794 bp, Arabidopsis thaliana
  unsure (1)..(794): unsure at all n locations
  Clone ID: ARATH-23APR03-CLUSTER128890_1
ttggcctgttaggccgtggatatggtcaaacatagcaggcagatcgtaactcacaagctcgtcccacgtccagttccagaaagcccgttgagaagggttaaggtacttgtgtcttctgctgaatctagtccctcttgtgttccccatccacacatcgaatccttgatccgccaaaatcaacggcagattttgatccgctggattcaacagccatgacatcccatcgacaagaattccatgttgtattaggacaggttgtcgctttcccccatctccggcgacggctccggttcgtccttccggtatcctttgcatattcaatatgtatccatcttgagtcaccacatcatgttcttcgcacttgtaaccaaatatgtgaacagaagaagcgcatatgccgccggcagcagtcctctgcggtggctgtccggcaagcctgccgaaggttccacgagcttcaagggtcttgagggaaagagcgaagaagattaagacagataaggctaaaccgattgaaacggacggaaccataaccgaaccggccattgagatatatataggggttatcacgtacgtttataggaaagtgaaaatggttttatatagagagaaggggtgacggataagataatagaaaatggaattattagctatttataaaaatgcaaaaccacgttagcaactatggatagacaaaaacttatttagaaaaaaaaacaatttatggtgtgtaaacataaattaagaattgaatcatgcacaaanaataagncnagcatttatgaatagtttct

SEQ ID NO: 208 - DNA, 1454 bp, Arabidopsis thaliana
  Clone ID: ARATH-23APR03-CLUSTER129030_1
ttgcaaacaacaaagaaacactttgaaatagcatactttttttttttttttttaattgaattcagtttctatttaatacaaatataatcccatgacaattaatttcctaagagagattatacaaatccaaaaaacaaaaggatccgcttaagttaaacctatgcgtatataagatatatataaattacaaaaggagaaagcagatatatgaatagagaagtaacttctccctcactgtgtttaggctttaaagctaaaacctgagtgtgtaacataaagataacagccgacgacccaaaagaaaaagaatggagtgttggatacattagcttcgttatgttgagtttggtgaagaaccgtaaccgaaaggattgttgcttgcccagttccactgatccctacacatttcttcgattccaaaatttgccttccagtttagttcgcgttcagctttttctgttgacgcatagacggtttctgcatcacctggtctccttccaaccttcaccagtgggattttcattccagaagctttctcaaatgcatcaaccatctccaacactgttgttccttttccggttcccaggttgtatacctcacaacctatttcagtatcgtctagcttttgaagcgcaaatatatggccatctgctagatcaacaacatgaatatagtctcgtacaccagtgccatctttagtggtatagtcagttccataaatttttaggttaggtagcctcccaacaacgacttgctggacataaggcatgagattatttggagtcccacaaggatcctcaccaatgcgaccgctagggtgagctcccacagggttaaagtacctcagcattatgattctccattcaggatcaccacgttgtacatcacggcaaatgtcctctatgaacagctttgtccgtccataaggactcattccagacaggggagactcttctgtacaaggaacctcctttggccagccatacacagtagcggacgaagaaaatacaagctttttacatccgtgtgcagccattacttccaaaagtgtaatagtcgcaatcaagttattgttataatacagaagtggtttcgccacgctctcaccaactgctttcaatccagcaaaatgcattactgcatcaaactttgtttcggagaaaaccttctcaagtgcgggtttatcgcgaaggtccacctggtggacggtgagattttgtccatgatctccggcgagatccttgacgcgttggatcgaaacgagagaggaattgtcgaggttgtctataacgacggtgttatagcctccgagaagaagctgaagaaccgtgtgacttccgatgtaaccagcaccaccggtcaccagaatattcccaaccatcgaagctcgaagaggcgatgaagaaagagagagcgagagaatcaaaagagaagcttctctggaaataataatc

SEQ ID NO: 209 - DNA, 1376 bp, Arabidopsis thaliana
  Clone ID: ARATH-23APR03-CLUSTER129108_1
tttttttttttttttttgcggaaacaatatattaagacaagtgtcgtagctttcagcaataaaagagtgaaagaaacacaaaaatattcgcaccaccataaaggtagtttatgttatggccgtttcaagctgcatttgattgttttatccttttatcattttcctcataacttaaccactaaggtttcaccattccctctccccacgcgcactactccaaatttcaagctatcaaagcatacaaatagtacaagacatatctgggccagtgcttgggcccataataagaagatccaatcttcaagacagcttcatgtcgttaggcttccaaatgcaaatctcaaaaaaaggcaaagcgataggatttgataaggtttcaagcctgagtgcctgtcaacgacttcatctgaatgtgattagaatcagcattgttagtcggcaaagcttcataagaaccagttcttctcactccggccgccatcaccaccatcgtgtaagtcacaaagatgaggataaccacaagcacgacgtgtacagtgaacattagatccaatatagaaacagctcttagcttagagtcctgaatatcacattgggttgatccttcaacaccgctttgaacatcaagaagacgatgacatccctcaggaataaacccatcaacgtagagagagagtcctgtctgaagctgccagagaccttgaagacaaatggcagcagcgagagcagcgtcagcaataaagagtcttgaacggcaagcgagaagcaaacagaggagagagcataacgcggagatacgagcagagagggaatcacaatgagcttgaagatcagatgtttgaattgcagctgatgaagacgcggcggagtaatggaggaagaaaccaacggaggcgagtgcgaagaggagatcggaagggagagggattaacgaggttgaatcggagaggagatagtaaatggcgatgatgaggaagaggaagaacacggcggcggaattgagagatgagaatcggtgaacaggagtacttcctttgacgagaggatcggagtagaaggagattagggtttcgtgaaggaaagcgacgaatagagagagtatgaggatgaacagtggtagattttggaggcggttgtgattgtggtggttgtttccggtgacggaggagagacgtggaaaagggtaaaagggtttcgcggcgtaggattggggagatttaaggagatggaagaaagtgcagatgagatgatacaatcctagggttagtagtgacgctgaagcgaagagcttgtacatcatctctcccattttcgaagcttgattttagggttttgttgttgttggtcgggatttgtatgactgataaactttctcc

SEQ ID NO: 210 - DNA, 5755 bp, Arabidopsis thaliana
  Clone ID: ARATH-23APR03-CLUSTER1294_1
atgtcggggcaggtttcaaaccaagggactatgtcccagcaaaatgggaactcccaaatgcagaatttagttggtggtggttcagctcctgctactggtgctggtttaggaccttcacgcgtttctcccgttgacaatgacatcttgaaacttcggcaggctatgcgaatcaggattttcaatatcttacagcaaaagcaaccatctccagctgatgaagcatcaaaggctaaatatatggatgttgctagacgcttagaggaggggctgtttaaaattgctaacacaaaggaagattacgtgaacccgtcaacccttgaacctcggctggcaagtctaatcaaaggcaggcagttaaataactacaatcagcgacacgctaattcttcttcggttggaacaatgatacccactccaggattacaacacagtggtgggaatccaaatttgatgattacttcctcaggtgatgctacaatggctggaagtaataacatcacaactagtgctatgaacactggaaacctgctaaattctggtggcatgcttggaggtaacctgtctaatggataccaacattcatcgagtaactttggtcttgggtctggagggaacatgtcatccatgagctcccagagaaataccggccagatgatgcctacccctggatttgtcaacagtagtactaataacaacagcaataatggccagtcttacttgagtgttgaagcttccaacaatagtggtggattttctactgctcccatgatggtacctcagactcagcaacagcaactgaggcaggatattggtggccaaaatagtcgtatgctgcaaaaccatggaagtcaaatgggtgttggccttagacctggaatgcaacaaaaattgtctaatgtgtctaacagctccataaatggtggtgttggaatgaatgcaaaaagcgtagattcaggtacatcctacaccaatcctatcagaaattcacagcaggcttatgataatcttcagcgttcaggaatgcagggtgatggatatggcacaaacaactctgacccattcggatcgggaaatttgtatggtgctgtaacatctgttgggatgatgacaaatactcagaatgccaatacagcaagtttccaggctgtgtctagaactagctcttctttgtcacatcaacagcagcagtttcagcaacagcctaatcggtttcagcaacaacctaatcaatttcaccaacagcagcagcagtttcttcatcaacagcaattgaagcagcaaagccagcagcaacagagatttataagtcacgatgcttttgggcaaaataatgtggcttctgatatggttactcacgttaaacatgaacctggaatggagaaccctagcgagtctatccactcccaaactcctgagcaatttcagctctctcagtttcagaatcaataccagaacaatgcagaagaccgtcatgcaggttctcagattctccctgtcacaagtcagagtgatatgtgcacatcagttcctcaaaatagccaacagatacagcagatgttgcacccgcatagtatggcttcagactctgtcaacggttttagcaacctctctgttggagtgaaaacagaatctgggatgcgtggtcactggcaatctcagtcacaggaacatactcaaatgtctaatagtatgtcgaacgaacggcacattcaggaggatttccgacaaagaatgtctggaacggatgaagctcagcccaataatatgtctggaggctcaattataggtcaaaatcgtgtctcgactacatcagaatcccttaatccccaaaatcctactgctaccacttgtagaaatggaaatggcaaccgggatccgagattcaaaaatcaacagaaatggctcctctttctacgccatgctcgccactgcaaagcgcctgaagggaagtgtcctgatcgaaattgtgttacggttcaaaagctctggaaacacatggacagttgtgctgcacctcaatgttcatatcctcgttgcctccccacaaagacattgattaatcatcatcgaagttgtaaggaacctaactgccctgtctgtattcctgtgaaggcctacctacagcaacaggcaaatgcacggtcccttgctcgattaaaaaatgaaaccgatgcagccaggtcagtgaatggtggaggaatatcaagtgacgctgtacagacctctgctggagcaaaatcttgtacttcgcctggtgctgatatttcaggtcatttgcaaccatcattaaaacggttgaaggtggagcagtcttctcaacctgtggatgttgagacagaaagttgtaagagctcagttgtttccgtaacagaagcacaatcatctcagtacgctgaaagaaaagatcataagcacagtgatgtacgtgcaccttcaaaatattttgaagtgaaagctgaggtttctgacttttctgtccagacacgacccggattcaaagatacaaaaattggaattgctgaaaatattcccaagcaaagacctgtcagtcaacctgataaacaagatttatctgatgtttcacctatgcaagagactaccaaagtggagaaagaacctgaatcacttaagaaagaaaatctggcagagtctactgaacatacatcaaaatctggaaaaccagagataaagggtgtttcattaactgaattgttcactcctgaacaagtgagagaacatatccgtggtctccgtcagtgggttgggcagagtaaagccaaagcagaaaagaatcaggcaatggagcattcaatgagtgagaattcctgccaactatgtgcagtggagaagcttacctttgagccaccacctatttattgtaccccttgtggtgctcgcatcaagagaaatgctatgtactacaccgtaggagctggtgacactcgtcattacttttgtattccatgttataatgaatcccgcggagacactatactcgctgaagggacccctatgccaaaggcaagactcgagaaaaagaaaaatgatgaagagattgaagaatggtgggtccaatgtgataaatgtgaggcgtggcagcatcaaatatgtgctttatttaatgggagaaggaatgacggagggcaggctgagtatacctgcccatattgctttatagcagaagtggagcaaagtaagaggaagcctttacctcagagtgctgttcttggagctaaagacttaccgcgaacaattctcagtgaccatatagagcagcggttgtttaagaggctgaagcaggaaagaacagagagagccagggctcaaggaaaaagttatgatgagattcccactgccgagtcccttgtgattagagttgtttcatctgttgacaagaagctggaagtcaaacctcgatttcttgaaatttttcgggaggatagttacccaacagaatttgcatacaagtccaaggtagttctgttgtttcaaaagattgaaggcgtagaagtatgcttatttgggatgtacgtccaagaattcggttctgaatgcgcatttcccaatcaacgccgagtttatctctcgtatttggattctgtcaagtacttcagacccgaggttagatcttataacggagaagctctgcgtacttttgtttaccacgaaattctgatcggctacctagaatactgcaagttgcgtggtttcacgagctgctacatatgggcttgtccgccgctgaagggcgaggattatatcttatattgtcatccagaaattcagaagacgccaaaatctgataaactacgagagtggtacttagcaatgttgagaaaagcttcaaaggagggcattgttgcagaaactatcaatctatatgaccattttttcatgcaaactggtgaatgtagagctaaggttacagcagctaggctcccgtattttgacggtgactactggccaggtgcagcagaggatcttatataccaaatgagtcaagaagaagatggaagaaagggaaataagaaaggaatgctcaagaaaaccattactaaaagggctctaaaagcttctggtcagactgatctatctgggaatgcttccaaggatctgcttctaatgcatagactcggtgagaccattcacccgatgaaggaggactttatcatggtccacttgcagccttcttgcactcattgctgcatactgatggtatctggtaatcgttgggtctgcagccagtgcaaacacttccagatttgtgacaagtgttacgaggctgagcagagacgtgaagacagggaaaggcatcctgttaattttaaggataagcatgcgttgtatccagttgagattatggatattcctgcagatacaagagacaaagatgaaatactcgaaagcgagtttttcgacactagacaagcatttctgagtctttgtcaagggaaccattatcagtatgatacattgaggcgggcaaaacattcgtccatgatggtcctttatcatctacataacccaaccgctcctgcctttgtcacgacctgcaatgcgtgtcatcttgacattgaaactggtcaaggctggcgctgtgaagtatgtccagactacgatgtgtgcaatgcctgtttcagtagagatggtggagttaatcatcctcacaagttgacgaatcatccaactatagctgatcaaaatgccatcctcataagttaacaactcatccatctctagctgatcaaaacgctcagaataaagaagctaggcaattgcgagtcttgcagctcaggaaaatgctcgatcttctggtgcatgcgtcgcaatgccgttctccagtttgtctatatcccaactgccgcaaagtgaaggggctattccgacatggtctccgctgcaaagtacgtgcttcaggaggttgtgttctatgcaagaaaatgtggtatctgttgcaactccacgctcgggcctgcaaggaatccgagtgtgatgtacctcgatgcggggacctaaaggaacatctgagaaggttacaacagcaatcagattctaggcggagagctgccgtcatggagatgatgagacagagagctgcagaagtcgctggaacctcgggttgattaatttttgtaaatactaatttcatttaggatctaagcagaagtggaaatgtaatcttcttccgaaagttaagaagataaaagaaactggtgtttatgatctccacttgaagaaggtgaagaaaaagtgaataacagcagctagtgaagacatgaaacagccatataacgatttaatttagatggattcctatttaacagtcgcaagtcgtggagtgatgatgatgaataacttgagtgacttgaagagtttctcagcttaagtgccaattgaagcagaagaatcgtcgtagatgctaacttatgctgtgtgtaaggtcgcgaaaaggaagaaatgagattccagactcttcgattagttcagtggcttgatctggctggtgattctttgactatacatatattactctgtgactgattactgtcttctacctctccgtcttttttttgtagtctggtacaatttgtaaaatagcttatatccctttgggggatgtggcaggaatgtaatatatatacatataaatagataacttgctagataagtaagaaagatgaagtgtgtctctttaaggatgtttccttctcttacatttttgggcgaacttgtattaacattttagtatcgtttc

SEQ ID NO: 211 - DNA, 794 bp, Arabidopsis thaliana
  Clone ID: ARATH-23APR03-CLUSTER129555_1
tttttttttttttttttgataagaaaattcttagttagaatttgattacattacatggcatgatcacaacgggaattgaggagagctttgttgagacaattgaaagcatcgatgtaggagacaaagcccatgaaccaaaactcaaacccatctcgtgtcaccatatgcacgtatctctcacttggcttcaacacgttcgttgatgaactaatgctacttatcttctcccactccatcaccaccttgtaaatatgccgcaacaccgtttccaccggcagaagaaggaagaccgaatggcatagtcgctacaaaaagcgattcttctgttggaaatgtatatcactccggtcactggtcccgaagtagtcgatatgtagcaaacaaacgaatctaaaagtttctctacagctaaaacaccaaactctcgttgaaacactctctctggtcctccttcaacgatcatcttagtgccttgagaaagcctagccattgctgcatcacttatgctaggactaaaattcaggtggtcttttaaacctccgactaatgcttccgctttgcgagtagcgtcctctactttcttcccacagcgattcaacacctcaagaaccttatccttcgacctcttatcagaagctgatgtgggactagtaatgtggacgtaaggattattataacgaccgccatggctgttggtttcgtgcttggccgtcgagtctaatttatcgttcacgtctttgtattgtggacgcatgatattagacctaatgatgatgatgcatggtacgcgtggg

SEQ ID NO: 212 - DNA, 1405 bp, Arabidopsis thaliana
  Clone ID: ARATH-23APR03-CLUSTER129578_1
cctggggggtccgggcccccccgcgaggcgctcctgggtggttatttctcttgtttctttggttccattttaacatgtatatctgataatattaaaaaatcgtcgtttagtcagaaatcctagctgaaacttgaagaagaaacaaaaacattagtgataatgttgatatgaagccatgcgagcattatgcatcttgaacaaaaccgtttcactccgctctctatctctctataacacaaggagacctacaagcttcctcattgagtgaatcagaagtcagataaaaaataaggcaatgatcttagtttcgttaatgagaaagccaagtaatcattttcacctcttcataggtctattgggactctcaagccatcatgagcgagttttactgaaatcccttcccttttagaccattcttcaagaaactcgttgtccttgtgatgatcaaactcgtgagtcattccaatcagaagagccctttttggactcagtcttttgattgtgtctagtgtctgcgcgaaacataagtgagtgtggggggggcctgtctcatgtaatgtatccaaattaaggagatccagttgtccaccaccggactttgatatagcatactcggtgtttggaggaagccgtgaaacatcggatatataagccactcttgatttttcaccaaaaaggaagccaagacatacatagtcttctccatgcaagcgtcaaagtggcgtgaatgataaacctgaagctacaaatggcttctcacaatcttcttcaattactctccaatctagctgtgctactcgcctaacttcttggccttctttaagtttcttctgaaccaaatacgggaacttcacagcaaggctttccatagcgtattggcttacaaaaattggagtaggatcaatatcattagtaggactaaatggttgcactgaacgtatatcatccaggccaagtactgcatcagcatgttcatgagtcaaaattatagaatcaacttgaggaatcttgtgaagagtaaaccaacgaaggacttgttctctgaaagtcttgccaacatcgatttgaatgtatttatgtttgccatcactttggcaataatcaatgagcagtgaagtattccccctgtaattaggatttttctcaggcgggattgaaagagactgggaacaaacatagcagggattatcagatcgctggatcaagcacattgcgttaggtaccgcgcttgaacatccagttcctaggaatattagagccgatctatcacgatcagaggtaacggagccgttctcagacggaatcgaactttccatcatcggcgatttcaatatctcttacgtatggaatattccggcaaaggaggaatctggagtcgaacgtaaaagcggtaacagaagggtct

SEQ ID NO: 213 - DNA, 4222 bp, Arabidopsis thaliana
  Clone ID: ARATH-23APR03-CLUSTER1300_1
ttggctccccgccggcattcttcctcccgccggtcacctcgaccgtaccactcaggtatacaggcgccagaagcttcaccttctcattactctatcaaatatcccaagagctcttcgcccgttctctatcactcctcgtcgtgctgcggccatcttctcatgatccgctgcacagattccccgagaggttccgtgatcaaaccgccggggccagtcgacccccccatcgcgtgtatcattcccgcgagagtcgagctgctatttttgctcacgactaagtcccattcctcgtctcttctttttcttctccttaattagtttgggcaacacgatcacagttgattccttcacaatcgatttgttaaattaagaaatcattttcttctctctctctctctctctgtctaaaatatctatcggttgaagaagatctgaagcttaactttgctctgttacagactctcagggatctgccggctacaaagtccggtggatagtgttattattagacaatggcgtctaataatcatttcatgaacagtagatccaatctatcaacaaactctgatgctgctgaagctgagaggcaccagcagcctgtgtcaaattctgtgacatttgcccgcaggactccctctggccgatatgtcaactactccagagatgatctcgatagcgaacttggaagtgttgatttaactggctattcggttcacattcctccaactccggataaccaacctatggatccgtccatctctcagaaggttgaggagcagtatgtctcgaattccttgttcacgggcggttttaacagcgtcactcgggctcatcttatggaaaaagtgatcgatactgagactagccatccgcagatggcaggtgctaaaggatcttcttgcgcggttcctggttgtgatgtcaaggtgatgagtgatgagagaggtcaagatcttcttccctgtgagtgtgatttcaaaatctgtagggattgctttatggatgctgtgaaaaccggtgggatgtgtcccgggtgtaaggagccttacaggaacacggatttggcggattttgctgataacaacaagcagcaacggcctatgcttccgccaccagcgggcgggtccaagatggacaggagattgtcattgatgaagtcaactaagtctggtttgatgaggagtcaaaccggggattttgatcacaatagatggttgtttgagactagtgggacttacggtttcggtaatgctttctggacaaaagacgggaatttcgggagtgacaaggatgggaatggccacggtatggggccgcaggatctgatgagcagaccgtggagaccacttactcggaaactgcagattcctgcagctgttattagtccttacaggcttttgatacttatccgaattgttgttcttgcgcttttcttgatgtggaggattaagcacaaaaacccagatgcaatatggctatggggaatgtctgtggtttgtgagctttggttcgccttatcttggctacttgatcagcttccaaagctgtgtccgattaacagagctacggatctcaatgttcttaaagaaaaatttgaaacacctacaccgagcaacccgactgggaaatctgatctcccaggactggatatgtttgtatctacagcagatccagagaaagaacctcctcttgtcacttccaacaccattttatcgattctcgctgctgactaccctgtagaaaagcttgcttgctatgtatcagatgatggaggagcgcttttgacattcgaagccatggctgaagcagcgagttttgcaaacatgtgggttcctttctgtcgtaaacacaatatcgagccgaggaatccggattcatactttagtcttaaaagagatccttacaagaacaaagtgaaggctgattttgttaaggatcgaagacgggtgaagcgtgagtatgatgagtttaaggttaggatcaacagcttgcctgactcgatcaggcgccgttctgatgcttatcacgcaagggaagagattaaggccatgaagctgcaaagacaaaacagagatgaagagatagtagagccagtcaagattcctaaagctacatggatggctgatggtactcattggcctggaacttggataaattctggtcctgaccattcccgtagtgaccatgctggtatcattcaggtgatgttgaagccgccaagtgatgagccattacatggagtgtctgaagggttcttagatcttacagatgttgacattcgtcttccgcttcttgtctatgtttcgcgtgagaagcgaccgggttatgatcataacaagaaagcaggagccatgaatgccctggtccgagcttctgcaattatgtccaacggtccattcatactcaatcttgattgtgatcattacatatacaactctcaagctttaagagaaggaatgtgtttcatgatggatcgaggtggtgaccggctttgctatgttcagttcccacaacggtttgaaggtattgacccatcagatcgttatgcgaatcacaacacagtcttctttgatgtgaacatgagagctcttgatgggttgatgggtcctgtttatgtcggaacgggttgtctctttagaagaatcgcgttgtacggattcgatccacctcgggctaaagaacaccatcccggattctgcagttgctgcttctctcgcaagaagaagaaaagccgtgtgccagaagaaaaccgatctttgagaatgggtggtgactcagatgatgatgaagagatgaatctttctttggttccgaagaaattcggaaactccactttccttatcgattcaatcccggttgccgagttccaaggtcgtcctcttgcggatcacccagctgtgcaaaacggacgaccacccggagctctcaccattcctcgcgagcttcttgatgcatcaactgtggcagaagccatagccgtcatctcttgttggtacgaggataaaaccgagtggggatctcggatcggttggatttatggatctgtcacggaagatgtggtcacaggttatagaatgcataaccgaggctggaaatcggtttactgtgtgaccaaaagggatgctttccgtggcacagctccaatcaacttgacggataggcttcaccaggttctccgttgggctactggctcggtagagatctttttctcaagaaacaacgctttctttgctagctcgagaatgaaaatactccagagaatcgcctacttaaacgttggaatctacccgttcacatcaatcttcctcatagtatactgcttcctcccagctctctccctattctctggccagttcatagtccaaacactcaatgtcactttccttgtctacctcttaatcatctccattacgctctgcttactcgctctcctcgagatcaaatggtcaggaatctcactcgaggaatggtggcgaaacgagcagttctggctcattggaggaacaagcgctcatttagccgcggttatccaagggctgctcaaagttgttgccggaatcgaaatctcattcacattgacatctaaatccggaggagaggatgtagacgacgaatttgcggatctctacattgtgaaatggacatccctcatgatcccaccaatcacaatcatgatggtgaacctaatcgccatcgcggtcgggtttagcaggacgatatacagtgtgattccgcagtggagtaagttgattggaggagtgttcttcagtttctgggtactggctcatctttatccattcgctaaagggcttatgggaagaagaggaaggactccgaccattgtatatgtctggtctggacttgttgccatcaccatatctctgctttgggttgccattaatccacctgctggttccactcaaatcggaggatctttcactttcccatgattcataggtttggtttctcaaaaattctctttctttagtcctttctaaagatggagacagagattggccaagaaacacacaagtatagttgagccaaaatatagagcaagtcaaagaacttctctcattgtcttttattttttgtttttttatttggttgggaaaggacattttttatttgtctttttaaattttgtaatcttttatctgttgatggaattatttatgctactactgttaattatttattcagttcaaattcaaaaaaaaaa

SEQ ID NO: 214 - DNA, 1438 bp, Arabidopsis thaliana
  Clone ID: ARATH-23APR03-CLUSTER131499_1
tttttttttggttttttcttttttttttttttttttttttttttttttaacgggccgaataaggcccatttaaaatactggcccataaagttaaggatcgataacaaaacgtaagttcatcagtttgaactttatcagtaaacaaaaaagtagtagaagcttgttcaggagaataactgattccggtaattggtcgcgtcacttagtgcatcaaattgtgtagtcaagaatcgaatagataccgaagcagaggagccaccactgctacacttaaactgtttccaagcattgcgtatctttgtcgaaggcttatgtgcttggggaactcaaaatcttcagggaatgagtgaaagttagctacctctctaggggtgaagtatctaagccgttgctccttcaaacaagattccttacccttgatttttggctggacagttgccaatagggaacctgtgcccttcacgtatcgataataactctttgtgaaacaacaacatctctttgaatcagggtaaacaatgtccattgcgtttccccatctctctatcaaactaactggtactagatactgatgtacagagtctgggacagaatcgccttcttgtccacaacaatctttggacccattttcagagtcatcaacactacttggctcgccatcaacatgtgcagctaactcgagaaacttctctactggttcgcaaaactcaagtaatttatccaatccttcttctgcttgacattttccaaactcaacctgatcatcacgcccatataacgggtctggagaccagagtagtttgttattactgtgttgggacttaaatggcagaggttttcttttggccaggcagaaataacgtggtcttgaatacggcacaccaaactgcagcggactcaatataaactcttgtgtgacataatctaattttgttaatgtaccaatcatttccatatgtgtatccgaagtctcaaatccaacaacattctctacaaataacatttgtggaggctttgttgtatgcggtataagctcaagaatcctgagaaacgaagaagcccgagcatcaccagagtgtttctgaaggccttgtctagtataaggttgacaaggaggagaaagaagccaagcatctgcattatacttatctaaatcagcagcagtgagactctgaatattcccctgatagggacgatgtttgaaattatgttgataaacatcattagcagaatcattgatctcaaaagcttctactacttctgagacgatgcctgacgccattaaagagtatctcattccaccgattccactgtagaactcgagaacttgccatggcttcttctcattgattctctgtaattcttgttccgccatgcttcttcttctgctgctgcttaagcaaaattaatttgggagtttttggttattgttcttatt

SEQ ID NO: 215 - DNA, 1160 bp, Arabidopsis thaliana
  Clone ID: ARATH-23APR03-CLUSTER13220_1
aaaggagcattggtatctcaaacaatatttgccctttctctatctctctctcatcactatttgccatctctttaaaggagcattggtatctcaaacaatatttgccctttctctatctctctctcatcactatttgccatctctttctctctccctctctttcaaatgtcaataaaccaatactcaagcgatttccactaccattctctcatgtggcaacaacagcagcaacaacaacaacaccaaaacgacgtcgtggaagaaaaagaagctcttttcgagaaacccttaaccccaagtgacgtcggaaaactcaaccgcctcgtcatcccaaaacagcacgccgagagatacttcccactagcggccgccgccgcagacgccgtggagaaaggacttctcctctgctttgaggacgaggaaggtaaaccatggagattcagatactcgtactggaacagtagccagagttatgtcttgaccaaaggctggagcagatacgtcaaggagaagcaccttgacgccggagacgtcgttctcttccatcgacaccgttcagacggcggaagattcttcattggctggagaagacgcggtgactcttcttcctcctccgactcttatcgccatgttcaatccaatgcctcgctccaatattatcctcatgcaggggctcaagcggtggagagccaaagaggcaactcgaagacattaagactgttcggagtgaacatggagtgccagctagattcggactggtccgagccatccacacctgacggttctaacacatatacaaccaatcacgaccagtttcatttctaccctcaacaacaacactatcctcctccgtactacatggacataagtttcacaggagatatgaaccggacgagctagaagcccacaaggattaaaaaaaagcttcacatctggtcctgttatgttgtcatagatgttgattccttaattttacacaagcttcattttgcattatttaaagtaaaatcgtattttgattcttctttaaatctctctcaattttcactctcttcctttttcttcttatgtattagattcttttacatagctaacacttgtatagagaattcaaagttctggctattttcgaaagttatcttttctcttaaaaaaaaaaa

SEQ ID NO: 216 - DNA, 1079 bp, Arabidopsis thaliana
  Clone ID: ARATH-23APR03-CLUSTER13221_1
gaccaaaccaacacctgcaaatcctctctctctctctcactccaagaaaccaaaaaaaaagatgtcagtcaaccattaccacaacactctctcgttgcatcatcaccaccaaaacgacgtagctatagcacaacgagagtctttgttcgagaaatcactcacaccaagcgacgtcggaaagctaaaccgcttagtcataccaaaacaacacgccgagaaatacttccctctcaataataataataataatggcggcagcggagatgacgtggcgacgacggagaaagggatgcttcttagcttcgaggatgagtcaggcaagtgttggaaattcagatactcttattggaacagtagccaaagctacgtgttgaccaaaggatggagcaggtacgtcaaagacaaacacctcgacgcaggcgacgttgttttctttcaacgtcaccgttttgatctccatagactcttcattggctggcggagacgcggtgaagcttcttcctctcccgctgtctccgttgtgtctcaagaagctctagttaatacgacggcgtattggagcggcttgactacaccttatcgtcaagtacacgcgtcaactacttaccctaatattcaccaagagtattcacactatggcgccgtcgttgatcatgctcagtcgataccaccggtggtcgcaggtagctcgaggacggtgaggctttttggcgtgaacctcgaatgtcatggtgatgccgtcgagccaccaccgcgtcctgatgtctataatgaccaacacatttactattactcaactcctcatcccatgaatatatcatttgctggggaagcattggagcaggtaggagatggacgaggttgatgactgacattcaaaaagaagtgacaactttctagatttttaactttagaatttagattatgggcccatacttggcccaattgtcatagagaaaaaatggacaagaattaatattattagtagcttcgttatgtatttagtatttaactaatttgaaaataaaaataaaagatgagattttgtttctaaaaaaaaaaaaaaaaaaaaaaaaaaa

SEQ ID NO: 217 - DNA, 1160 bp, Arabidopsis thaliana
  Clone ID: ARATH-23APR03-CLUSTER132476_1
tttttttttttttttttggatcagaatcttactagttacaacatatattgccaaatcggccacaatttaagatagttttaactcaccgatccaaaacaattcattttcaacttctaactcaagtgaacaaattgctcttcaagctaatgtgaaaagcttggaatctaaagttaacaaaagccttcttaattcatctgtattgtttgaccataagaatgtccgagcataatctttgaggaacttgttgcagttctctaccttcttgccatgcctgtcctacgcatacacctggaccgatgtgacgtatgtaaatgacgacactgtcgttgaatggatagggatgctttgctggtcgagggaagccttgtgggtaatcttcaatagcaagaagcccatcgccgaatttgcacgctacatcgcagggttcttctgtggccattacttccattgcttctgtgacctcaaagtatagtggactgaaagcattggcaagggttgaaactaccggtccaccacaaactcgcccatagatttggccgttgtaggagcgaaacaaagccatcttgaagaaatttatccaagatatgattagtggaccctgacttgttcggcagctgaagtattcaactggaatttccgcatttccagcagagaatatcttggatgcagtcattttagctaactttggatcttcataccgagtgcttgctatttcccatgctctagatataagccttggctctaataattgcagcaaatggtggcgcctctcttcggggatgtcttcaatctttttccagagataagcagccgggttatatgaagcagggtccaatggaatcaactccttggggggatcaagaaacgtcacaacatcagattcatcaacataaacccttttaccagtaggaagagtttcatagggtttttcatcccatggagattcatatcctctccctccttgaacagccataaccacacaacgagacaacctgttcgagagaggaaactcaagctgcggctttccattccggcgaattgagccttgaaccgccggcctaagtaccggagtccgtataagccaactctcctgaaccgcccctatcttcatctccggccaaacgaaaattttcccaacactttttttaaaaataaaatat

SEQ ID NO: 218 - DNA, 1721 bp, Arabidopsis thaliana
  Clone ID: ARATH-23APR03-CLUSTER13250_1
attttctgcgtgtttctcgggaaaatcgtcagcctgattgttttcttggtcaatcactgtttcgctcttgaggaaatcaaatgatatgagacgactgttgatgaaccgaaacctaagccccttgtgcagatccgtgctcagattcatcgatttatcagtctgtagagccatggcttgttttctcgactgcttccgcgccagagacaatcgctctactagtaatctcgtctctcactcttcactcaccaattccagaaaagcacaggactcgcagaatgatttgtcagctttgtttctttctgaagagaaatcagcttcttcgccttgccttgacaaagaaagatttgatttagattctatacatattgacaaaggccttagggatgaggcgcggtttcttaaagcttgtggtactataccggagacacctattgaaattaggaaagcatcccaaaaacttagtcctcaacattctggatcttcccattttcactcatggatttccagtagctcctctatggggtctcgtttggctgaatcctcaacccccatgaaagcttgtgaagaggtgggaagaccatcatttacttcagagcaaacagctagcagttgtgtaatcgatgtccgggacaatgcaaggatctcttctgcatctagtgatggtactgaggtagaaagcgttggcactgcaatcaagggtgagttggatagaacggccaggccaacgttcacagctggaaagaataagtctgtccggtttgaattgatcttgatcaatcaaactcttctaattcttccgagaatggcagttcaagaaaacccgagatgggtggcaaaatttgttttacagtgagctcacctaatccaacccccttgaaactatctgatgagatgcaaactcctggaaccatatatcctgcaaacatggaatcagggggaagggggaggcctagaatcaggtcacagtttgtgcattcagtttccaatataatggaaaatgcatccttatataaggtctacaaggattcacatgaaggcctagattacgaagagcagatagaggctgaaacaccctcttcagaaacttatggtgaaaaagtggaagaaagctcagatgagaaactgtccaagtttgaggcaagtttttctccttggctaaaccagatcaatgaaaacattgcggctttaaatgaaaggacaccaggagtcggtgtcataaccccaggtgacaggcctatcattggattggttgctgctcagtggatcgagaatgagcaaactgagatttcacccaaaatgtgggatggaaatgggatcccaaattcgacaaccaaatacaaggaggatcagaaagtgagttggcatgcaacaccatttgaagtgagactggagaaggcactttctgaagaaggtggtcagagtttattccctcaaaggaaacttgaagtgatgatggaggaggttgaaggggacacagacatatcgcagctgcaccattcagtgcaaccaaactcggtagtttccttctgaaagtctccttggctttcgtacagatcagtgttacttacatatggctatcacattactcatgagcaaatgaaatactcttgtttctggctttaaaaggagctttaaagatagtattaaaaaataaagtatcaacagtgatatgtttatgaacctcttgagaattttcttcaccacaaaaaaaaaaaaaaaaa

SEQ ID NO: 219 - DNA, 1598 bp, Arabidopsis thaliana
  Clone ID: ARATH-23APR03-CLUSTER13273_1
aaatcaattttattgaaaagaacatgtcatcgttctgagtttgggttttcgagctctaataatggctgcacatgcgacatcggagccggccgtgaatctcccggcgacgcaatttgaatctcaggttacagagccgttcggggtaactcttctagttcggcatcttcctgatggaattcctcatgatatcgtctctcggctcttttctcagtacggagcttctgctgttcgtccttgctccggtggaaaattgagaaacgctgcttttgtggatttcaagaatgaagcttttgcttctcaagcacatcgtcaattaaatgggctgaggtttcttggcaaggttctacaagtacagagagccaataaacctaatgacaacaagaagtctcgacaaatcgaagaatctgtgaccaaggggaatgctttctctactgttagcaccaacaatgattcaaaatctgggcagattctttctggcgaaccgatagctccaaaactcggcatagactatccatttcctcctcacctgcaatatgcttacccaccacccgatgcaaatatattagccaacattactaatgcccttatcgctgtcccaccgttatacacccaggtgctgcatctgatgaacaaaatgaatcttccacctccttttcgcctggccctgcccacaccacctctacctaaagcaggcccccaacaaactgacttggagcatcaatctagtagcgagtcagagatggaatctgatgaggatataggtacgtcaaaatcaggaaggaagcgtgctagacatggatttcttgttggtcttggtatggacaaggatgtgccacatgagactgttggagtgaaaccttcgtctttgaccccaaaagagatccctcgaataagaaagaataaacacgttatgcagatcaagatcacctctaaagttactcaagacgaatataaagaggaaagtgagaatgaagaccctgcagacgagcccaaagaaaaagattcaaatttgaaaccctttgcaagtttagaggaattggagaaaggaaggttacctccacaggatattctttcactccctatgttcaagaactacacagctgggaatccgtcggttgtactgtatatcaaaaaccttgccaaagatgttgttatcgatgatttctattacatatttgggtcacagtttgaaagcagcgaagtagctaaatcaagtcttggtgtgaggctaatgcaggaaggaaggatgagagggcaagcttttttgacatttccgtctgttgaagtcgcacatcgtgctctgaatcttgtaaatggttttgtgttcaaaggcaaaccaatgataatccagtttggcaggactcctggagcagccaagccaaacgaatgatgatgatatatataacatcaacggtttttgaagagtaggtgcaaattctttttgtgtatcatcatgtaactctttgactctcagtttaaagtcaataaaatatatcgctgcctaaaaaaaaaaaaaaaaaaaaagggcggccgctttaaagaatcaaattttacttccccttgcttgcaaattattattttttttttggggcccccaa

SEQ ID NO: 220 - DNA, 3243 bp, Arabidopsis thaliana
  Clone ID: ARATH-23APR03-CLUSTER13281_1
gaaaagaaaagaaacgtacaaggagaaaaaaggtttccattattgttgactgcttgagaaaaaaaggttaaacgtttctctcgcgtcatttcaattccattttctctacttttgttcttctgttagggagcgagagattagatagtcaaaatcaaatcgacatggattaagcacttagcagcttcttcaaggtccgattcatctcgaaacggtccccgattctactcgatcggaggagtagttgttgttgtggtagggtttacccattttggagcgcaatggagaatccacctgcggaggagctgctgaagaagatacttgagctagaggagagtcaggagcatctcaagcaggagatgtctaggcttaaggtatctacggagcttagacagcgatcgcattcggtgtctcctcatcgtccggcgaggagaaacatcggagagggagctccgtcttggaggaaaagcggtgccgcctcgtttcgtaacgcgtcgccgttgcggaaggagagccgtatccagaattcgatgagattgaggtctgaagttggtggcgggggaccatctgctgggaaattcactgataaacagtatttgaatattttgcagtcgatggcacaagctgttcatgccttcgatcttaatatgcggattatcttttggaatgctatggcggaaaaggtttatgggtactctgcagcagaagcacttggggagaaccctattaatgttattgcagatgatcgggacgctgcctttgcaatgaatattgctcgacgttgtgtccgtggagagagctggactggtgagtttcctgttaagagcaaatcaggggatagattttcagctgtcactacctgttcccctttctatgatgatgatggtgctcttatggggatcatttgtatcaccagtaacacggcaccgtatctgaacccaagaatctctttggctaaattgaaggcgcaagaagaaggtgaaacgagctctatccctgcaaggaatagttttgcctctaaacttggcttggattccagaggagctgttatatcgaaacttggccttgactctgatcagcctatacaagttgctatagcatcaaagatctcagatttggcatccaaggtcagcaacaaggtcaggtcgaaaatgcgagcaggtgataatagtgccacactctcggagggtggcagtggggatagtcatcaaaaagatcataatgtcttcggtgctactcttgttgaccacagggacgatgcagcatcaagtggtgccagcacaccaagaggggattttatccagtctccttttggtgtattcacatgtaatgatgagaagtttgtttcgaaacccttcaaagattccagtgatgagagtgatggaaagcctgcaatccataaggttctcacctcaaaagctgaagagtggatggtaaagaaaggtttgtcatggccatggaaagggaatgagcaggaaggttcaaaaggaagacctacaaattctgtttggccttgggtacagaatgaacaaaagaaagagaggtgtcaccagattaatccctctgctggtgttcagtatgaaagccatgcctttgaaagtaataagcctatcaataatgaggcttctagtttgtggtcttcccctataaatgcaaacagtacaagcagcgctagtagctgcggaagtaccagcagcagtgttatgaacaaggttgatactgatagcgaaggcttggaatatgaaattttatgggatgatttgacaattggagaacaagtcggacaaggttcatgtggaactgtttatcacggtctctggtttggatctgatgtagctgtaaaagtgttctccaaacaagaatattcagcagaggtcatagaatcttttaaacaagaggtattgttgatgaaaagacttagacaccctaacgtcctgctgtttatgggagctgtgacttcaccccagcgtctctgtatagtgtcaattactatttgcagtggaagtctcttccgtctactacagaagagcacgtcaaaactggattggaggcggcgtatccatatggccttggacattgctcgcggtatgaattatcttcaccattgtagtccacccattatccatcgtgatctgaagtcatcaaatctgctggtagacaagaactggaccgttaaggtagctgactttggtctctcgcgtatcaagcatgaaacatacctaaccagcaagtctgggaagggaacgcctcaatggatggcaccagaagttcttcgaaatgagtctgctgatgagaaatctgacatttacagctttggagtagtattatgggagcttgccaccgagaagatcccatgggaaactctcaactctatgcaggtgattggagctgtggggttcatggaccagaggctggaaatcccaaaagacattgatcctcgttggatctcattaatggagagctgttggcacagtgatacaaagctgagacccacattccaagaactgatggataaattaagagacctgcaaagaaagtatatgatacagttccaagcgactcgtgctgcgttatctgacaattctcttctcaaggacaactaattaaaataaaagttgagcctttttacctttttgttcctcaatgccatgcttcaagactcaaagacgttcatgagaacagagaaagatagagaatgggtctgtttgagcagtagtaccagtgggttgatgtgtaattacagcgtggaggagacctataagcagagactgccactgaaattatgggagttgtgttgtgatgtatttgggtcattacacaaactaccaaaagaaacgtattgctcaggttagttactgtaattctggtggtcggttctggtctctatttctctggtggaagcttaaagaaagtgcgtgaaagggatttgatgtgaagttgcaaagttgggtaggttgggcaagagattggattgcatatattattcttactaaacatttatgcgatcaagtgtggtagaaccatttgatgatattttgtacagaggaaaaaaaagggagtttggaactctagttctgagagaatattgtaacaccaattttttttggaacagacatttattgggggatttatgtaatctatacctacgttgaaaggttgtcaaattagaagttatcactaacctacaggttgatcaacaaacttcttgtttcaatgaataccttcgtttgaaaaaaaaaaaaaaaa

SEQ ID NO: 221 - DNA, 1235 bp, Arabidopsis thaliana
  Clone ID: ARATH-23APR03-CLUSTER134699_1
tctctttcgagagagtcactcgccactcacagaaaaaagtgagtgaatgagcgagcccaaccaggcagagtcatccatctctatctgaaagtctgctccgctgcctttgtgttgcggttccttgtgcacccacaagggtcgttgtcggcgtatgctctcatctgagtatcgacatgatggttctactggacggtggagctgcgctgtcagtagtcaaaaaagtttctgagagattgattaaaatatttatttgattacagatctgctctgctgctatagaattgcggattctagtgcaaatagaagggaagttgtcggcgaaaggtcacattttattattgacaagatgattcaaatggacggtggagataggctgagagtgacgttattagatcgaatgtcaacggtggagaatggccggagctcagtgactttagaagatattctgatggctgaaacgagcagtttccgatctcttactacgccgacaactccggtgaggaatcactctagtagtagtttacttgacgtgatgagaagagagcgtcgccgtgataaaaccgcttggaaatctctccgggataagctccgtcttaaacgcaccgctactggttggatctcgtctaatcctatccctaccttggataatcatattcttactccggataacgacagccaccgatttaaccgccttggattcctcctcactaactcggagacaaaccggagcagtcgtgacgtcagcgacgcagcagaggaagcggcggagcgagaaggaaggctccggctaggcaccgtgttggcggcggagagagaggaaatgcagccaccgaggatgtctctaatggagttgttggaggataatgatggacatatgtatgaactcagcgcgcgagacgaggtggaagtggagggaagagatggctgcgacgggggaggagaggcggtggctgtgacggtggcagcggagttgggttgttgcgtgtgtttggcacggtgttaaggggcggcttttataccttgcggacatacgttttgtagattgtgttcgagagagctttgggtacagagaggaaactgtccactatgtaacactgccattttacaagttcttgatattttctaggttagcttcttttgcaattttatatcatttaaagtgtacttttcttcacttgtttgtttgtgaatctcaaacaatgaaccttcacaacaatgcttaatcaaaggccaaa

SEQ ID NO: 222 - DNA, 1451 bp, Arabidopsis thaliana
  Clone ID: ARATH-23APR03-CLUSTER13572_1
aagaacaacagaaaatttcaaaatggtttctcagataatctcgtgtttatctcaatcttcgtctcttctatgtttatccgattcaaggaggttaattcttaagaacaacagaaaatttcaaaatggtttctcagataatctcgtgtttatctcaatcttcgtctcttctatgtttatccgattcaaggaggttaattcttccgaagacttgtacttgcggcggtttgagccggttttctccaggatttgctagccgccggttatttacggttaatcggaagaaatggagatcggcctgcattttcaactctggaaaggaacctggaggagagggaaagttacaaggaggtagctcagagtggccgatacttcagagatgggaagttccatggggatggcagacagtttcgttaacttcgtttgcttgtgcactaaggctgttttgttttgacaggattaaccgagatggcagtcataccgtttttaggaatcgacgttgagaaactgaccttggacgataaggcggagattttgttcctggatcaaggcctaacaaccgcggtggtacttgctgtcatattcactgttgccaaaaccttcgacccacttcctgaagatattcttcgctatgatttgagacaacccgtcaacctgcaaaaaggatggcttgtgtggggtggaatcggtctggttggtgctgttggtgctattgcgttaacaggtgttgttttatccgtgttcaggacagaagcacctgaaagggaggtagactctttgatgaagcttcttccattaattggatcctcaaacataagcaccttaagcttagtgggcataactggaatccttgctccacttctggaggagaccgtgtttcgcggattcttcatggtctctcttaccaaatgggtcccgaccccaatagcgatcatcatcagctcagctgcgtttgcccttgcccatttcacacctggtgaattcccgcagctgtttattctaggaagtgttttgggattatcatatgcacaaacccgcaatctcattaccccaatggtcatacacggtttctggaactcgggagttattttgctactcacttttcttcagatccaagggtatgacattaaggagctattgcaggcaaactagctctgagccatgctctttgtgctgtccgcatttaacatcaaaaagcttcattatgtgctcgatgttagtaagatattttgtattcgagaacagatttcatacttaatgcaatttgggttttggtatactcaatgttagtaagatattttgtattcgagaacagatttcatacttaatgcaatttgggttttggtagagttatctttattacaacatcatgacagtaatgtatgaactaatatggtagagatgaatctttttggaacaaaaaacaaatttatttgcaaaaaaaaaaaaaaaaa

SEQ ID NO: 223 - DNA, 3665 bp, Arabidopsis thaliana
  Clone ID: ARATH-23APR03-CLUSTER13574_1
tggggtttacagattctatgcaaagtttgctcctttttctcattttatttgtaaagtttccttttttgggttttcattatctgttggaaatgggatttcatgattggtagccgcaacaattccggtgacgttggggtttttcatttttttaattgaagttttttgagtccaaaatctgcaggtgttaattgggtgtgattaggtccattagggtttattaaatcattttttgattgattatggtttgaatccccttgaccattgagttaccttgagaaagaacttgtcatatttttgtattaaactcttcattaggccttctttcacatgatgatgatgatgatgaattgatgatcctataaactgttgaagcaatcattcatattttgttgtggttgatgaagagttctagataaattgtttatcctgctttagtttgatgattgttaaggccaagaagagtgtaattcttgttgttgctcaagtaattgaactgatattttatgatgtttgcttctgtgtctgttccttagtcgatgctctgcagcaaatcgctaccacattgggctcgaaattctggaaattcgatgctgaaaattgtaagattgaaatggtggggttaactgaaactcctcctccaacagctaagcaagaaatagaatgtgaatgcagtcccactaacgacactgattgtcatgttgtcaaatttgcattcaaggaccataatcttccaggaactcttcctcaaatagtcaagcttccctaccttcgggagatagacttggcctacaactacatcaatgggaccttacctcgtgaatgggcttcttcaaatttaacttttatttctcttcttgtgaatcggttgtctggagaaattccgaaggagtttggaaactcttctctaacatacttggatctcgagtcaaatgcgttttctggaactattcctcaggagcttgggaacttagtccacttgaaaaaactgttgctttcctctaacaaattgaccggaactttgccagcttcactagctagactacagaatatgacagatttcaggattaacgatcttcaactcagtggaacgatacctagttacatacaaaattggaagcaactcgagagacttgaaatgattgcatctggtctcactggtccaatcccatcggtcatctcagttctgagcaatcttgttaatctgaggatcagtgatatacgtggaccagtccaaccattcccttcgttgaagaacgtgacaggtctaactaaaattatattgaagaactgtaacatttctggacaaattcctacttatctttcacatttgaaggagttggagacactggatttgagttttaacaagttggttgggggaattccgtcgtttgcacaagcagaaaatttacggtttataattttggctggaaatatgctcgagggagatgctccagatgaattactaagagatggaatcacagtagatctttcatataacaatctcaagtggcagagtcctgaaagtcgtgcttgtcgcccaaatatgaatctgaatctaaacttgtttcagagcacttcgacaaaaaaatcgagcaaatttctgccgtgtatcaaagatttcaaatgtcctcgatattctagctgcttgcatgtgaactgcggtggaagcgatatgtatgttaaggagaaaaaaacaaaagaattatatgaaggagatggaaatgttgaaggtggtgctgctaagtattttttgaagcctgacgctaattggggatttagcagcacaggggacttcatggacgataacaatttccaaaacactagattcaccatgtttgtcccggcatctaaccagtctgatctctacaaatcggcacgaattgctccagtatctctaacttatttccatgcctgcttggaaaatggaaattacactataaatctagacttcgctgagatacggttcaccaatgatgaaaactataaccggcttggaaggcgtctgtttgacatttacattcaggagaaattagtggcaaaggactttaacatcatggatgaagcaaagggagctcaaacacctataatcaaaccacttactgcctatgtgacaaaccactttttaaccatccggttgagttgggccggtaaaggaactaccaggattcccactagaggggtttatggtcctatcatatcggctatttccatagtttcagattccaagccgtgcgaacgtccgaaaactggaatgagccctggagcatatattgcaattggaattggagcaccatgtcttattatctttatactgggatttctgtggatatgtggctgcctcccaagatgtggtcgacaacgaaaagatccgtatgaagaagagttgccttctggaacttttacattgaggcaaatcaaattcgctacggatgacttcaatccaactaacaagattggagaaggtggtttcggtgctgtctttaagggtgtgttagcagatggaagagttgtagcagttaagcaactctcatctaaatcgagacaagggaaccgagaatttctaaacgagataggcgcaatttcttgtcttcaacatccaaatctcgtcaagcttcatggtttctgcgtcgagcgggctcagctattactggcgtacgaatacatggaaaataacagtttatctagcgcgttattcagtccaaagcataaacagataccaatggactggcctactaggtttaagatttgctgcgggatcgcaaagggtctcgcgtttctccatgaggaatcaccgttgaagtttgtacatagagacatcaaggccacaaatattttattggacaaggacttaactcccaagatatctgatttcggattggctaggcttgacgaagaggagaaaacacacatcagcaccaaagttgctgggactataggatatatggcaccagaatacgcactgtggggctacctaactttcaaagcagatgtctacagcttcggtgttttggttctagaaatcgtcgccggcataaccaacagtaatttcatgggggcaggagattccgtttgcctcttagaatttgctaacgagtgcgtagaatcggggcacttgatgcaagtagtggatgagaggttgaggcctgaagtggatagaaaagaagcagaggcggttataaaagtggctctcgtgtgctcgagcgcttctccaacagatcgtcctttaatgtcagaggtcgttgctatgctagaaggtctatatccagtgccagaatcaacaccaggagtaagcaggaacgcaggggatataaggtttaaggcatttaaagatttaaggagaggcatggagaacaatagtaagacgcagtgttctgttaaaagctatccgtcttcttcttcgacttcttctggggcaggacaagcagttcaagaaagaaagaaagaagagtcaaggccttgaagaggttttgaatccttccctctctttttttttttttgtaaaatgtctgtctttagtaaaatgtttatgagtttattctgtgattagtcatttactgtaattccccatatctgtatttaggttctgttagttggggattgaatgttgtgaaaactcaaaactcaaatgatatataatcagtgatcttacaaaaaaaaaaaaaaaa

SEQ ID NO: 224 - DNA, 2886 bp, Arabidopsis thaliana
  unsure (1)..(2886): unsure at all n locations
  Clone ID: ARATH-23APR03-CLUSTER13597_1
ggcttctcctcttatttcttctctctctctttctgntggagaagctgaatcagaagagtttttttttgcttcaaaaggagctccggcgaaacttccggagatattaacacttactctgacgagtttttgtctcgtcttacgtctttgctgctgctgttgatggaacttgacgacttggatctcagcggttcttggccgttagatcagatcacttttgcttcaaatttcaagtctcctgtcattttctcttcctccgaacaacctttctctcctctctggtccttctccgaaacttctggagatgtcggcggcgagctttactccgccgcagtagctcccactcgcttcaccgattattccgtcttactcgctagttctgaatctgaaaccacgaccaaggagaataatcaggttccttctccgtcatggggtataatgcctttggagaatccagatagttactgtgccatcaaagccaagatgactcaagcgcttagatacttcaaggaatctactggacaacaacatgttcttgctcaggtttgggcgcctgtcaaaaaccgtggtcgatatgttcttacaacttcaggacagccatttgttcttggtcccaatagtaatggccttaatcaatacaggatggtttcattgacgtatatgttttcccttgatggtgaacgggacggagagctcgggcttcctggtcgcgttttcaggaaaaagttacctgagtggactcctaatgtgcagtattactccagcaaagagttttcaaggcttggtcacgccttgcactataatgttcagggaactttggctttgcctgtttttgaaccatccaggcaactctgtgtaggagttgtcgagcttattatgacttctccgaagattaactatgctcctgaggttgaaaaagtttgtaaagcgcttgaggccgtgaatctgaaaacttcggaaatattgaaccacgagactactcagatctgcaacgagggtcgccaaaatgcgttagctgagattttggagatactgacagtggtgtgcgagacctacaaactgcctttagcccagacatgggtcccttgcaggcatcgcagtgttctagcctttggaggtggttttaagaaaagctgttcgagcttcgatggaagctgtatggggaaagtctgtatgtctactagtgatttagcggtttatgttgttgatgctcatgtttggggtttccgagacgcctgtgctgaacaccatctgcagaagggacaaggtgttgctgggagggcgtttcagtctggaaatctatgcttctgtagagatgttactcggttctgcaaaaccgactacccattagtacactatgcacggatgttcaagttgacgagctgtttcgcggtctgcttaaagagcacatatacaggggatgatgagtacgttcttgaattctttcttcctccagccatcacagacaagagtgagcaagattgtctattgggttctctgcttcagacaatgaagcagcactattcgagtctcaaggttgtctctgaaactgaactctgtgaaaacaacatgtctcttgaagtcgtggaagcttcggaggacggaatggtttactcgaaacttgaaccaatcaggatacatcatccagcacaaatctctaaggattaccttgagctcaacgcacccgaacagaaggtgagcttaaactctgactttatggagaataatgaagttgatgatggggttgagaggttccaaacgcttgatcctataccagaggccaaaacagtgaaaaaatcagaaaggaagcgtgggaaaacagagaaaacgatcagtctagaagtgcttcaacaatattttgctggtagtctaaaagatgcagcaaagagcctcggagtttgcccaacaacaatgaaacgcatttgccgacaacacgggatctcacggtggccatctcgaaaaatcaacaaggtgaaccgatctctcacacgacttaaacatgttatagactcggttcaaggtgctgatggatcactcaacttgacgtccctctctcctcgcccttggcctcaccaaatccctccaatcgatatccaattagcaaagaactgccctccaacttctacatctcccctaagtaatctccaagatgtcaaaatcgaaaacagagatgcagaagacagtgcaggttcatcaacatcgcgtgcttcttgcaaagtgaatcctatttgcgagacgcgttttcggcttcctacacacaaccaagaaccatccagacaagtggccttggacgattcggatagtagctctaaaaacatgacaaatttttgggcacacttaacctgccaagatacagcttctccaacaattctccaacataagctcgtgagtataaaggcaacgtacagagaagacatcatcaggttcaagatctcaccagagtcggtaagcattacggaacttaagcagcaagtggccaaaaggctgaagctcgaaacggcagcctttgagctcaagtatctagacgacgatagagaatgggtctccgtctcatgcgatgctgacctcagcgaatgcctcgacacgtctgcagcaaaagcgaacacactgaggctctcagtacatgacgtgacttttaactttgggagctcatgcgaaagctcagaggaaactatgatgtgcttgtgacaatgcttcacttgtatacaactttcttgtatggatctgagagttttgtttcttatttttctctggaaacatgtcttctttagaagaaggttttagtgttctatttttttataagatgtataaaagcacacttctccacatcaatagatgttgattggaataatgatatataattgttattatctaccaaaaaaaaaaaaa

SEQ ID NO: 225 - DNA, 1593 bp, Arabidopsis thaliana
  Clone ID: ARATH-23APR03-CLUSTER135_1
gatggtaacggaagccgtgaagaagtggaggtaggagctgcgtcgtggctgttacttcccattccctagacttcaacgacggcgacggcgggatggaccccacatggatagactcattgacacgctcatgtgaagccaatagtaacaccaaccacaaaagaaagagagagagagagacactgaaacatagagagaagaaaaagaagaggtttagagagagaaaaatggcgtcaaagctctgcgattcgtgcaaatcagcgacggcggcgttatactgccgaccagacgcagcgtttctatgcttaagctgcgattcaaaagtccacgcggcgaacaaactcgcgtcacgacacgcgcgcgtgtggatgtgtgaagtgtgcgagcaagcaccggcacacgtcacgtgcaaagcagacgcggccgcgttatgcgtcacgtgcgaccgtgatatccactcggctaatccgttagctcgccgtcacgaacgcgttcccgttactccgttttacgattccgtctctagtgacggttccgttaaacacaccgccgttaatttccttgacgactgttacttctccgatatagatggtaacggaagccgtgaagaagaggaggaagaagctgcttcgtggctgttacttcccaatccaaagactacaacgacggcgacggcggggatcgttgctgttacttcagctgaggaagttccgggagatagtccggagatgaacactggtcaacagtatttgttctcggatccggatccgtatctggatctggattatggaaatgttgatccgaaggtggaatcgttagagcagaatagctccggtactgatggtgttgttccggtggagaatcggacggttaggattccgacggtgaacgagaattgctttgaaatggattttaccggaggatctaaaggctttacttatggtggtggttacaattgcatcagtcacagcgtgtcatcatcgtcgatggaagtgggagtggtgccagatggtggttcggtggctgatgtatcgtatccttacggtggtcctgcaaccagtggagctgatccggggacacagcgggctgttccgctgacttcagctgagagagaagcgagggtaatgaggtacagagagaagaggaagaacaggaagtttgagaagactataaggtatgcttcaaggaaagcgtatgcggaaatgagaccgagaatcaagggacggtttgcgaagcggacggatacaaatgagagcaatgatgtggttggtcatggtggtatctttagtgggttcggacttgtacctacattttagatattgagagagggagagactctaaaatggaagatggtgggtggtttggtgtttgttttagtaataaggtttttaacgaacgtttaatttaaacgagtttgtttgttttttgttgatgagtatttttagttgttgtgggcgatgaagaggaagagaagtgagtgggtggtgtttaactgtttataagtaacttgttttgtatatatcgtgattttgaatatgttcttgtttatgttatgtactcaaactatttagaatcaacaagtttacaaaatttggg

SEQ ID NO: 226 - DNA, 2180 bp, Arabidopsis thaliana
  unsure (1)..(2180): unsure at all n locations
  Clone ID: ARATH-23APR03-CLUSTER13607_1
gatcaaaaactcgacaatggaaactcccaaaggcactatcattttcaccaccgtcggtcgaactcactacggcttcgacgtcttctctctcaacatagccacctccgtcgaacgccgtttaacagacggcgtttccgtgaacttcaacgctcaattcgtcaacgataaaagcgatgatgtcgtctttgtttcggaaagaaacggatccgccaggatttacaaaacccgatccggaatttctaagcccgagcagattcccggagctccagagagctacttccacgaccgtcctatcatcactcaaaacaacagactctatttcatctctgctcacgagcaacctgatcgttatttcaagaattggtctgcgctttacaccgtggagctcaacagcgcaaagagagaagttacacgtgtcactccaccagacaccgccgactttagtccggcggtttctcaatctggagatttcttagccgttgcttcttatggaactcgctcttggggtggtgagtttcacgagatcaacactgatattactgttttcaaagcatcaaaaccagagacaagagtggttatctgcgagcgtggtggatggccgacttggtccggcgattcaactgttttcttccaccaccaagcagacgacggttggtggagcatcttccgggtagatataccggagaatttcacggaatataccgatttcccaatcacaccaatccgagtcactccatctggactccattgcttcactcctgcagctttccgcgacgggaaacgaatcgccttagcaactcgccgtcgcggcgtcaaccaccgtcacatcgagatttacgaccttgaaaacacaacgtttcagccggtgactgagtcactcaatccgagtttccaccattacaaccctttcgtgtctccagactccgagttcctcggctaccaccgattcagaggcgagtcaactcaaggcgagtcaatcgtacctaacatcgaatccatcgtttcaccaatcaaaaccctccgattactaagaatcaacggatcgtttccatcatcatctcccaacggtgatctaatcgcattgaactccgatttcgacatcaacggtggaatcaaagtatctaaatccgacggttcaaaacgatggacgttgatcaaagaccgtacagctttctacaattcatggagtccaacagagcgtcatgtaatctacacatctctaggtccaatcttctctccggcgagaatcgcggttcagatagctcgaatcaagttcgatccatcagatctcaccgctgataaagaagatcttccatgtgatgtgaagattctcactctagagaacactgggaataacgcttttccgtcttgctctccggacggtaaatcaatcgtgttccgatctggtagatcaggtcataaaaatctctacattgtagacgccgttaacggagaatctaacggcggtggaatacgacggttaacggatgggccatggattgacactatgccttgctggtctccgaaaggagatctcatcggattctcatctaatcgtcataatccagagaacacggccgtgttcggtgcttacgtggtgagacctgacggtactggtttgaggaggattcaaatttcgggaccggaagggtctgaggaagcggcgagggagagagttaatcatgtgagtttcaataaagatggtgattggcttgttttcgcggcgaatttgagcggagtaacggcggagccggtgacgatgccgaatcagtttcagccttatggggatttgtacgttgtgaaattagacggaacgggattgaggaggctgacgtggaatgggtatgaagatgggactcctacgtggcatactgctgatgaattggatttgagtcagttgaatttgaacggtcaagatggtgacaagcttgaaggtcagtttgaggagccgttgtggatttcttgcgatatctgaatgcgatttctccttttcttataaaagactgtcatatttatgtaatctcgctttttttatttcaataaaacaaacaaaaataaatgcatttagcattatataaaaaaaaaaaaaaaaaaaaaaaaaaaaaaaaaaaaaaaaaaggtcgtccgccgcatattggggtcttcgacnnnnnnnnnnnnnnnnnnnnnnnnnnnnnnnn

SEQ ID NO: 227 - DNA, 2679 bp, Arabidopsis thaliana
  Clone ID: ARATH-23APR03-CLUSTER13643_1
ggatttaacttatactactcaaaatcaaaattccataaaccctagacgaccaaacagtctcttcaatatgtaaaacagaacaaagtttttgtagtagcctaaaaagacactcccatggaagctctgagtcacgtcggcattggtctctccccattccaattatgccgattaccaccggcgacgacaaagctccgacgtagccacaacacctctacaactatctgctccgccagcaaatgggccgaccgtcttctctccgacttcaatttcacctccgattcctcctcctcctccttcgccaccgccaccaccaccgccactctcgtctctccgccaccatctattgatcgtcccgaacgccacgtccccatccccattgatttctaccaggtattaggagctcaaacacatttcttaaccgatggaatcagaagagcattcgaagctagggtttcgaaaccgccgcaattcggtttcagcgacgacgctttaatcagccggagacagattcttcaagctgcttgcgaaactctgtctaatcctcggtctagaagagagtacaatgaaggtcttcttgatgatgaagaagctacagtcatcactgatgttccttgggataaggttcctggtgctctctgtgtattgcaagaaggtggtgagactgagatagttcttcgggttggtgaggctctgcttaaggagaggttgcctaagtcgtttaagcaagatgtggttttagttatggcgcttgcgtttctcgatgtctcgagggatgctatggcattggatccacctgattttataactggttatgagtttgttgaggaagctttgaagcttttacaggaggaaggagcaagtagccttgcaccggatttacgtgcacaaattgatgagactttggaagagatcactccgcgttatgtcttggagctacttggcttaccgcttggtgatgattacgctgcgaaaagactaaatggtttaagcggtgtgcggaatattttgtggtctgttggaggaggtggagcatcagctcttgttgggggtttgacccgtgagaagtttatgaatgaggcgtttttacgaatgacagctgctgagcaggttgatctttttgtagctaccccaagcaatattccagcagagtcatttgaagtttacgaagttgcacttgctcttgtggctcaagcttttattggtaagaagccacaccttttacaggatgctgataagcaattccagcaacttcagcaggctaaggtaatggctatggagattcctgcgatgttgtatgatacacggaataattgggagatagacttcggtctagaaaggggactctgtgcactgcttataggcaaagttgatgaatgccgtatgtggttgggcttagacagtgaggattcacaatataggaatccagctattgtggagtttgttttggagaattcaaatcgtgatgacaatgatgatctccctggactatgcaaattgttggaaacctggttggcaggggttgtctttcctaggttcagagacaccaaagataaaaaatttaaactcggggactactatgatgatcctatggttttgagttacttggaaagagtggaggtagttcagggttctcctttagctgctgctgcagctatggcaaggattggagccgagcatgtgaaagctagtgctatgcaggcactgcagaaagtttttccttcccgctatacagatagaaactcggctgaacccaaggatgtgcaagagacagtgtttagtgtagatcctgttggtaacaatgtaggccgtgatggtgagcctggtgtctttattgcagaagctgtaagaccctctgaaaactttgaaactaatgattatgcaattcgagctggggtctcagagagtagcgttgatgaaactactgttgaaatgtccgttgctgatatgttaaaggaggcaagtgtgaagatcctagctgctggtgtggcaattggactgatttcactgttcagccagaagtattttcttaaaagcagctcatcttttcaacgcaaggatatggtttcttctatggaatctgatgtcgctaccatagggtcagtcagagctgacgattcagaagcacttcccagaatggatgctaggactgcagagaatatagtatccaagtggcagaagattaagtctctggcttttgggcctgatcaccgcatagaaatgttaccagaggttttggatgggcgaatgctgaagatttggactgacagagcagctgaaactgcgcagcttgggttggtttatgattatacactgttgaaactatctgttgacagtgtgacagtctcagcagatggaacccgtgctctggtggaagcaactctggaggagtctgcttgtctatctgatttggttcatccagaaaacaatgctactgatgtcagaacctacacaacaagatacgaagttttctggtccaagtcagggtggaaaatcactgaaggctctgttcttgcatcataatatactcatatgtagcatgtctgagcttgcgagattctctttgttttgtaaattctctctctaagttagtgtttataaatgaacacaaaaaaattaacgttcttggcacaaaaaaatccttgatctaaactataacataagggctacaattttggattc

SEQ ID NO: 228 - DNA, 1261 bp, Arabidopsis thaliana
  Clone ID: ARATH-23APR03-CLUSTER137642_1
tttttttttttttttttgccaagatgattttttaaaatttcaagacctcgtacaaagtgttaaatgggacaaaacacagttaaaaccaaaaaatgagggttaagagtttgcagaaccaaaaaaagagcacagcatttacatacacacaactgtcttgtagcttcacgtgactctctttacccctcccgaccaaaaaatacagaaaaaaatcacagtagaaagagaaagatacaaaggactaagggtaaaaacggtaaaaccccaaaaagatgagatgatgaagagaagctcttttgaaactgtagagagtcaactgctaaaggcatgttctcttggtcaggactacacttgttgaggtgaggtgggtgtggactatacataatagctcttaacacagccgaaacagtgggaatgtatgccgttttgttacgagctagtagccatgtgagtcccatgagctggcaatctttgctcatcatcttagtccctctctctgttgttgtcttcttgtttcctcctcttacctttagcttttgaagagcaccgaggcatctggtacaaccggagtaagaagagttccggcattctttttcaagattcttcacggcggcggtcggagttgcgtttttgaagccggaggagacattgaaagcggcgggacaagagagtgagctaatctggtggagacgaataccacagaagcacaagattgcgtcacagctagaattaggctgagggatcttgatttgtttagtcaaaagcgcactttgcaatgtgttgacgcacttctgagagtcgtcaggcttcatgggttcgtcgggatcagaagattccggcgttggagcaggagctggtaactggagagcagagcgagcgtgagctgcgaagagccaagcggctaaaacagggcaacatcgactccggtcaaggtttcttccgcaagcttcgttgacgccaccgaatagctcgttggagaggtcaagccggcagctttgagcttgggtttcgaccgggaaagccggtacggtgttgggttggaccggttcgacgagtaggttgctcaagacggtggagaagaggagagtacagaggaggaggatgagtagagtgagacttttcttcattctaaatggctatagagagagggagagaaatggatttagatagtgaaacgttttctcaaatttgaagagtcttttaagattctgagattcacgaagaaaagcagccttccattattcacgatcttctctctcttttg

SEQ ID NO: 229 - DNA, 2257 bp, Arabidopsis thaliana
  Clone ID: ARATH-23APR03-CLUSTER1379_1
caataattctcagcttgccgcagtgctacagaactcagctaagctttttgtgagtgaagatggaaagaaagtgagacgcttaaatccgattactgagtctgctatagaaaaacgtcagtcgaggaccattgtggctggagaagctctctccaaaaacaaacgaaaagaagcgacttttgcctcttttggtctctccccttctccggagagatctgctctctctatctatctctcaatctgtaagaagaagattcccacttcagtaaaagccctaactttacttgggaaagttcttcatctatcatccttcaatcgtcatcatccatggctgatcaacaaaccctagattcctctactcctcctcctactcaatccgatgatctatctcactcccactctacttcctctactacttcagcttcttcttcctcagatccatcactcttgaggtctctctccttaagtcgactcaacgccggagctcctgagttcgttcctggtcgaactactcctccgctgcctcaacctccgaggatgattatcccgcctcctccgccgcacggtatgcttcatatgtatcaccaccagcctcctttcaatactccagttcttggtcctgttccaatccagccacacttggttcctgttcaaaatcaccaccctcatcatcgctttcatcagcatcatcatcacaatcgtcatcagaatcagcaatatgtcccggtgaggaatcacggagagtatcagcagcgtggtggtgtcggtggtgagcaggaaccggatttggtttcaaagaagaatgatcggagagatcatagtaagagagaatctaagaacgatcaagtgactgaaactggagcttctgtttctattgattcaaaaactggtttgcctgaagattctatccagaagattgtgaatcaggttgaatactatttcagtgacttgaacttggctactacagatcatctcatgagattcatttgcaaggatcctgaaggatatgtgcctattcatgttgttgcgtcgttcaagaaaattaaagctgtcattaacaataattctcagcttgccgcagtgctacagaactcagctaagctttttgttagtgaagatggaaagaaagtgagacgcataagtccgattactgagtcggctatagaagagcttcagtctcgcattattgttgctgagaatctccctgaggatcattgctaccaaaacctgatgaagattttttcaactgttggaagtgtgaagaacatccgtacctgccagcctcaaaataatggaagcggtgctccacccgcagcgagatcagcagctaaaagcgatggtacgcttttcagtaacaaggtccatgcttttgttgagtatgagattgttgagctagccgagagagcagttaccgagttaagtgaagcgggaaattggaggagcggtcttaaagtccggttgatgctaaagcatcagacgaaggaaccaaaacaaggtcaagggcgaggaagaaaaggacatgatgcagatgtagaacatgaggaagatgatgctacaacatccgagcagcagccgattgagaaacaatctgatgactgttctggggaatgggatacacatatgcaagagcagccaataggagaggatcaagggaatgagaaagcggctgggcagagaaaagggcgtaacagaggtagaggaaagggacgaggacgagggcaaccacaccagaaccaaaaccagaacaacaaccacagccataaccaaaaccacaaccacaatgggcgaggaaatcatcatcatcatcatcatcatcaagtgggaacacaaccttcgaacaatccaatgaacaacatggagcaaccaggcatggggaaacagcaaccacctggaccacgaatgcctgatgggaccagaggattctcaatgggacggggaaagccggttatggttcaggcagagtgatccagagctgttttgaaaaggaggtgatgtggaattgtgaatggtcaaaaagggagataaatagagagagagcaagagagaaagagagagatttatccttcccatggggattggctagttttgcagactttatatttgtcttacttacttcgaaatacttttcaattacgcttctcttacaaggaaacaacaaaaaaactacattttcctcatatagtgtacgtgtaatgaaacagcaatttcagttaatattttgtcctaaaagcttttcaaaaaaaaaaaaaacatttttatc

SEQ ID NO: 230 - DNA, 1260 bp, Arabidopsis thaliana
  Clone ID: ARATH-23APR03-CLUSTER13873_1
gatttttagggtttcttcgtgccattgatattttgagaggcgaaggaaacaatacgattcagagagagacgagtgaaaatggctgcaaaagaaggtagtaggatttttgtcggtggtttatcgccagaagtgacagatagagaccttgaaagagcttttagccgcttcggagacattctcgattgtcagatcatgctggaaagagatactggtcgttcacgtggattcgggtttatcacttttgctgatcgccgcgctatggatgagtccatcagagagatgcatggaagggactttggtgatcgggtcatctcagtgaacagagctgaaccaaaactggggcgagatgatggagaaagtcatggctctagaggtggcagagacagtggctactcgattgctggaaaaggaagctttggtggaggtggaggtggaggtgggcgtgttggtgaagatgaatgcttcaagtgtggacgggttgggcactgggcccgtgattgtccttctgctggtggtggtcgtggaggacctgttggtggtttttcttcacgtgctagtgcgtatggaggatctgatggacgtgttgaccgctatgctgaccgtgaccgctatgtggaccgcgaacgatacatagatgatcgatacgacggtgctgcacgctatggtgctagagacaggtttgacagcagagaagcctacataccccgtgatcgatacgccagtgacaggtatgcagccccggctgatcggtttgcaggtggtgatagatacagccgtggatcagaccgttatcctccagggagctatgacaaagctcggtcctttgagagagacatagccccgagtgcaggcagtgacaggtacggtggtggtagagctggtggtcccatccgtggaggaggagaggagggaagagggtttagaagcagagccggtgctccttatgagagaccgagcagaagtggtggtggtggagcttatccgtcgtcgtccacttttgaccgttattaagacacattaatgaaagaaagtgagaatgatgcttggttagagctctatacactcagtcgtgtgtgttgcttgtggtaatgaatatctctgtaagcgttataggtgtaaaagacttgtcttttttatttatatatgattagtttgcggacctgtttagctttgtattttgatcctttattatttttggtttgttttggaccataacatgacttttgagcttcgtcagtcaatgttaaaccttgcacacat

SEQ ID NO: 231 - DNA, 1267 bp, Arabidopsis thaliana
  Clone ID: ARATH-23APR03-CLUSTER1388_1
atggaagtttccggcgtcgtcctccgacaaattccatgtgtttcttcaggttccgttgcaggtctccgattagtatcggaattttccggtaataccagaacggtagggtttcgaaccagaagatttcgtggtattgtgtgtaataatgagtttgcggctcgagggcatgtgaattactatatcgagccaacgagatgcggcgaggagaaagagaaggttaaggttatggagaaggagaagaaggcgttgaagaagaaggcgaaagttcttaaaagtctttctaagaacttggatatgttctctagtatagggtttggtcttgatcctgaagctggtttggttggtgagattcagaccaagacaatctcggaagctacagagatattggttaagcagctggagcagttgaaagcagaggagaagatattgaagaaacagaggaaagaagagaaggctaaagccaaagccatgaagaagatgactgaaatggactctgaatcatcttcttcgtctgaatcaagtgatagtgattgtgataaaggcaaagttgtggacatgagctctttaagaaacaaggctaaaccggttcttgagccgttacaaccagaagccacagtagcaacccttcctaggatccaagaggatgcaatttcttgcaagaacaccagtgaagcattgcagattgctctacaaacatccacaatttttccttcaatggccaatcctggacagacattgaagacggtagaagcggtttcagtggttggattaccattgaatagagtagaagtgtgtatgggagggaagtgtaagagatcaggaggagctttgttgttggatgagtttcaaagggcgatgacgggtttcgaaggatctgctgtggcttgcaagtgcatggggaagtgtcgtgatggcccaaacgttagagttgtgaaggagactgatgctgtgatgactgattcagttaggacaccatccaagaccctttgtgtaggagttggattgcaggatgtggaaactattgtgacaagtttctttgatgaagaatgtagcagagaaggactcggttctgtctcatattgaaagtgttttgaaacggctaatgttttatatagtgtggtgctttctcattgtacatatttaccttctcgataagtcattgatataagccatgtaattgcgataagacctgtaaagatcaacttaagcaaaaacatctgcaaaaaaaaaaaaaaaaaaaaaaaaagaaaaaaaaaagggcggccgc

SEQ ID NO: 232 - DNA, 11571 bp, Arabidopsis thaliana
  Clone ID: ARATH-23APR03-CLUSTER139250_1
ctagtgaaactttctttgaaaagttcaaaagtacaatttataacacagaaaatgttgcaaaaaggcgacagaccaaaaggagttataaatacataaaggttacatatttacaaccctaatgagtaatgttagcttccattaaattaaaaacacgtaaatacatattataaatttactttgaagttagaaccaaggatgccatgttggatccatcatacataagttgcgaggcgacaaggctgcctccaccaactcgttcactcctctttgcactgactgcggcggctccaccgtattctcatcctcttcggaaaagtactgtggggctattcctctgatccgtttaatgacatcttccacattggcgttaactttgtgcttcagctcagctgggttcaaagtagcaattccaccaacaggaggaatcggcacaccaagaggtcttcttccaaaccaagacaacaattcatcacggaagaacatagcaagttggtaccgtagatgttcgttttgcttggaggagattactgcttgcgctgctgaacacatggatgacatgaggagaccttcgactccaaactgagagaagaaagcttgcatgttccttgtgaggcggaaaggcacaggttcgttaaattcaatcatcccattggcgtcataagcagggtgaaaatctgtctggaacattttcccggtgttttttgcaaacaagaccttgttcggggacctcccaccaatttgtagcatgaaggacatgaaactggagactgctagctggactgcaaattgtttcttgaaagcccacatatggcttccgctcatcaacgtcttgtacatgtactgagaaaagatactgtcattgaccaaggtttttgtgatgtcaatatatgcctgcagacgaagatctcctattgcctctgctgatatttgccctgatatagcttgattgagttgctccttaaagtgggtaattggaagatctgcctctcggtcatttcgtgcacagtgattctcatacacctcaaggaaagtgttgtacatgagatcatcctcaaccatccggacctgagaccagacaggaatgatgattggagtgtggattccaatgtgccgtcttcttgattccttatgcttatcaaacatttggttcattacacggaaaagctgcaagatgcgttcatcacttctagcattaggcgtcaatgatgtctggactataaagtgcttttgcgagccatctgagccaataagagtcaaccgcctgaagctgcttccatgccttcgaacaataggaacgtctgctccaaccctatccaactttactgtatgatcaggtgctacttcctggtcagcaaagtactgccctggtatctccacatcaacaacattaaagtcacgcaaaaccctgctctcatcttccaatcttaacacagcaggaaacctgtcttcaacattgctctgaagaatatttttccactttttcagtcgagcggtcagctcagcgagtgtggcagggaatgtagttgtactttctggatcaaggtgacgctcaaaatcctgtttgtactcttttacaaattcgacatgcttggttacagcatctgccgagaaacaagctctgcagacacccgacagctcttttttgagtggttggggaacctcggcagtggtagcagttggatacttgtaacagcgatgtaacagagcattcacaaccgccagcagtctttcttccggtaatgtaacaaatctcgagcctatttccgtgagaagaacctcgagttcgctggctaagttgttatgtttacccctaagagcttccatgatatccttggcagcgtcaaatgcacccgcagcagagattgccaaggatgcaccattccgtctcactgtgttttcattgttatcattgatcgcagagctgctttggtgcataggttgatcactaccaggatggagattattttccgtagtggagcgttcactttcttgcccatgtgggttaccactgtcatgtgttccaccagccccacttgtttgagcgccttgatggatttgattttctgatggtaaattgcttccaccatgacctgcaccagtggcattttgctgcattctttgagccaaaactaatctgccaagttcggatttatttactgcatcacgtcgttccagcaagtatgtgcgcaaccagtaatagagagcctgtgggaaaactgcagcaattttcaataaaaccaatttgcaatgaggtgcttctgttctttgcagggaaagtaacagctgtgggatccaagaaagccacacccagtgaggaacttggtctaagtgtttatcaaagaccttgccaacaggctcattcgctgtatcaaaactaagaagataaagaacacgagctatatgacttctagaattagaaacaccaaatcttattccctgaagaaagcaactgacagcatattcaagccaaatttcttcttgtgtttcttggtatgccatgtcacaatagcttccccagcttatccatcctttgggtaaattcttgaacagggtgattgcattggaatatgcgatattagcactttcagtgtcatttaatttcaaatgaaagtcccccttcagacgaaatatctctgccttgatcttatctggaaaatactccaaatttgtgctattgatcagattaagaccactagcacgctctcccttcatttccagataagcttttgcttgctctctaattttaacaaaagcttcctgtacttccattgttgagtgtccatacattttttcaagaatctgaacacaaacatcataaagcccttgtttcctagctatcctggcaagcttattgacgttccatgctttgtcacggaaaccaaggtgatgaagtggagaatttgaagtagcaaagtccttaaatgcatcaataacaacattatacatttcattcctccactgtagcatatcgtaccagactgtcatattgtcccattcatttggagtcctcagcctccaagtctcaagaatatccttcagatctgcataacgattaccaagtccaccaaccgcagtatttcctgaaactttgttcccattggcgatgtcaacatgaattctagcagactcctgaacctcaactagttgttggaattgctgcagtagaggcactctagcatgaacagacatttcaggcaactgccaccactgttccaaggcaagatcaacgcctttccccactgtgttttcagcatctccaacaccatttgaatttctgtcatgaagggcaaaataagattgaaccaaacgaagctttggagtctcctccacttgtgcctttggtatcacgtgatctttcaaatatgcccaatcgggtaatttccaaagactatcaagcagtatttcataattctcaatgcttttgccaaaatctaccagggcatcccattgactaagctgactggcacagtgaagccactgctcctcccacagacacatttcagctttagggactgtgttgttatacgtgccttgggttgccttaaccattgcctggtaaaagaggctctgagcacgctgccaaaaaccatgctgaactaatgaaagtccagctcttgtttcagcggtgatggacctcttcttccacaacccaaatctcatatcttcttcatttaacaaacgataaagctcagcaagagactcagcacattttgagtcattcatgaacaacatcacatggctctctagcaatgccaatgcgagatgccatgcattgtacgtttttccaatatatttgataagctcactaggcatcctaggttgagggtggctcaattgaagtccttccagaagtgcttggacaacatttggccggtgtccttgctgcttcttatggtagtccttcgatagtagagaaatcataggtttagccaatgctacttgttcttccttgagcagggttacccatacaattggaaataccaaaacccacagatgatatgcaacattggcatccgtgtgagccagctcccttaaaggaatgaccacatcagccacctgaagtttgctggtcgcgctcagaaattgtgcatgcttcataacaatgctgtcaaacattgaagtaacttcttcgggaccctctaagttagcaggagcttggtgttgtattccaggattatctgaaggcaaaagtggtagtacccttgcagaatttggcgccaggctaattggcttgtcctcgactaagatagctagaaggagatcaagaccttgtttaagccaaaaaacatcacttaaagcttcccaatcctgaatttgaataatatactgcaaccgcgcgaacaaagtttttccaagagactcgtgatataacaagaagaacttccttctcatcccaggatgacttgcccgtaaaccaagcataaaatgtctttcaactttcagagagacttcttgccgtaggcctagaggatactttgttgaatcagcacatagtccatataacagctgaagatacttctgatcccactcttccaaagcctcagatgagaagtgttgcttatcaatataagaaagcttattgagaaaagtaagtacgtccttttgggtaaggaaagaaccagacaaaccagatgcgcctgttttgctgaaatcatcctcaacccacctttttatcatgtctagtatgcagagaagcacactagcatcagtacccttttcggaaagcaaggtgttcaaaatttgagtaacagatcttttgcaatctgctataagcatgaccgtttcatcaataagttccaagaccgactttatattacatatgactgctccaacatcagcagtttgacgagaagaagttactgcagaatctgaatctgttcgctggccttgtctaggatgagaacccactgctgatcccaggtctcgtgcaaggcgctgaaggatacgcaccaacacatatgaatcgacaaagtttttatgtacattggccaaggttttgatgacaagaagtacaaagctaatcgaaccaaaagagttatcatctcctgaagtttgtggagcagtaacagtattcacatgtttgtttatcagctcattgactttctggtacaatagctttatgtcaggaggtgtattagccgcatccaatgggaatgcggtgaacaccatcttcagcaaggagcacaacgatttaccagcatcgagcatcttgtgtttgaaacacggttcaagaatctgcgagatctggttgatgttgtttctaatgaaaagatgtggctgcttctctagaactttgttcatgacatccaatccctgagcaagtgctgttgatggatccgactgagacggtggcatgctgctcagcagtttctctaaatagttgaacttgacattagcacttggccaaacctccaaagcttgtgaaagcaaatctaatgcttgtttgtacatagtgttggtttccctgtccttaggctcaattaccaacgctactcttatgagaaaattaatgatcatttcttccatggcagcatttggcttgaattcctcgtcaggctgggtagcagatccaggagtttctacattggggattgatgatgcaccgccaggcgacattacacagattgattggagaccaggttcgattttgactcgtttacttggatcttctgatgtggcagacccatcagttgaacgcttaggatcagcaccagatgaagtatgcatttcatcagtaatctgactggttccatcagtatcagtgaccattttcatttcattctgtctttgcctttcccagctgacaaccaatccagcaagttcaattgcgagcctcctattctctgcagtagtattatatggcaaacctagacgacttaacgaattcaccatttgagggacaaattgtgctctacagctgtaaaagagatctgaatgccgaacaacaagtaggaagatgtggatcaaatttggaattgaatgaccttcctccaccaaaattttctttgtgtatcttatccaaattggcatgcgtgaatctccaagaggtagccttttaggcaacgctggcattagaatatccagggcttgcttaactagcatcttattctccggctggcatgtcctaagaagtgcaacaaaaacctgaagaatgattttctcaggagcctggtaagcatccaagaagtggcaaacattaacaaatgcccactgtttactggcactatcttcccgtttgagatgattccatccaaacttaatgagctcttttctatgatgaaccaaatcactctgaagatattttagaagcaaagttgctaattgcaaaagttcaatcctcaaaggttcatcatattcagccgaaacctcttcgggtggatcaagaagcctctcaacaatggttttgactatatcagggtcaataacctcccaagtttggccgttttggaaagcatgggcgagcattggaagaataagcatttgcatcgcttgaactaaatgatcatggccgagttgtttggaatggaaaaggttaagaaaatgcagtaggagtgctcttttcatgttgggcgggtatccttctgcaacctcaataatgtagaattccttcaaaaaggtgtagtcaatgcggctatggaacaagaaaatggagagaatatcaaagagaacattcacttcagatttttcatgccgcaggtaatttaagaagcacttgacaagccatttgctctctttcacctgaactaaattcagttcttgctcattctgcaaacgagatatccttgcaggtgatttccaaatgagaaccaaggtatcgaaaacactgcggttactctgcaaccagctgggtatcagtttcaccattgttttgatgagatagagcccctgaaagtatgcatcggatgctatattagcctttgttgatgccacattagaactctctaatttaacagagatatgattttcatctccagatgatgtagcaggaggagttgaagccgtcgtgctcaatgtaggatcaggttttggcgaaatttcaggaaaggcatatgacagtatcttctgtggagactttgcaagttcttctcttaacggctggccagcatctgatcggattatatacataaaccttcggaaatattttggttcacttaatctagaaaggaaataatcaaccgcgagggccgcatatcgattcaaaaatttggtaagcggtagacggtatgggctattaatctcactgtacacttgcccaggaggaagagctgcttctaaatcaatggttaaggttacaagttcatctagaaattttgatgcagcatgtggaagtaagtggaagagctcgataatagcagccgctatttttggctcttctccagctttccatgctttctgggactgggcaagtttctctggctccaaccattttttaaggtgctccagtaactttcctcctaacgttacattaaaccaatttgacagaagttcgagaaggcgtgccagaccttgcagtaaaggcatactgagattctttgtgtgtgccagattaacaagtattggcctgaggctactctgaagaagttccttgggcatgcgttgttgattgataacctgtcttaaaccctccttagcaactgccacaatttctggtgctctacatgttagagacttgaagaacatggaaattattttggcacgtagttcattgtgagtttgcgttcggaaatcagtccacgccatagtagtgcagagaagctcaatacaagctgttcgaagtctgttcaatgatgtaagcactttaggattcatcaacttcacagcccatacagtttcatcagcctcagcaatttgtaatgcttcttgcagaaaattaaccaactctggagtcacttttagaagggggggcctcagagccaaacagaaattcagagctgcaactgttccaacctgttgatcaactgtctttgatcggagtggacgcattataagtggctgtagtaatagttggtataaaggctcaagcaactcagttacctcacttccagttcggctagccaaaagtgcaaggcagttctgcacatttttcctcacggggatggatgcgttaggattgaataactctgtggcaagatattctacaacatcttgaaagctttttctacgcgcttcactgtttgcttcgtcaacattattaaccacacgtagaatctgcataagtacctgacttgtctcttcttgctctttgctagcataaacaggaagcctctttaaaacataaaccagaccacgaacaatctttacttggaaataacataatgtttcaacattcactttccccaccaatgcacctaaccccataacccctcccatctgcgcttgccatgtgctcccataacagccgtgtaaaagtcgaggcaaaagttgttcaaacactggtattcgcacacttggatggggtgaatatactggatttgtagaaggactcgagacaatcatggaggcattgtgaccacccctagccatcaacacatcagcatgtttgacacgagcgaggaacaaaagtgtttcagcaaacacatttaacgcattcagagcagctttggcgtggagcctgttttcatctgcaagcacatcgaccagtgcatccaaaaatattaaaggatctaactgctttaaattagatgattgattactcttggatctggaacttgttgaaatcacagaaccaccgagtgaactagtactagttgatgcatttgaggaggtatagtcaacatgcaaaataatcgcaaaatgccggcagatgttctcaacaaagtcatcgtccgtgtcactgagatctggatcagaactggcagcaagtatagtgatcaacagtgtcttgaagattgacttctcagccattaactgagtctttgttttcactcctaagtcagccttgatttccactgcttcactcctgtgccaagatgaatccacggaggaacgtaacaaagtagataattgcctgggcgtttgacccacatcagtgacacatccaggcaaattaagctgggacaataagcatacacggagaaattttagagcttgctttctgtagtatatgtccatgccgtgatttctttgaataactgctgctactgcaagattaataaatttgtctaatggcaccagaaaaggtgttgatggctcaaacgtcagaactaagcgaagcccatgctctgggttatctttgcattcaagtgtaagtggctctttcagaaatcttcggttgcgaccacccaactttccaaggatttgtaaggcttttttaccccaaggatatggcacaggcctcaaatgggaccataatgctaagatcacttcagacatcacattcgccatgctaggttccaggaaatcaggattcagactatccacccagaattcaagggtgcgtaaccccaagctcacaagttcatcgcttcccctcaaacagaatacaagaggcttcatgagacggggaagatatggcaataaggagcttaagcgtgcaggaagcgtcaaacaaagctctagcaaaagatctttcatgtcctccccagctggaccctctagcattgtcaaaagaatattaagacaaggtagcagcatggggatcaaatctctcagaagcagctcatatttacatccagcaagacctctgaacacagtgcggagcaattgcatataaccaagaggtttttcaacttccgtagcattcttcatgcagacttccataataacaggcacgtggtgctgtaatattctttcaaaatcagatggtgttttggtgacagccccaaagatgcatctaaacagatgcaaaactagtttagttgcagctgaatctggattcttcagaacatcaagtttgctgctaactagtaaattaatcaaaacatctgcaaatggcttgtaaactttgggagcttgcaggagtgcggcaaatatctgaaccagttggttattgttaatcatgctctcaaaaagctctggcatgcataacgagaacatgtccattagatctcgaggttccataatagcaagaatttgggagaaaagattcagcatttccttttcctcatccttttctttgaagagagctaagcagtggacaccactctttaaaacaccagaagctttccacacctcatcttctctcattcctttaaaaccctgaggtcgaggcaaatgtgcatgggtaatactccatattattgttttcattcccatgaccagtgtcttgatcagattcttacaatcattcacttctttggaatgttcaacaggaacctggacaggaagttcaagcttcgacctcaaagtgacccgatcctttcccacctcaccctcctccaaaagctgaggaatagtacgcttgaaagtactgaatttccccacaaaggcatccaggatacgtcccagtaaaatccgtgcttcatccattgactgctgatcaacacctttctcaaatattggttctaccagattcagcatcagtcgggcacatgttgtatgaatgctaagagagagggtagagtcgtgcatgtttcttgaaaataggtagataatccgtgataactgtgcgagagaaagatctccgcgaacatggtgaacaatctccgcgagtaggctgtaagccaaaggcctcaaagactcaaaacatgctcgcccagttccaactagaaccctctcatctaaaagagtgtcaatcagaggaaataagcctctcttgaaatccgtcccaagcacatgctttaatgagactaagagttccttaacctgtgcaccttttaactctatgaactgaggcttcaaatgtgaagggacattctcaggtccagggacagatatagcagcaaccatcagtggaagtaaatgaggaatgttggtctgaacgagtcggctatacagctggaaaaggaacataacaacaagggggctctctgtgattatcttgaatgaccgagtactcggattaagctgcacattcccgataggtggggtaggggtaagggactgatcagaagacgtaggcatctccataggcttcacttcttccattttaacattatcgaaaaaatggctgacagtgaatctgaaaatcgaatagattttgcagacaaagtctaaaaacggttgaacctcgttttctagcgtgggcctaaaattcctaagaaggtcaaagattatccgaatgcaaatcaaaccgttttcttcattatctgcggtgagcacctgcattgcaaccttcaagaggtcctgaacaaagggacgaagaacctcactgtgtggaagacgattgaggatctcaaccacaatgttccgcagtttgtgctccggattatcgataaattgcggtttagtaatctgtagaagaataactgagaatgctgggaagtagcattttaagaaattcaagtactctgccgtatgtgctatctctagactgtccctgacctccaccaccatctcaagccttgttggaataggtaggtcaagatccacgagacgacgggagtgttgctcgaaattctgaattggactcat

SEQ ID NO: 233 - DNA, 1947 bp, Arabidopsis thaliana
  Clone ID: ARATH-23APR03-CLUSTER13928_1
gctaggttgtccctttctcggaattgctcttcttcatcgtttctttaactatttacttctctatttttcatcattccgttggatcggattctaaacagtttgacaaacctggatctgtaattctaactcagattcttctgttgtagcaggtggtaacaatcttgattctcgctttgtgtcttgttacttttgtcgagaaaagttcttaagtttacagcttttttctcttcttacttctccgattgctttatgaaaattagatatctcagtggtaacaatcttgatactggcattaaccagtgttattcccatttacgcaaacgttcacggcgccgggaaaatatgcgacgaacttggccggcgatcattgagtacaagaccacacagtgtctccattacagattttggagctgttggagatggcaaaacgctcaacactcttgcgtttcaaaacgccgttttctatcttatgtctttcgccgacaaaggtggggcccagctctatgttccgccgggacattggctcaccgggagttttagcctcaccagccacctcactctctttctcgaaaacggcgccgttatagtcgcttctcaggatccatcgcattgggaagtggttgatcctttaccttcatacggaaggggaattgatttgcctgggaagcgatacaagagtttgatcaacggtaacaagctacatgatgttgttgtaacaggtgataatggaactatagatggtcaaggcttggtttggtgggatcggtttacttctcattccttaaagtataaccgtcctcacctcatcgagtttctttcttctgaaaatgtaattgtctccaatcttacgttcttgaatgctcctgcttattcaatctattcaatctactctagccatgtatatattcataagatattggcccattcttctcctaaatctccttatacaatcggtattgtaccagattcttctgattacgtctgcatccaaaactctaccattaacgtggggtatgacgcgatttccctcaaaagcggttgggatgaatatggaattgcctattctcgtcccactgaaaatgttcatataagaaatgtgtaccttcgaggagcttctggttcctctatctcctttggcagtgaaatgtctggtggaatatctgatgtcgtggttgataacgctcatatacactactcgttaaccggcattgcctttagaaccacaaaaggcagaggtggttatatcaaagagatcgatatttcaaacatcgatatgttgagaataggtactgccattgttgctaatggtagctttggatctcaccctgatgataaatatgatgtgaatgctctcccacttgtgagtcacatcagattaagcaacatttctggagagaacattggcattgcggggaaattgtttgggatcaaagaatctccatttagctcagtgactttgtcgaatgtttctttgtcgatgagctcaggttcttctgtttcttggcaatgctcctacgtttacgggtcctcggagtcagtcattcctgaaccgtgtcccgagctgaagagagatgctgatgcttacggtagagctgcagtctagtgaaacagactgcaaaagaaaaaagaaaaaaaaagcaagaaacatatcttgggattctttgataggattcaattcatcaatcatttcatattttgtggagttagagaaggtcagattctttcctcaagtaaaccacattgtctttagatcatacatgttcctttcggttattctggtttcctatttttatgttgtttgcatattctgagataagaaatctgtacaggttcatttcttcattcatgtgtaaacaaagaaattttgtttcagcagttttccacaagccattaataataaaaaggagagatagtttcataaaaaaaaaaaaaaaaaagggcggccgc

SEQ ID NO: 234 - DNA, 1525 bp, Arabidopsis thaliana
  Clone ID: ARATH-23APR03-CLUSTER13966_1
taacatagatatctgaaatttccctcgatttgattagtgggatcaccaataccaagataaaatctgaagtttagttcattgactcaatagtatttgagtcttggggctcgaaatgattttgattttgatttcttaccgatcttcgagtttccaaagctaagcacttttatcaaatttagggtctttttacttttccaaattatatttttctgtttttggggacgaatttggctttctttctatataacccgcgagcgagacagagaccttgaccctcacctaaacctcaaaaaccaaattttgaccccaaaagccatctcttttagcaatcagattactttgaaactttctctgggtatctgagatttcttcattatttatataaatcatctaatcgaaatctactgcgacgatcggcgaagaatcggaaacacaaaaatggggtgttgcgcgagcaatacagctggtggttcaaaggctaatcggatctcacgctggcgatctacaggcattgttggtctccgcgactccaaattgaagacatttcctgatgaagtgattgaaatggagagagcagtgcgaacacttgatctaacacacaataagattgctgatgttcctggagaaatcagcaagttaatcaatatgcagcgtctgttaatagctgataatctagttgagcgccttccggggaatctagggaagcttcaatctctcaaagttttgatgcttgatggaaaccgcatcagctgtttgcctgatgaattgggccagttggtaaggcttgagcaactatcaatctcaagaaatatgctcatatacttgcccgatactattggtagtctccgcaatctactgctgttgaatgtctcaaataacagattgaaatcccttcctgaatcagtagggagctgtgcttctttagaagaagtacaggctaatgataacgttgttgaagagcttcctgcatcactctgcaatctgattcagttaaagtcgctttccttagacaataatcaagtgaaccagattccagatggattgctgatacattgcaagagtctgcaaaacctttctttgcataacaatcctatttccatggatcagtttcagctgatggaaggataccaagactttgaagagaggagaaagaagaaatttgataagcaaatcgattcgaatgtgatgatgggctctaaagcacttgatgtaggcgttgataaatgaaaactgtcttcacatctccttactttgtcggttcggtgaatgaggatcatcgtttcgtgtaagaaatattgttgtaaaactctctctctctctttctctcgtctgcaagatttagaatctctgttactgtcacaccaattcttatgaacacatacatatgtacgtttgtatactctatcaaggcgtgtctgtatatgtatatgtgcgtgtgtgtatacaaatcatataggcagaccgattcttggctttggcccttatattgagatgacgattctacttccaaaaaaaaaaaaaaaaa

SEQ ID NO: 235 - DNA, 1154 bp, Arabidopsis thaliana
  Clone ID: ARATH-23APR03-CLUSTER1397_1
agtaaacaatcagacccaaaaaatagaaaattccaattaaagttctccaattggagttgattctgcccttattagagagatctgatctttccccaattccataacccgaaaaatggaagaaatcgccgataaaaccttcttccgatactgtctcctcactcttattttcgccggcccaccaaccgccgtccttctgaaattcctccaagctccttacggtaaacacaaccgtaccggatggggtcccaccgtatctccaccgattgcttggttcgtcatggagagcccaaccttgtggctcactctcctcctcttcccctttggtcgtcacgctctcaaccctaaatctctacttctattctctccttatctcattcattacttccaccgcaccatcatttaccctcttcgcctcttccgcagctccttccccgccggtaaaaacggatttccgatcaccatcgccgccttggctttcacctttaatctcctcaatggttatatccaggcgaggtgggtttcgcattacaaggatgactacgaagacggaaactggttctggtggcggtttgttatcggtatggtggttttcataaccggcatgtatataaatatcacgtcggaccggactttggtacgattgaagaaagagaaccggggaggttatgtgataccgagaggaggctggttcgagttggtaagctgtccgaattattttggagaggcgattgagtggttgggctgggctgttatgacttggtcttgggccggtattggattttttctgtacacgtgttccaatttgtttccgcgtgcacgtgcgagtcacaagtggtacattgccaagttcaaggaagagtatcccaagactcgtaaagctgttattccttttgtgtactgagaattgagaaagttgaaaactagtttatcaaatgttatgtgtcaatttgtttccaaaaaacctttgtcaaaatttccagtaaccggtttaattccaacacggtttagatcttatgttggtatcttcaacaatgcacaacaaactgtgtattctttagacaaattttattaatccccacggttttgccccaataaaaaaaaaaaaaaacacaaatacaaaaaaaaaataataaaagaaaaaatgggtcgaccag

SEQ ID NO: 236 - DNA, 700 bp, Arabidopsis thaliana
  Clone ID: ARATH-23APR03-CLUSTER13993_1
acaaacaacgaacatggctaaacgttttctgcttcttcttcctcttttgtcatctattcttcttcttgccgtgtccgttacagcttactccacaacaacgccgtatcaaggctacaagccggagaaattcacccacctccacttctacttccatgacgtcatcaccggtgacaaacctaccgccatcaaagtcgccgaagcccgccgaacaacctccctcaacgtcaattttggcgtgattatgatcgcagatgatcctttgaccgaaggaccagacccgagctcaaagtaagtgggaagagctcaggggatgtacgcatcaacagccatgaaggacatagtcttcacaatggtctttaactatgttttcacggcaggagagtttaatggaagcaccatcgcggtgtatggacggaatgatatattttcgaaggtgagagagttgccgattattgtaggaactggtgctttcaggtttgctagaggctatgcactgcccaagacttataagattgttggtctagatgccgtggtcgagtataatgtcttcatttggcattaatcatttgcatattgtctaatgtctttccgaaataaattgtttcactctggtttcctcatattgtttttggttcttttatatatatatatatataacaattgttctgttaaaaaaaaaaaaaaaattgtttgaactttg

SEQ ID NO: 237 - DNA, 816 bp, Arabidopsis thaliana
  Clone ID: ARATH-23APR03-CLUSTER13998_1
aaagttgactcatcttccataatttgggattcacaaagtcgtctctgtttttcgatcttcctctttctcagaatttagggtttcgaagattgtttcttcttactccaatcctctttctcacctctcgcaatttgagattttcttctgaaaagaatcaactcctgtaacttatatgcatctggctgatcaaataaagtaatggtggacgatacatcaccttttctggaggttttttgtgaagtttctggtaaagactaccgattcacaacagggacaaaggcggagtttgctgtctctgtgatcaacaggaaacttggttcgttgaaacctcgagtgatttacatcgaagcagcaaaggaaggtgaagagcctattagttttggtgataatgctagtcttctgaattatggacttggttggaagttgaagacagttgttgatgctgatctacctggaacggagaaaaacaatcgacaacagcggttttcttctgtattttcgacgggttttgcaaatgattcaacaccagaaatcggagagcaaagtctgaaatacattgggaggatattttttgcatttgttttgatgtttattcttggtggcctcttcacagtggctcttgagaaccttcctagattaatattgctctttaacaactctttcgtgtaaacaatatgacattgttcaaacacagacatttggagatgtaactccaaaaaccttttttttttgttttcctctatctatcactcattgatttggggatgtaacagctctggaatcttttctctctgaatttggctttcaaccctggtt

SEQ ID NO: 238 - DNA, 1449 bp, Arabidopsis thaliana
  unsure (1)..(1449): unsure at all n locations
  Clone ID: ARATH-23APR03-CLUSTER13999_1
tactctgttttccttaaacggtgtcgttttcgtcaattattaaaaaaaactggatgactggaatatccatttgcttttgagcgagtgatagaagcggaggcgattttctagggtttttgctcggaatcgatttcacgatgggaacgagcagcgatccgattcaagatggttccgatgagcagcagaagcgatcagaaatctatacatacgaagcgccatggcacatctacgcaatgaattggagcgttcgtcgcgataagaagtatcgtctcgccatcactagcctcctcgagcaatacccgaaccgtgtcgagattgtgcagctcgatgaatccaatggtgagatccgttccgatcctaacctctcctttgagcatccttatccaccaacgaagaccattttcatacctgacaaggaatgccaaagacctgatcttctcgctacttcaagtgatttccttcgtttatggagaatcgctgatgatcattcccgtgttgagctcaaatcttgtctcaatagcaataagaacagtgagttttgtggtcctcttacttcttttgattggaatgaagctgagccacgtcgaattggaacatctagtactgatacgacttgtactatctgggacattgagcgtgaagctgttgatactcagcttattgctcatgataaggaagtttttgatattgcttggggtggtgttggtgtttttgcatctgtttcagctgatggctccgttagggtgtttgatcttcgtgataaggaacattcgacgattatctatgagagctccgagcctgatactcctttagtgcgtcttggttggaacaaacaggatcctaggtacatggctactattatcatggacagtgctaaagttgtggtgcttgacattcgttttccggctcttcctgtggttgagcttcaacgacatcaagctagtgtcaatgccattgcttgggctcctcatagctcttgtcacatttgtactgctggagatgattctcaagctttgatttgggatatttcatccatgggacagcatgttgaaggtggtcttgaccctattctagcttacactgctggtgctgagattgagcagcttcagtggtcctcttctcagcctgattgggtcgcaattgctttctctactaagctgcaaattctcagggtttgatcttttcaaagaatttctcatctcttgtcagattagattttactcattttctatcgtattaggggtctcgttacccttgttactatcctcaagatgtaaagactgttctcaatcgaattaatgaatctgtttgatcttgttgctataaaaaaaaaaaaaaaaaaaaaaaaaactcttattgatgtatgattgataagaaaggataatcctttgttctaaaaaaaaaaaannaaaannaaaaaaaaaaaaaaaangaaaaaaaaaaaaaaaa

SEQ ID NO: 239 - DNA, 1637 bp, Arabidopsis thaliana
  Clone ID: ARATH-23APR03-CLUSTER14017_1
gagtgagagaagaagattagaaccgagagtgagagaagaagattagaaaacgacgatatatacggagaatctcaggatttcgatcctgtttttgttttttctacttttggtactctccatggcgacggagcgtcatcattttgagcttgctaaaggcatcaatggccttgataagatcgttctcggcgagtctcgcggccgctctgcagaggcatacatgtatggaagtcatgtaacttcttggaagagagtgagagaagaagattagaaacgacgatatatacggagaatctcaggatttcgatcctgtttttgttttttctacttttggtactctccatggcgacggagcgtcatcattttgagcttgctaaaggcatcaatggccttgataagatcgttctccgcgagtctcgcggccgctctgcagaggtatacttgtatggaagtcatgtaacttcttggaagaatgagaacggagaggagttacttcacctcagtagcaaggccatattcaagcccccgaaaccaatacgtggagggattcccctatgttttccacaattcagtaactttggtacactcgaatcacatggctttgctagaaataggatctgggaagtcgaggctaacccacctccgttgccattaaattcttgttctagtgcttttgttgacctgatcctaaggccaactgaagacgatctgaaaatctggcctaacaattttgagttcaggctgaggatagccttggggaccgaaggagaattaactctgacatctcgtatcaggaacaccaactctgatggaaagccgtttacattcacatttgcttatcacacctatttctctgtctcagacatcagtgaagtacgggttgaaggattggaaacgttggattatcttgacaacttgaaggacagagaacgttttaccgaacaaggcgatgcgataacttttgaatccgaagttgacaagatttatctaagcacgccaacaaagattgctattttggatcacgagaaaaagaggactttcgttattcgcaaggacgggcttgctgatgctgtggtgtggaatccttgggataagaaatcaaagacgatctctgacttgggagatgaagactataagcatatgctttgtgtggaagctgcggctatcgagagaccgatcacattgaaacccggtgaagaatggaaaggaagactcgaactctctgcagttccttctagttactccagtggacagcttgaccccaagaaagtccttgagtgactctttcaaactccaaaaacagcatctttctcccctctttaattgcagtactataaagaaacgagtgaaggagagcttaaagatcatcggatatactatttaaagaaactgagatattgaataaaaattgttgcttcttagttctcttttgtaaccacagacaataacgatttgcgaactgcgaaccaagcatgcctggtctagcatttgtctggtcagagtccaaaaggaattacaacttataaaatttgtaggttaaacttaaagaaaaaaaaaaaagaaactaaagggggggcccggtccctctccgtcctctagggggtcttctacgcgcgcttaatggccgtcttttccaccgt

SEQ ID NO: 240 - DNA, 1209 bp, Arabidopsis thaliana
  Clone ID: ARATH-23APR03-CLUSTER14033_1
gactggccagtggcggcgcctgtggtttcattatcttttgcttcatcttcttcaaaagccatggctttgtgctctatctgtcctcgcatccctcttcgattcaggccaaaacccatttccccttttctctcaaaacctcaaatttgtctcgcttacagggtttactcttccctgcaatctactactccctctaccagagatgaacttggaactgttagcattgggtttctgggtatgggaatcatgggttctccaatggcacagaacctcatcaaagctgggtgtgatgtgactgtatggaatcgaactaagagcaaatgtgatcctctcgttggattaggagcaaagtacaagtcttctcctgaagaagtgactgcaacttgtgatctcacatttgcaatgcttgctgatcctgaaagtgcaattgatgttgcatgtggaaagaatggagccatatttgggattagttcaggaaaagggtatgttgatgtctcaaccgttgatgtggcctcatcaatactaatcagcaagcaaataaaggataccggagccttgttcttggaggcaccagtttcaggttccaaaaagcctgccgaagatgggcagttaatattcctcactgcaggtgacaagccgctatacgaaaaagctgctcctttcttagacatcatgggaaagtcaaaattctatttgggtgaagttggtaatggagcagcaatgaaacttgtcgtcaacatgatcatgggaagtatgatggcatcattcgcggagggaatacttctaagccagaaagttggactcgatccaaatgtacttgtcgaggttgtctcacagggagctatcaatgcgccaatgtactcactaaagggtccttcaatgatcaagtcagtgtacccgacggcttttccattaaagcatcagcagaaggatatgagactcgcacttggactagcggaatccgtatcgcaatctactccgattgcagccgctgcgaacgagctttacaaggttgcaaaatcttatgggttgagcgatgaagatttctctgcagtaattgaagcactaaaagctgcaaaatcccgagaagcttagctaaagatttgttcaatgtgaaaatgtgtttttttttgctgttgtatgaaaaatttcatctttacaacatgtcaattgataattgttaattttatatgagagcaagttaaaagtgcc

SEQ ID NO: 241 - DNA, 1840 bp, Arabidopsis thaliana
  Clone ID: ARATH-23APR03-CLUSTER14037_1
atttttcaaaatctcactctctctctttcctctctgctttcatttgctttctataaatccaaattcttaaacaaaagatttggtctttccatcaacatcaactctctcataaactcccacaaagactctcactttaaaactccttcactactgtgttcttcgtctctttttctttcacttttccataagcaaagaaacaaaaaggatgagttcaagagtgttcagagcaacaccagataacaactatttggtccccaggagatccaaagaccaacaagacaccagtcccgaccgtaaccgaatctggtctgagcctcgtcttaaacccgtcgttaaccggaaagtcccagtcgtctattatctctgccggaatggtcagcttgaccatcctcatttcatcgaagtcactctctcttcccacgatggtctttatctcaaagatgtgataaaccgcttgaatgatctaagagggaaaggcatggcaagtctctactcttggtcttcgaaacggagctacaaaaatggatttgtctggcacgatttatcggaggacgatttcatcttccctgttcaaggtcaagaatatgttctcaaaggctctgaggttcttgattcttgtcttatctcaaacccaagaagcctcctcgaaacgtcgtcgtttagagacccaagatctttaaatccagataaaaactccggcgatgatatcccggcggtgataaatcgacggaggaaccagtcttggagctctatcgatctcagcgagtacaaagtgtacaaagcaaccgagtcaagcgccgagtcaactcaaagactcgctgcggacgcttctactcagactgacgatagacgacggaggagaagaccggcgaaagaggaaatagaagaggtgaaaagtccggcgagttatgagaatcagagtacagagctgagcagagacgagatatctcctccaccgtcggattcaagtcccgagacattagagaatctgatcaaagccgatggacggctgatattgcgtcctagcgaaagcagcaccgatcatcggacggtcgagagtttatccagcggaagaatgagagcttcggctgtgttaatgcagctgatatcgtgtggtacgatgtcgtttaaagaatgtgggcctgttttgttgaaagatcaagggctggcgttgaacgggcgtagcgggtgtacgataacgcgaggagcagaggataatggtgaggagagggtagataaggaattaaagagttttggaagggtacaattggaagataaggagtattttagcggcagtttgattgagaccaagaaggagcttgttcctgctttgaaaagatcttcttcttacaatgctgacaggtgttcaagaatgggaccaacgacggagaaggatgaggaagaagcggttcgagctaagtgcattccgagaaaaccaaagccggtggctaaaaggaacaatggtgggcagcagtaacaaaaacggcacgatgagtctaacaagcttattttgggtttaagtagaagagaaaagtagaatagggaatgatgagtttgtaaagcattgtgaattgtgtaggtaaactataacaattcctttgcatgctaaaaaaattaagagttaacatgatgggtgaatatataatatataatgttgtagtctgagcctaggtgtcttttgaggttaatttcaatctggttttcttttataaccccaatattactttatcgtagtgattgggaacctaaattacaaatttcagttagttttgaccatttttcatacatttgcggtttcattgatagctcctttcagtttagagtaaaatatcaaatgatc

SEQ ID NO: 242 - DNA, 1925 bp, Arabidopsis thaliana
  Clone ID: ARATH-23APR03-CLUSTER14066_1
gattgaatgtttatttggcagtgaatggaagagatagagaggagcatgggtcccggtgaagaagaaacgtagagagagttattatgtttgattctgaagcgtgacgtcactcagaaaccgtgaatcaaggatctttcttccactcctttctctgattttgactttctctcctctctctatatataagctcaacatcaatatgtctacggcttcttcttggattcaacaacctccttttagatacttaccggatcgtggcggtttctctaagccaagctctcgcagcgcgcggcagttttcctccggcgttgtttcagcttccgcttcttctccttcgccttcatcctcgtgctcctgtggttattcggagattttgaatttcgatttcgggtcaaacagaagctggaaccaacagggacgcagggttcaggcaatgagttccacagcccaacggaaattttcgctagcgaaaggcgactccgatgacaaaaatgaacctgatcatcttcttgttcttgcacatggtattttggccagtcccagcgactggctctacgtagaagctgagctgaaaagacgccttggaagaagattcttgatttatgcaagttcttccaataccttcactaaaacatttggcgggatcgatggagctggaaaacgactagcagaagaggttagacaagttgtccaaaagagcaagagcttaaagaagatttcgtttttagcccactccctcggtggcttattttccagacatgctgttgctgttctttactcagcagcaatggcacaagtaagtgatgttgctgtctctcaatctggcaattcaaatcttctgcgaggtaggattgcggggctagaaccgattaatttcatcactttggcaacacctcatctaggagtgagaggcagaaagcagctgccttttctgttgggagttcctattcttgagaaacttgctgcaccaatagctccattctttgttggtcggactggtagtcagttgttcctcactgatggtaaagctgataaaccacctcttcttttgaggatggcatctgatggtgaagatctgaaattcttatcggcgctgggggcatttcgaagtcgcattatatatgcaaacgtatcttatgaccacatggttggttggcgtacatcttccattaggagagaaactgaacttatcaagccttcacgccggtctctggatggatacaagcatgttgttgatgttgaatactgtccacctgtttcatcagatggtgcccatttccctccagaagctgctaaagccaaggaggccgcacaaagctctcctagccctcagaacacacttgagtatcatgaaattgtggaagaggaaatgatccgcggtctgcagaggttggggtggaagaaagttgatgtcagcttccactccaccttctggccttacttagctcataacaacattcacgtgaaaagtgaaagactttacaaagcaggagctggagttattgcacacgttgcagatagtataaaacagcaagagtcttccacgtttattaccgccagcttataaatcgtgagcatttcgagtgtttgacccgttaatgctgagtgtgctacgacatttgaaccattcctgtgttttgcttttaccatacagtttgggagatcggtgcagatcaagaatgttcgcatctttgcttcttctattttttttcttggcgaaatcagaagaagtacaatccaattcatctgtacatgattttcttgtattagcttgttgatgatacaacacttgaaagatgttattatagattaaggtttcttaaagagaaaagttatatatacaacacttgaaagatgttattatagattaaggttttttaaagagaaaagttatattaaaaaaaaaagaaaaaaaaaaaaaaaaa

SEQ ID NO: 243 - DNA, 1790 bp, Arabidopsis thaliana
  unsure (1)..(1790): unsure at all n locations
  Clone ID: ARATH-23APR03-CLUSTER14112_1
gagagagagagagagatagatattactaccccccccnnncganctctgcctctcatgacnaatattcaactgattccttcttcatnttaaaattctctctaattcgaatctctcaaagttcaaatttcaaattccgaagaagaagaagaagaaacactcgaaggtttttgtgatggatccatgtccatttgtacggctaacaatagattcactagctttgagactaccggagacagcgacgaacaagcaaatcggcggcgaagtacatccttcttctacgccgtgttactgcaaactccggatcaaacatttcccttcacagaaagcacttctccctctctcttccttctccgacgcttcatctccaccggaatcttccacttcagctccgggatttcacctcgacgccgacgcgatccgacgaatttccggtaagaagatctcactccgtgtctctgtttacgccggtcgtactggtcacacttgcggcgtcgcttcagggaaacttctaggtaaagtcgaagtagcggtggatctcgcggcggcgttgtctagaaccgtcgcgtttcataacggatggaagaaactcggtggagatggagataaaccgtcggctagattacatctattggtttgtgctgaaccggatcctcggtttgtgtttcaatttggaggtgaaccggaatgtagtcctgtggtttaccagattcaagataatctcaaacaacctgtcttcagctgcaaattcagctccgatcgtaacggaagatctcggtctctaccatcaggatttacatatagtagtagaggatggattacaagaacattatcaggtgaccagtgggaaaagaaacaagcgagagaacgtaaaggttggatgataacgatccatgatctttcgggatcacctgtagcagcagcttcaatgatcactcctttcgtggcatctccagggtctgatcgtgtttctagatcaaaccctggtgcgtggctaatccttaggcctcatgggacttgtgtcagtagttggaaaccgtggggacgtcttgaggcttggcgtgagagaggagctattgatggattgggttacaagttcgagctcgtgagggataacagtactagcaccggcattcctattgcagaagggacaatgagcacaaaacaaggaggaaagttcagcattgacaggagagtctcaggccagggagagtctccggcaatatcatcgccggtgaaagggttcgtgatgggttcgagcgtcgaaggagaagggaaagtgagcaagcctgtggtccacgtgggagcacagcatgtgacttgcatggccgacgcagctctcttcgttgctctctctgccgccgttgatctaagtgtcgacgcgtgtcagctcttctctcgtaagcttcgtaaagagctctgtcacgacgaccaaagctccctcacgtgaaaatatgttatctcatcagtgaagatacatacgtacattttgacttgacaaaagaccaatccatgaacttatgacaaagctctcttcgtcgctagctatctcggtttttcattttttttgagggatcaatttgatatgaaagtcgacaaagctgtacagacaacaatgatctttgtgttgtttgcaactttgtatcatatttatttattttttaattctttttcttctgattctctccatatgtgtgttgattatttttattatttcatatcttcattctttttaatacattggggttattcttataccaaatatactcactttctttgtgaaaaaaaaaaaa

SEQ ID NO: 244 - DNA, 1847 bp, Arabidopsis thaliana
  unsure (1)..(1847): unsure at all n locations
  Clone ID: ARATH-23APR03-CLUSTER1411_1
aattttaagtctttgtccgtttactctcctttgtgtttaagaaacctccttttatagagatatttctcaccattttttatctatatgnagggtatgatataacatctagaggatacaagaggtggtcaggtgcaaaagattgagtttttttttataggagagtgtttacgactgaagctatgacggaaacgggtttgattctcatgtggttccctttgataatattgggattgtttgttttgaaatgggtgctgaagagagtgaatgtttggatttatgtgtccaaacttggtgagaaaaaacactatctgccaccaggtgatttgggatggccagtcataggcaacatgtggtcctttcttagagctttcaaaacatctgatcctgaatccttcatccaatcctacatcaccaggtatgggcgtaccgggatttataaagcacacatgtttgggtacccatgtgtactagtaacaacaccagagacttgtaggcgagttctaacagatgatgatgccttccacataggttggccaaaatctaccatgaaactcattggcaggaagtcctttgttggtatctcctttgaagaacacaagaggctcaggcgtttgacttctgctcctgtcaatggccctgaagctctctctgtatacatacagttcattgaagaaactgttaatactgatctagaaaaatggtccaaaatgggagaaatcgagttcttatctcatttgcgtaagcttacgtttaaggtcattatgtacatatttctcagcagtgagagtgagcatgtcatggattcattggaacgggagtataccaaccttaactatggagttcgagcaatgggtattaatcttcctgggtttgcttatcatagagctttgaaggcaaggaaaaaacttgtagctgcctttcagtccatagtgactaaccgaagaaatcaaaggaagcagaatatttcatccaatagaaaagatatgctggataatctaatagatgttaaagatgaaaacggaagagtcttagatgatgagaaaattattgaccttttgttgatgtatcttaatgcgggtcatgaatcttctggacacctcactatgtgggctaccattttgatgcaagaacaccctatgattctgcaaaaggctaaggaagaacaagagaggatcgtaaaaaagagagcaccgggacagaagttgacgcttaaagagacacgtgaaatggtgtatctttctcaggttattgatgagacccttcgagtaattacattctctctgacggccttcagggaagcaaagagtgatgtccaaatggatggctatataattccaaaaggctggaaggttctgacttggtttaggaacgtccatttggaccctgaaatctacccggatccaaagaaatttgatccttcaagatgggagggatacacaccaaaagcaggcacattccttccttttggtttgggaagccacctatgcccgggaaacgatcttgccaagctcgagatttccatttttcttcatcatttcctcctcaaataccgggtggaaaggagcaatcccggatgtccggtgatgttcttgcctcacaatcgacccaaagataattgcctagcaagaatcaccagaacgatgccataatcatcatcttcaaactagtagaccccttagcaaatatataagcttcgtctcaggtttccattgtcttcatcttctcttagaacttgatccaaaccggttcggtttgtgaatttggtttactaggatgtatcaatagtttgaaggatttgtcaaagtaatgttgaaatttttctctggtttagcttcaaatttggttat

SEQ ID NO: 245 - DNA, 1590 bp, Arabidopsis thaliana
  Clone ID: ARATH-23APR03-CLUSTER14136_1
tggcatcgcctgtttttataatttctcgtcttgtacaaaataaaagactctctctctcttaaaatttctctttcgattctctcgcatttcaaaatttcatttccttatatagactcttaaggccggcgatttctgtgagtccatagattttcgctactccgccgtcagtttttctcaactccggaggctgtgtttttgccaccgctttgattcgccggtaagttcacgtatggccagtaatactttgaaagagatgaatagtcttcatgtaactgagaagataagtgactgtaaagctagcttgaccaagccatgtgttggtaaaatgaatggaaaatctgaagatagaccattaccaaactctgcctccttggattccagtgattctaaagttgtagaagcagagaaacccgagccagagatagctattgtggaagttgaatatattgaatctgaaaacttggataatgtagacgatgctgatgcagttctgaagtctgttttagctggactagagtccaaggactggatttcactctgtgatgctcttaataacgttcgccgactttcgatattccacaaggaagaaatgatgcatatgcttgaaaaagtgataccacttgtcgtgaaatcactgaaaaatccaagaagtgcggtgtgtaaaacggcatgcatgacatctgcagatatcttcagtgcatataataatcatataacagatctgttggagcctctgcttactcaactactcctcaagtcttcccaagacaaacggtttgtttgcgaggcagcagagaaagctttaacagcaatgaccaaatatgtttccccaaccttgctgttaccaaagctgcaaccttgtctcaaaaacaggaatcctcggatccgtgccaaagcatcattatgcttttctcgaagtgttcctcgactgggcgttgaagggattaaagaatatggaatcgacaaattagttcaagcagccgcatctcagcttagcgatcagctccctgaatcccgtgaggctgcacggactgtcctactagaacttcagagcgtatatgaaaaagctcatcctctcatcaaccctgagacatcatcaccagaagaacagcaaatcccggaggtagagccaattacttgggaaactttctgcaagtcaaaactgtcggctcttagcgcacaagccgtgcttcgtgtcaccaatgttgtcactgttactgctcgggagggtttggttactacaggttcatcatcttcatcccagttataaacattttctactacaaattttttaaaaaccgtttgctacgagtcatacggtttacatggtattctccggcatggcggcatgatctaccaaattggcaaattatggaccgataaaaagagtgaacgttcgtgtatgaaaaatcttggcttctttctgggttattttctttttgtggattctcatctgtcttcactaccagtacttgtttctttttcttatgtgtatatattctataccaagatttggtaagatagtcatgagtcttttggttatatgcaaaattggtcggattctttgaaaaagaaaaaaaaaaaaaaaaa

SEQ ID NO: 246 - DNA, 2799 bp, Arabidopsis thaliana
  Clone ID: ARATH-23APR03-CLUSTER14146_1
gaaaaactactagtctctatctctctcagctccagattttgtttcttcttcttctgtgttaaattcatttgatttgttgtatctgaaggcgaaattactggtttctgatttttggtggtattcagggcggttttaaagcgacggaagaagatggtgggaggaggaggaggtagtagtggtcgtggtggtggtagtggtagtggtagtagtaagcagcagagaggtttctctatgaatcctaaagactataagctaatggaagaaataggccatggagctagcgctgttgtctatcgagcgatctatctccctactaatgaagtcgtcgccatcaagtgtttggatctcgatcgctgcaatagcaatctggatgatattaggagggaatctcagactatgagtttgatagaccatcccaacgttataaagtcgttttgttcattctctgtcgaccatagtctttgggttgttatgccattcatggctcaaggttcgtgtttgcatcttatgaagactgcgtattcagacggatttgaagagtctgctatatgttgtgtattaaaagaaactcttaaagctcttgattatcttcatagacaaggccatatccatcgggatgttaaggctggaaacatacttcttgatgacaatggtgagattaagcttggcgattttggtgtctctgcttgcttgtttgataacggtgataggcaacgtgctagaaacacatttgttggtactccttgctggatggcaccggaagttttgcagccgggaaatggatacaattccaaggctgatatctggtcatttggtataacagcacttgaattggcccatggtcatgcacctttctcaaaatatcctcccatgaaggtgctcctaatgactattcaaaacgcacctcctggccttgattatgaccgtgataagaaattttctaagtcctttaaagaaatggttgcaatgtgtttggtgaaagatcaaacaaaaaggccaactgctgaaaaactgctgaagcactcctgtttcaaacacacgaagcctccagagcaaactgtgaaaattttattttccgatttaccacctctttggacacgtgtaaaatctcttcaggataaggatgctcaacagcttgcattaaagagaatggccactgctgacgaggaagctatatcacagagcgaataccaaagaggagtgagcgcttggaactttgacgtcagagacttgaaaacacaagcatctttgttaattgatgatgatgatctagaagagagtaaggaagatgaagaaatattatgtgcacagtttaataaggtgaatgacagagagcaagtatttgatagtctgcaactatatgaaaacatgaacggaaaagaaaaggtttccaatactgaggtggaagaaccaacctgcaaagagaaattcactttcgttacaactacttcttctttagaacgaatgtcaccaaattcagagcatgacattcccgaggccaaggttaagccattaagacgccaaagtcagagtggaccacttacaagcaggactgtattaagccactcggcttcagagaaaagtcatatctttgaaagatccgagagtgaaccgcagacggcaccaacagtccgaagagcacccagctttagtggtcctttgaatctttcaacccgtgcttcttcaaacagtttgtctgctcccatcaaatactcaggaggattccgtgattctctggatgataagtcaaaggctaatctggttcagaaaggacgattttcagtaacatcaggaaatgtagatcttgcgaaggatgttccattaagtatagtccctcgtcgatctccacaggcgacccccctgagaaaatctgcaagtgtgggtaactggatacttgagcccaaaatgccaacagctcagcctcagacgatcaaggagcatagtagccatcctacgtcttcctcacccatcatgcctcaacttcaacatctattccagcaaaactcaatacaacaggatcttattatgaatttactaaatagcttacaacccgtggaggcaacagaaggttctcaatctgggaagttaccacctttgcctcgctcagacagtaatggaaacgttgaacctgtggcttcagagagggagaggttacttcttagcagtatctccgacctccgtgctaggctggacgacttaacggaggaactcgatatagagaaatcaaaatacagccaactgcaacagaaattgaaagcattcacgggtcgcgaacactaagtgtaaccagagggaaagcgacactggaaacactgaactgcacagaacctgtaggagaaagagtgaagtctcttttggttataacagtaataaccagacaagagcttagagacagtgaggcatagagcatatcaatttctttagttgggttcagtgtaggttccagacgatgacaatgacgactaaaacaagatacgaccgatgtctgcttctgatgtaaactactagttgaagacaacagaaacgaatacagaaataaaagaaaaggagaagaaagttcctttggggggtctcaaccccacatatatttgcttatatatttattatcacacgttttgatcattttttgttttattttgtttggtgtatcataatttactagtgagataaaggagaaagctcttcttttgggttctttgtgtattgtaatttgtaaatgcaaattgattgatgtacttttgtgttttcatcacattcttaaacattatcttctggttttacccaaaaaaaaaaaaaaaa

SEQ ID NO: 247 - DNA, 1307 bp, Arabidopsis thaliana
  Clone ID: ARATH-23APR03-CLUSTER14157_1
aaaaaaaacatataaaaaaacctgtttgttctttcctttcttctctccaaatttctacttcttcttctttgatcgacacctatctaaccctaatctctccgggtttttttttctgcccttaagaagacgtcgtttcgaacctctttagtatcgatactcaaacctatacacacaccaaacatcccaagtttgttggctctgtttttgaggtgaaaactcgtcggaaaaacgagtttttttttaattgggtttctctttttttttgttgatctggaaggagaaaattagcgatggcgtccagtaatagcgagaagatcaacgagaatctgtacgctgttctgggtttgaagaaggaatgttctaagacggagctccgttctgcttataagaagcttgctctcagatggcatccagatcgttgttcgtcaatggagtttgtagaagaagcaaagaagaaatttcaggcaatccaagaagcctactctgttctgtctgactccaacaagaggttcctgtatgatgttggtgcttataatactgatgatgatgatgaccaaaacggaatgggagatttcttgaacgaaatggcgactatgatgaatcaatccaagcctagtgataataacacaggggacagttttgaacaactacaagatctgtttaatgagatgtttcaaggagacgctgcagcattcccatcatcatcgtcctgctccacttcaaatttcacttcatctcgtagttttgtattcgatacaaattctcagcggtcatcttcgtttgcgacaagttcgatggggatgaataatgatcctttcggatatgacccgagagctcattccttctctttaggggtggaccatcagcaagagttcaagaaagggaaaaacaatggcggaagaagaaacaggagaaagaacaatgttccatcggctggtcacgaaacgtcgtcgtcaaacaactatggagtccccacctcatagccacttcacaccatatttttttgctaactcatctccccacatttgtcgactagtcgcagacaagatgagtggttgttgtcttctcaatgaggaatacatcgaaactcaaagggtcgtcgttttgtaaaactacccacctccttctctagaatcttcttatttttatttttgtttctcctgtgctgtcattgaattgttgtctcctaaaagcaagaatcgttaaagatcattgagatcgatgaaatcaattgctttatgttgatcaaacacagttccttctatattcttattagttattgattgtctctaaaaaaaaaaaaaaaa

SEQ ID NO: 248 - DNA, 2181 bp, Arabidopsis thaliana
  Clone ID: ARATH-23APR03-CLUSTER14158_1
aaagaaaaaaatgagaatcttcaaataaaaaaaaaaagaagagactacggagagtcaaaaacagtgagagctttctttcatcttcagccagatcggagcaatcttctccatagattccgtgaaacgatgggaatagccaataagctccggctaagttcatcatctctcagccgaatcctccaccggagaatactttactcatccgctgtcagatctttcaccacatcggaaggtcaccgtcccaccatcgttcataaacaaggtctcgatatcctccatgatccttggttcaacaaggggactgcgtttacgatgacggagagaaatcgtttagatcttaggggtcttcttcctcctaatgttatggactctgagcaacagatttttcgttttatgactgacctgaagagattagaggagcaagctagagatggaccttctgatcctaatgctttggctaaatggcggattcttaatcggttacatgaccgaaatgagactatgtactataaggttttgattaacaatattgaggagtatgcgccgatagtgtatactcctacggtaggtcttgtctgccagaactacagtgggttgtttaggaggccaaggggaatgtattttagtgctgaagatcgtggtgaaatgatgtccatggtttacaactggccagctgagcaggttgatatgattgttgttaccgatggaagccggattttgggtcttggagatctaggtgttcatggaattggaattgctgtagggaagcttgatttatatgttgccgcagctggaataaatcctcaacgggtactacctgtcatgattgatgttggaacaaacaatgaaaaactacgcaacgaccccatgtacttgggtctgcaacaacgtcgtttagaggatgacgactatatagatgttattgatgaatttatggaggcagtgtatactcggtggccacatgttattgtgcagtttgaggatttccagagcaagtgggctttcaaattattgcagaggtatagatgcacctaccgaatgttcaatgatgatgtccaggggacagcaggggttgctatcgctggtcttcttggagcagttagagcacaggggcgacctatgattgatttcccaaagatgaagatcgttgttgctggcgcgggaagtgcgggaattggtgttctaaatgctgcgaggaagacaatggcacgaatgttgggaaatactgaaactgcgtttgatagtgcacaaagtcaattttgggtggttgatgcgcagggtcttatcaccgaaggccgggaaaatattgacccagaggctcagccttttgctaggaagactaaagaaatggagcgtcagggattaaaagaaggagcaactcttgtggaagtggttcgtgaagttaaacctgatgtgcttcttggtttatcagcagttggagggttattctcaaaagaggttttagaagcaatgaaaggttcaacctcgacaaggcctgctatatttgcaatgtcaaaccccacaaaaaatgctgaatgcacgcctcaagatgcattttcgatattaggcgaaaatatgatttttgcgagtggaagcccattcaagaatgtggaatttggaaatggtcatgtaggacattgcaaccagggaaacaacatgtatctatttccaggtattggacttggcactcttttatctggtgctcccattgtctccgacgggatgcttcaggccgcatccgagtgcctagcagcatacatgagcgaagaagaagtgctagaggggattatataccctccaatatcaaggatacgagacataacaaaaagaatagcagctgcggtgattaaggaagcgattgaggaggatttggttgaaggatatagagaaatggacgctcgagagatccaaaagctggatgaggaggggctgatggagtatgtggaaaacaacatgtggaatccagagtacccgactttggtctacaaggatgactaagtttggttcccaaaatgaataagtctactttctcttatttatatgtaaaaatttataattggggttgctttatacccaatcaaattcatagctactgctttctcttgttcttatgtaaaaaaaaaaaaaatatataattgggttgtttgttatccaatcagattcataaaaaaaaaaaaaaaa

SEQ ID NO: 249 - DNA, 1086 bp, Arabidopsis thaliana
  Clone ID: ARATH-23APR03-CLUSTER1415_1
cgtgctcccgggtcccgccatcgcccggggacccttccttggacatcctgttccgaaacacacaatcacagaacctaatcttcttctccaatcaatctcagagaaaaaaagaaatggcaacaaaccctaaagtctacttcgacatgaccgtcggtggcaaatccgccggtcgtatcgtgatggagctttacgccgacacaacaccagaaacccgccagacgacttcacacaatcacagaacctaatcttcttctccaatcaatctcagagaaaaaaagaaatggcaacaaaccctaaagtctacttcgacatgaccgtcggtggcaaatccgccggtcgtatcgtgatggagctttacgccgacacaacaccagaaaccgccgagaatttcagagcactctgtaccggagagagaggaatcggtaaacaaggtaagccattacactacaaaggatcaagctttcaccgagtgattccgaaattcatgtgtcaaggaggtgatttcacagccgggaatggtaccggaggtgaatctatctatggatcgaagttcaaagacgagaactttatcaagaaacatacaggaccaggtattttgtctatggctaacgctggtgcgaacacgaatggatctcagttttttatttgtactgagaagacttcgtggctcgatgggaaacatgttgtgtttggtcaagttgttgagggattgaatgttgttagagatattgagaaggttggatctgactctggaagaacttctaagcctgttgtcattgctgattgtggtcagatttcttagatctgtctgagattgttgatgatgatgatgatgatcttgaggatccaatggtagctttgtgttgtttctctttgatgttttctggtttatgtttttggattttgatgtttattgctgttgtgaaactttgagtttggctaccattgaataagaagaatgagaataaaatcttgagatccaaaaatttgtttaaaaaatcaaaaaaaaaaaaaaaaaaaactcgcgggggggccccggtaccctcggccgggaagaagacttaaagctcaaaaaaaaaaaaaaaa

SEQ ID NO: 250 - DNA, 2689 bp, Arabidopsis thaliana
  Clone ID: ARATH-23APR03-CLUSTER14163_1
ggggtctaaatcgcgagttttcgcgtaggtttgagcaaaaaaaaaaagagagagagtgcacagtgcgcttttggtagagagaaagggttgttattatttaggattgatgtcttcttcttcctcttcgtgattctctcacacaattttcacccattttcatgtctcttcctaccaaacgctctactttctccgccgcttctgcctccgacgactcttcttactcttctcctccgatgaaaaaggccaaaaacgacctccaccattcccctcaacaccctaataccgccgacaaggttgttggctttcatatggaggaagatccaactcccgccgccgctaatctctctcggaagaaagctacacttccgcaacctactaagaagtttgtaatcaagctcaataaagccaaaccaactctaccaacaaactttgaggagaatacatgggagaagttgcagtcagctatcagagctatattcctcaaaaaaaaaatttcgtttgacctcgagagcctttaccaggctgttgataacctttgcttgcataagttggatggaaagctatatgaccagattgagaaggagtgtgaagaacacatctctgcagctttgcaatctttagttgggcagaacactgatctgactgttttcttgtcacgtgttgagaaatgctggcaagacttttgtgaccagatgctcatgattcgtagtatagccttgactctggataggaagtatgtgatacagaatccaaatgtacgttcattatgggagatgggtttgcagcttttccggaagcatctttctctggcccctgaagttgagcagaggacggttaaaggtctcttaagtatgattgaaaaagaaaggttagcagaagctgttaataggactctactaagccatcttttgaagatgtttactgcactgggaatttatatggaaagctttgagaaacctttccttgaagggacctctgaattttatgccgctgaaggaatgaaatacatgcagcagtctgacgttccggagtacctgaagcatgttgagggaaggttgcatgaagagaatgagagatgcatactctacatagatgcagtaaccaggaaaccattgatcacaactgttgaaaggcaacttctcgaacgtcatatacttgttgttcttgaaaagggttttacaacattaatggatggacgtcgtacggaggaccttcagaggatgcaaaccttgttttctagggtcaatgcacttgagtctctgaggcaggcgctaagttcatatgttcggaaaactgggcagaagattgttatggatgaagagaaagacaaagatatggtacaatcactgttggacttcaaggcttctcttgacataatatgggaagagagcttttacaagaacgaatcatttggtaacacaatcaaagattcgtttgagcatctgattaatcttcgacagaaccggccagctgagcttattgccaagtttttggacgagaagctccgtgctgggaataagggtacttctgaagaagaattggagagtgttcttgaaaaagtcttggttttgttcagatttatccagggtaaagatgtgttcgaagcattttacaaaaaggatcttgcgaagagactcctgttgggaaagagtgcttcaatcgatgctgagaaatccatgatctctaagcttaagactgagtgtggtagccagtttacaaacaagctcgaagggatgttcaaggatattgaattgtcaaaggaaatcaacgagtcattcaaacaatcttcccaggccagaacaaaactgccatcgggaattgagatgagtgtccacgttttaacaacagggtactggccaacatatccgcctatggatgttaagcttcctcatgaactaaatgtctatcaggatatcttcaaagagttctatttaagcaagtacagtggtaggaggttaatgtggcaaaattcattaggccactgtgttttaaaggcagatttctccaaaggtaaaaaggagctggctgtttccctgtttcaggctgttgtgttaatgttatttaacgatgcaatgaaacttagctttgaagacattaaagattccaccagcatagaggacaaggagctgaggaggactttgcagtcgcttgcttgtgggaaagtccgtgtcctgcagaagaatcctaagggaagagatgtagaagacggtgatgaatttgaatttaatgatgagtttgcagctccgctgtatcgcattaaggtaaatgcgatccagatgaaagagacagtagaggagaacacaagtacaacggaaagagtattccaggaccgacaataccagatcgatgcagccattgttcgtattatgaagacaagaaaagtcttgagccatactcttctaatcactgagctcttccaacagctcaaattcccgataaagcctgctgatctgaagaagaggattgagagcttgatcgatcgagaatatttggagagggaaaaaagcaaccctcagatatacaattatcttgcttagaatctctttggtaaacacaccttttgaatattttcctttttgtatatttattgacaaacaaacgatgaccgaaattttcttatcagtttaaaaaaaaaaaagaactctcgatattccaatcaactctaaaaaaaaaaaaaaacccgttcttg

SEQ ID NO: 251 - DNA, 1510 bp, Arabidopsis thaliana
  unsure (1)..(1510): unsure at all n locations
  Clone ID: ARATH-23APR03-CLUSTER14210_1
gcgcgaggngagagctcactagtcccccccncccccaatcttaccaacagatggcatcctttatacttctctggtttcagatttctaagagtcaatttgctgaatcatatatttttcttcagattttcccaagttagtttctgttagtaactctgggataagtttgaggattcagaatagtaaacctattagccctgtctttgctcttgaagcaacttcctccaggagggttgtttgcaaagctgctgctggtgtgtcaggtgacttacctgagagtactcctaaggaacttagtcagtatgagaagattattgagcttttgacaaccctttttccactttgggttattttgggaacacttgttggcatcttcaagccatccttggttacatggttggaaacagatctctttactctaggtcttggatttcttatgctttccatgggtttgactcttacgtttgaagatttcagaagatgtttacgtaatccatggacggtgggtgttggttttcttgctcaatatatgatcaagccaattctaggttttctcattgcaatgactcttaagctttcggcacctcttgcgactggccttatcctagtctcatgctgccctggaggacaggcgtcaaacgttgctacttacatttccaaggggaatgtagcgctctctgtactcatgacaacgtgttcaaccattggggctattataatgactcctcttcttactaagcttcttgctggtcagcttgttcccgttgacgctgctggacttgctcttagtacgttccaagtagtgttggttcctaccataattggagttctggcaaatgagttctttcctaaatttacgtctaagatcataacagtgacgcctctaatcggagtcattctgactactctgctctgtgccagccctattggacaagttgcagatgttttgaaaacccaaggagctcaacttatactcccggtggcactccttcatgctgcagcctttgctattggctattggatttcaaagttttctttcggcgagtccacttcgcgtaccatttctatagaatgtggaatgcaaagttcagcgctcgggttcttgcttgcacaaaagcatttcacaaaccctctagttgctgttccttctgcagtcagtgttgtctgtatggcgcttggcgggagcggcctggccgtgttctggagaaacctaccgattccggcagatgacaaggatgacttcaaagagtaaatgaagtaggaaaggcggtttgcatcttctccaaacgatgtgattgttttgttgtaatgttagtaaacattacaaaatttgtgttgaaaaacatgaaacaaaatgtgtttaagagacatagaaacaagggcgtgcatgatgacaactttgtggtcaaccttttttttatttctcaattaatggacaaatcttttttggcaaaaaaaaaaaaaaaaaaaaaaaaaaatcccctntttaaaaaaaatatataaatatataaaa

SEQ ID NO: 252 - DNA, 2899 bp, Arabidopsis thaliana
  Clone ID: ARATH-23APR03-CLUSTER1435_1
gttaagaagattcaaaaggagaacgcgttagacacactaagggtgggggcaagggaggagaaactcgccggacagagacggagatccctaaaccgcagcctcagactaaagcttcgcatcttatctccgatccatcgttgacttcactcttagctgatcatcatcatcatctctatctctgttcggattctccataattgatccggaccatgccgccgagatgtcctttcctccgccatcttttcttcttactactattactctcaccatggatcatgtctccttgcggcggcgctgccgacgatgtgacgtatccgatcgttccatctagtcccggccgcagatcaattttgcagattcgtcgtgaaccaccaacagagccaaatacgaaacttgttgttgatcgtgatgggaaggtgtttttaaagcagcaaccgaaagaaacaccatactggtccttttcaacaggatcaccaatgcactcgttatatcaggctcctgctaataacaacacagaaaatgctactgagataactcgtcctcacataattgttgaatatctgaacaactcaaaggcggctactactgtcgatggctatcataattggacagttcaggagttttttaggcagaagccacttgtaacagatgatggtgtgactcttggatcagaaacaactagtgcctatttggttgatggtagatcagggaggctgattcatgtttacaaatcaactggagatactaagattactaatgctctcgtgaagcccgctagcactgaagattttgtgaatgaacctcttcttatcaggcgaacagattccaaacttgagcattttagtaaaaccactgggaagcttgtctggaatttgacggtttctcacttcagagctgctttactatgtgatcctgttttcaattctggctatgacctcggtcctaaacttcaaactggaatttatatgccattgttatgtggatcacaaattgacgttcgtggcccagaaattgttatcagggtgctccatgatcagccaatgaatgtgaaaatgctaccctccccttccctaaatcacttcgagagcgaaaacagcatcatgccttttggaaaagccagagagtcaagaaagttacaagagcaacataagcagaaatatacatatttgtttggacaatggtcaccagtaaagttattggcccctttagtgcttctaggtgttgttgtctctgttttcattaaaaagttttcgtcgaggggcagtgatgttagtttgaaagctggaccttccaaaaagaagaagaaccgtaaatccgcgaaggatacaaataggcagtcagttcctcgtggccaggatcagttcgagctcattgaaggaggtcaaatgttactaggcttcaataactttcaaagtggtgcaactgatgggagaaagatcggtaagttgtttctgtcaagtaaagaaattgcaaagggaagtaacggaactgtggtgtttgagggtatttacgaaggccggcctgtagctgtaaaacgccttgttcgatctcatcatgaggttgctttcaaagagattcaaaacctcattgcatcagaccaacacacaaacatcattcggtggtatggtgtggagtatgatcaagattttgtatacctttctctagagcgttgcacctgcagtttagatgatctaatcaaatcctatttagagttttctatgacaaaagtattggaaaacaacgattctactgaaggagtggctgcttataagatccaacttgattctttggagggagttatcaaaggaaacaacttttggaaagtggggggtcacccgtcacctctcatgcttaaactaatgagggatatagtttgtggaatcgtccacttacacgaattgggaatagttcatcgggacttgaagccacaaaatgtgttaattagtaaagatatgactttgagtgcaaaactgtccgatatgggcattagcaagcgtatgtccagagatatgtcatcattgggtcaccttgccacaggttctggcagttcgggctggcaagcaccagagcagcttctacaaggtcgtcaaactcgtgcagtcgatatgtttagtttaggttgtgtcatcttttacactataaccggttgtaagcatccctttggtgatgatcttgaacgagatgtcaatattgtgaagaacaaagtcgacctatttctagtagaacacgttccagaagcttcagacctcatatcccgtttgttaaacccagaccctgatttacgtcctagcgcaactgaagtgctactccatcctatgttttggaactcagagatgagactgtctttccttcgtgatgctagtgaccgagttgagcttgaaaatagagaagctgattctgaaatcttgaaagcaatggagagtacagctccagtggctataggagggaaatgggatgaaaagctagaacctgttttcatcacaaacatcgggcgctacaggcgttacaaatacgatagcatccgtgacttgttacgagtcatcaggaacaaactgaatcatcatcgagaacttcctccggaaattcaggaacttgtcggaacagttccagaaggattcgacgagtactttgctgtacggtttccgaaattgttgattgaagtctatagagtcatctctctgcattgtagggaagaagaagtattcagaaagtacttcaaatgcgacatcatctaaaagactgtttcgcttccagcactttatatgttagttattgtatgtttgtcattgttatataacataacttaactgatatctaaatgtttaacgtataacttaaactgcaacatatgtagtatttatatatgtatatatctcttcaagtaactatgtttcaagtg

SEQ ID NO: 253 - DNA, 1311 bp, Arabidopsis thaliana
  Clone ID: ARATH-23APR03-CLUSTER14365_1
ggttacttttcttgccttttccgtcgatcttcttctccaacacaacaacaatcagatttcttcgtcgatttgatcgattcttcttcgtctctctccgattgaaataaacccttgatttcactacagaaagttttttttttgtgatcgggaattgaatctccttctcatgcattaatcttcttgaagatgtcaaaaggggtaaacaggttcccatgaagaaagaaaatggtcagacggctctggtgcctctgttccatagtcaagacactatttccgggaaggtttgcattgaaccatatcaagggaaaaaggtggagcataatggtgtaaaagttgagcttcttggtcaaatagaaatgtactttgacagaggaaacttctatgatttcacttccttggttcgtgaactggatgtacctggagaaatatacgaaaggaagacatacccttttgaatttcctactgtggagatgccatacgagacatacaatggtgtgaatgtgcggctaagatatgtcctcaaagtaaccgtcactcgtggctacgctggaagcatcttggaataccaggagcttgtggtacggaactacgctccgcttcctgctattaataacagcatcaagatggaagttggaattgaggattgcctgcacatcgagtttgagtacaataaaagcaagtatcacctaaaagatgtcatccttgggaaaatatattttcttcttgtgagaatcaagatgaagaatatggatcttgagatcagacggcgggaatcaacaggtgcaggtgctaatactcatgtcgagacagaaactcttgcaaaatttgagttgatggatggaactccagttagaggtgaatcgatacctgtaagactgtttctggccccatatgatcttacaccaacgcatcgcaacatcaacaacaaattcagcgtcaagtattatctgaatcttgtactggtagatgaagaggatcgccgatacttcaagcagcaagaaatcacgttgtataggttgaaggaagacgcatcatcttgatgataataactactgtaaggattctcattatccttttgagactttttttgtaaaaagctttagactttgtgtactcagattgttatttgggtcggtacttagaatgaagttttaacagctcgtatttatgtttgttgtttgttcaacgacccaaatgttgtttggctttgtttgggttcttgtgacttccattgtcttcttctccttctataaatgtactttttgttgtcttatgttactgaataagcagctttatttataggaaaaaaaa

SEQ ID NO: 254 - DNA, 1514 bp, Arabidopsis thaliana
  Clone ID: ARATH-23APR03-CLUSTER14385_1
aatcgtttccacgaaaacaagtagagagagtgattcgagttttccaatcataaaaatcagcgaagaagatcttcgttcttgttcattctgtgaggtttcattgttaaaatcgaaacgaatctcaggttggagtaatccttgggagagatccgatttccgtttccatggcgattcggtggtcggagctgtgtatcgtactgttcgctctttcctacgccatctgcgtccttgccgggaagagttactacgatgtgttgcaagtcccgaaaggtgcatctgatgaacagatcaagagagcttataggaaactagctttgaagtatcatcccgataagaatcaaggaaatgaggaagcgactcgcaaattcgctgagatcaacaatgcttatgaagtgttatcggatgaggagaagagggagatatataacaagtatggtgaagagggacttaaacagttttctgcaaatggaggaagaggaggaggaggaggcggcatgaatatgcaggacatcttcagctcattttttggtggaggttcgatggaggaagaagagaaggttgtcaagggggatgacgtaattgtggaacttgaggcaactctagaagatttgtacatgggaggctctatgaaggtatggagggaaaagaatgtgataaaaccagctcctggaaagagaaagtgtaactgcaggaacgaggtctatcacagacaaattggtcctggaatgttccaacagatgacagagcaggtctgtgacaaatgccctaatgtcaaatacgaacgggagggatactttgtgacagttgatatcgagaaaggaatgaaagatggagaagaagtgtctttctatgaagacggcgaacccattcttgacggtgaccctggtgaccttaagttccgaatcagaactgcaccacatgcccgtttcagaagggatggcaacgatctacacatgaacgtgaacattacactggttgaggcgctagttggttttgagaaatcattcaaacacttggatgatcacgaagttgacatcagttccaagggaattacaaagccgaaggaagtaaagaagttcaaaggagaagggatgccacttcactacagcacaaagaaaggcaacctctttgtcacttttgaggttttgtttccgtcttctctcactgacgatcagaagaagaagattaaagaagtctttgcttagtgctcttctctcgctttcgctctctctctctttagaagtttggggattaaagagaagaacatgtgatggtcctaatgtataacatgattaggttttaatatagaaagaaaaaagatatggggagacaaagtcggaaggacgttttgatcaagttgtcatttttgtttgctctttgttaatcatattagtgcatattcatgatccaaatacgatttgaattatttctgtgaatcctatttcgaatactcaaaaaaaaaaaaaaaaaaaaagggcggccgcaataataatgaaaacccttgtgtttctttt

SEQ ID NO: 255 - DNA, 3848 bp, Arabidopsis thaliana
  Clone ID: ARATH-23APR03-CLUSTER14407_1
cttcttcttctgccacttcgattgctttaaacttggagattaagattacacatcaaagaattcttctttgtcttcctcgtgatcatcgaggaagcttgatctcttctatggaatggagaatttgactctcctccttaggatctgtcttgtttcgtcggttttagttgctgcttcttcctcaggatcggaattgttatctccgttatcatcaccaccgtctccattacccgaaacttcaaaagggtttggtcaagcaccgagtaattcacctgaatctcacaaatccgacaatgtgccaccgtctaaagcttcttctcaaccgtctcttcctcctttagctgatttggcagctccaccaccgtcagattccgtcggaggtaaagcaccggccggtgtacctgttgtctttgttcctaatgctccagctccagctacaatacccgttaaggatttgcccgtagcttcgcctccggttcttcaacccattacaccgattgcttcaccacctcgattcattccaggagatgcaccaaaggagcctcctttctcaggaagagttactccagccccggtttcatcacctgtttcggatattcctccaattccatcagtggctctgcctccgcctacaccgagcaatgtacctcctagaaatgcttctaacaatcacaagcctcctcctatcgaaaagtctattgctcctgttgcatcaccaccaacaatatcaattgacattgcaccaccagtacatcccgtcatacctaagttaacaccctcgagctcacctgtacctacctcgactccaactaagggatctccgagaagaaatccgccaactacccacccagttttccccatagaatctcctgctgtctcaccagatcatgctgcaaatccagtaaaacatccgccccccagcgataacggagatgatagtaaaagtccgggtgctgcaccggcaaatgaaactgctaaacccttacctgtcttcccacataaagcttctcctccttcgattgctccctcagccccaaaatttaacagacactctcatcatacatctccatctactactccaccgccagattctactcctagtaatgtacaccaccatccttcatcaccatctcctcctcctctatcttcacaccatcaacatcatcaagaacgaaagaaaatcgcagatagtccagctccttcaccactgccaccgcatctcatatctccaaagaagtcaaaccgtaaaggttcaatgactcctcctccacaatcgcaccatgctccttctcctcccattcctgattctttgatttctcctgctcacgctccagtctctttctctatgaaacgcatctccccggctctagcaccttctccaacccaagtgtttcctctcaggtcctcttcaagaccttcaaaatctcggaaattccctctaggtccacctcttcaagcatttcctcctcctccccctaattcagattgttcttcaactatttgtttggaaccgtacacaaacacacctccgggatctccatgtggctgtgtctggccaattcaagttgagctacgccttagcatggcgctctacgacttcttcccaatggtttcagaatttgctcgggaaatcagcgccggagttttcatgaaacagagccaagtccgtataatgggagctaacgcggccagcgaacaacctgagaaatccattgttctaatcgatttagtaccgcttggagataaattcgataacatgactgcaatgctgacttaccagagattctggagtaaaaaagtctatatagatgaaccaatctttggcggatacgacgtgatttacgtgcgttatcctggtttacccgcttccccgccaacttctggtatgaccattatagatcaaggaccgtactctggtaataataacggaagggcggtcaaaccgctcggagttgatgttccaaggaagccgcgcaagaaagagctcaatggtggaagtattgctgtgattgttttatccgcagctgcttttatcggtttatgtttcgttatcgtttggttcttggttttccggcgacaaagagatcgacgacgtctttcgaaaagaacaccacttgctcgcccttcactgccttccctctcgaaaccatcaggctcggcgagatctttaactggaagccgatttagctcaacttcattgtcatttgaatccagcattgctccgtttactctctctgcaaagactttcaccgcaagtgaaataatgaaagctacaaataactttgatgaatcgagggttcttggtgaaggcggatttggacgagtttacgaaggtgttttcgatgacggaactaaagtagcagttaaggtattgaagagagatgaccagcaaggtagcagggagttcttagccgaagtggaaatgcttagtcgtcttcatcacagaaacctcgtgaatttaattggtatttgtatcgaagatcgtaaccgttccctggtttatgaactcataccaaatggcagcgttgaatctcacctccacgggattgataaagcatcttcgcctttagattgggatgctcggttgaagatagctcttggtgcggcccgtggtttagcgtatttacacgaagactcgagcccgcgagttatacacagagacttcaagtccagcaacatcttgctggaaaacgatttcacacctaaagtatctgactttggattggctcgtaacgcccttgatgatgaagataacagacatatatcgacacgcgttatgggaacgtttgggtatgtggcaccggaatacgcaatgacagggcatcttttggtgaagagtgatgtgtatagttacggagttgtgcttctcgagctacttacagggcggaaaccagtggatatgtctcaaccgcccggacaagagaacttagtttcatggactcggccttttcttacgagtgcagaagggcttgcagctattatagatcagtctttaggacccgagatctcattcgatagcatagctaaagtcgcggcaatagcttctatgtgcgttcaaccagaagtatcacaccgtcctttcatgggagaagtagtgcaagctttgaaacttgtcagcaacgaatgtgatgaagctaaagaactcaattctttaacttctatctctaaagacgattttagagatgacactcaagctgagagctcttgtggtgacagctcagcaaggatggctcggtatccattgctaccaaattacgactctgagcctgatacagagagaggattatctacatcggaaatgtacacggggtcagggaggttcgagagacagtctaactcgggtcccttgacctcgggtcgaggcaagagtttctggcaaaagatgaggagattatcgaccggaagcttgagtgagcatggaacaccaacggtcatgttacgatccggttctcgctaaacaatcttttgcctacagaacactgaagagtttttgattgcccgtttaagttaagagactgaaaggaaagaaggtgccttctcctacaagcaaaactctttgcctcatggaaaccggttaagataaaaccaggagtgatcatttcccggttcaaaatttttagttgaatagatctgtttatctgagaagaagaaacaagagattctgttaaatctaatttgaatgtacatatcacgttttaaagtaacaggcttaagcattaagtatcatcatccttcaccatttcaggtcgaataaagaagattggttttgaacggccgcgaatttcttcaggccgggggattccctaggtctagaacggccgcccccccggtggaggttcaggctttggtcc

SEQ ID NO: 256 - DNA, 1389 bp, Arabidopsis thaliana
  unsure (1)..(1389): unsure at all n locations
  Clone ID: ARATH-23APR03-CLUSTER1440_1
atttaaaaacgacatctttttattacttcctcttcgaaagattgtttaccaacaagaacaatggcggtttatcatctccttctctcgagcccaccttcgcttcttcttctccctccttctcctcgccgccctaacctcaccttaatccgccgtatcccagctcatcctcgcctcggaaactcgaccagcttgctttcttcttcgtcaccggtaattcggaaaattctggttcgtagcactctccgggaagaccaacccatcgcctctgactacgagagtagtcctactctactgatcggtgaagattctgctgcttttgaattagggaaacagaagcttgtttcctgggtttatttcggtgttgtccttggagttgttctctttatcctcaatgttgtttggatcgataattccaccggtttcggaaaatcattcatcgacgccgtctctaacatctccggctcaccggaggttgctatgttaatgcttatccttatatttgcaattgtacatagtggtttagctagtctaagggatataggagagaaacttataggtgaacgagcatttcgtgttttgtttgctggaatctctcttcctttagctatgagcaccattgtttactttataaaccatagatatgatgggtcacagttatggcagcttcagggtgttcctggagtccatgaagctatttgggtcgctaattttgtatccttcttctttctctatccttcaaccttcaatcttctggaggtagcagctgttgacaaaccgaagatgcatctctgggagaccggcatcatgagaatcactcgacatcctcagatggttggacaaatcgtttggtgtttagcacatactctctggatcggaaacacagtagctgcatcagcttctctcggtttgattgcacaccatttgtttggggcgtggaatggagacaggagattggcaaaaagatatggagaggattttgaaagcatcaagaagagaacaagtgtgattccatttgctgccattttcgaaggacggcaagttttacctgaggattactacaaagaatttgtcaggttgccatatcttgcaatcactgcgttaacggttggggcatattttgctcacccgctaatgcaaggtgcaagctttaggcttcattggtaaattatatgtcatgctttaggcttcattggtaaattatatgtcatttatgtttgtttgtttcctgcagtgttcataaagacttgttaaggaacaaatgtatacaaaaagccttattgtttgtgatacttgactcttctgcatttctcgattattttggctcaaaaaaaaaaaaaaaaaaccgagggggggcccggaccgnnnncaacctnnnctnnnnnnnnnnnt

SEQ ID NO: 257 - DNA, 2584 bp, Arabidopsis thaliana
  Clone ID: ARATH-23APR03-CLUSTER14536_1
gataatgttacttatcttctgatcttcccaaaaaaagcaactaacaatggtggaactttcgttctctcagctccttgtcttacttttaagcttactctttctcttcactactctcgcgtcaagttccaagaccccccgattcaagtattcgttagagaagcctcaccacccacttgacccactaacgacacctgaaataaagagagtccaaaccatcctctcgggtcatgatccgggtttcgggtccgggtcaaccatcattcacgccatggctctcgacgagccggataagcaacgtgtcatccggtggaagaaaggtgatcgtctcccgccgcgaagagcggagattcttgctatgtctaacggcgagagtcacgtgctcacggtggatcttaaatccggtcgggttgtttctgatttggtcaacccgacttttggatacccgattcttactatgaaggatatcatcgcagtctcacaggttccttacaagagcgtggagttcaatcgctcaatcgaagcgcgtgggattccgttctccggtttgatttgtattacaccgttcgccggttggtatggaccggacgaagaaggacgacgagtcataaagatccaatgtttctcaaagcaagacactgtcaatttctacatgagacctatcgaaggactttatttaaccgtcgatatggataaattagagatcatcaagattgtagacaatggaccggttccggttcccaagtctaccggtacggaatatagatatgggtttcttaatgaaacggtatatatggaccgtgtcaacccaatgtcgatggagcaaccggacggtccaagttttcaagttgaggatggatacttggttaagtgggcgaattggaaatttcatattaaaccggatcaacgtgccggtatgattatctcacaggctacagttcgtgattccaagacaggtgaagcaagaagtgtaatgtacaaaggttttgcgtcggagttgttcgtaccgaatatggatccaggggaaggttggtattcaaaagcttacatggatgctggagagtttggtttaggaccttcttcaatgccacttgtgccactcaacgactgtcctcgaaacgcttactacattgatggtttcttcgcttctcctgaaggcattccaatacttcaacctaacatgatctgcttgttcgaacgctacgcgggtgacactagctggcgacactctgagattcttctccctggtgtagatataagagagtcaagggcaaaggttacactggtagctagaatggcatgttctgttgggaactatgattatatttttgattgggagtttcaaatggatggtgtgattcgtgttacggtcgcggcctcggggatgttgatggtgaaaggaacggcttacgataacgttgaagacttgggtgagaaagaggatgattctggaccgttgatctcagaaaacgttataggagtcgtccatgatcatttcatatcgtttcatctagacatggacattgatgggtcagccaacaactccttcgttaaggttcatctagagaagcagagacttccacctggagaatcaaggagaaagagttacttgaaggtcaagaaatatgtagccaagactgagaaagatgctcagatcaagatgagcctgtacgacccctacgagttccatcttgtgaaccctaaccgactttctcggttagggaacccggctggttacaagcttgtacctggtggtaatgctgcaagtttgctcgatcatgatgatccaccgcaaatgcgaggcgctttcacaaacaatcagatatgggtgactcggtataaccggtcagagcaatgggctggagggcttttgatgtaccagagccgtggtgaagacacactacaagtttggtccgacagagatcggtccattgagaacaaggacatagtgttgtggtatacactagggttccatcacgtaccgtgccaagaagattttccagtgatgccaacaatagcatctagctttgaacttaaaccggtcaatttcttcgaatcgaacccggtacttgggatttcacctttcttcgagaaagacttaccagtctgttaaaccagatgcttcatcttattcgacactgtgcattttcaaatgtcatgtgtagacttttctgattataaatgttgtgcatattctattgatatatgtatatcagtatatgaaatcaacatgctcttgatattcgaatccaatccgattcttgggtctgctcctttcttcgaaaaagacttaccggtctgtagaccatttgcttcatcttgaccggttctgttctgactaatactctaatagtatacaagtagagaagatcaaatatccggtgtagccaaacacttgttgaagtttatttgccggtttttgcaataataacaaaacgtccaatatctgtaatccccgacgtaacataataccaaaaatcttcagtttcttcaaaaaaaaaaaaactcgagggggggcccggtacccaattcgtaaaaggaagaaaataaatgggggggggagggaggatggggggagggagggggg

SEQ ID NO: 258 - DNA, 2268 bp, Arabidopsis thaliana
  Clone ID: ARATH-23APR03-CLUSTER14541_1
aaaaccacacacacagcttcttcactgagagcttttttctagggtttctctctttgtttcttacaatgcgactcttcttcacaccgtcaatgtccaatctctccatattcttctcgattcttctcctttctcttcctcttccgtcaatcggagatctcgccgccgacaaatccgctcttctctcttttcgttccgccgtcggtggtcgtacattactctgggacgtcaagcaaacctcaccatgcaactggaccggcgtcttatgcgacggtggtcgtgttactgctcttcgtcttcccggtgaaacgctctccggtcatataccggagggtatttttggtaatttaactcagctccggacgcttagtctccgtctcaatggtcttactggttctcttcctttggatctcggaagctgctccgatcttcggcgtttgtacctgcagggtaacagattctccggtgagattccggaggttttgtttagtcttagtaaccttgttaggttgaatctagctgagaatgaatttagtggagagatctcgtcagggtttaaaaaccttactaggcttaagactctgtacctggagaataacaagctctctggctctcttttagacttggatttgtctttggatcagttcaacgtttctaataacttgttgaacggatctatacctaagagtttgcagaagtttgattctgattcgtttgtgggaacttctctctgcggcaaaccgcttgttgtctgctctaatgagggaactgtgccaagccagccaatttctgttggcaatattcccggaactgttgaaggaagtgaggagaagaagaaaaggaagaagctttctggtggagctatagctggaatagtgattggatgtgtggttggtttgtccctgattgttatgattttgatggttctctttaggaaaaaggggaacgagagaacaagggccattgaccttgcaaccatcaagcaccatgaagttgaaattcctggcgagaaagcggccgtggaagcaccggagaataggagctatgtaaatgagtactctccgtctgcagtgaaagctgtggaagtgaacagttcagggatgaagaagttagtgttttttgggaatgcgacaaaggtcttcgatcttgaggatctgttgagagcttcagcggaggttctggggaaaggaacgttcgggacagcttataaagcggtgcttgacgcggtgacattggtggctgtgaagagactgaaggatgtaacgatggcggacagagagtttaaggagaagattgaggttgttggggcgatggatcatgagaacttggtgcccttgagagcgtactattacagtggagacgagaagctgcttgtctatgacttcatgcctatgggaagcttatcagctctcttacacggaaacaaaggtgcaggccggcctccattgaactgggaagtcagatcaggcatcgcccttggagctgctcgtggcttagactatcttcactcacaagacccactgagctctcacggaaacgtcaagtcctccaatatcctcttaacaaactcccatgacgcacgagtgtctgatttcggcctggctcagcttgtaagcgcctcatccacaaccccaaaccgggccactgggtaccgtgcgccagaagtaactgacccgaggcgtgtctcacagaaagcggacgtgtacagctttggtgtggtgttgctagagttgctcaccggaaaagctccgtctaactcggtgatgaacgaggaaggaatggatttggcgaggtgggtgcattcagtggcgagagaggagtggaggaatgaggtttttgactcggagctgatgagtatcgagacagttgtctcggtggaagaagagatggcggaaatgctgcagctgggcattgactgtacagagcagcacccagacaagcggccagttatggtggaggtggtgagaaggatccaggagttgcgccaatcgggtgcagatcgggtggggtaagaccatcagatgaaaggagacttgagacatgagtctgttcgatgatctgaagcggcgacgttttcagtgtttagttttaagaatatggcgggaattagagttggggtcgttaattagatgtttttaattttggttttttttttttggtttctttcatgtgtgggcactgatgatgaggagtttcgtggtggttgtaattattagtgcttttaactttaactttattttcaatattgtttttcagcaaaaaaaaaaaaaa

SEQ ID NO: 259 - DNA, 749 bp, Arabidopsis thaliana
  unsure (1)..(749): unsure at all n locations
  Clone ID: ARATH-23APR03-CLUSTER146_1
tcccccggggctgcaggaattcggccnacagtggccccccccccccccccctccccttgttgccccccccccccccccgggaacttgtctgagttccaatgcggctgctgctatcatctgatccccaacccgaacttacgtctacatgtacctctcatagttgcggctggaagccttactctcattccaatgactttgctgccaacgcgttcctccttctcatcatcctcttctgttctttcatatgcgtcctctctctccacgctgctatccgttgttgcctccgtccagtcctccaacatgtccctaagcccgacccggaccttgaggccacccatccagacgctcccccgacacttgtctactccccgggcctaaacctagcaggcaatgaagcagagtgcatcatttgtttgtctgaattccaagacggtgacaccttacgcgtgttggagagatgcaaacatggattccacgtttattgcatccagaagtggctctcctcatcccattcttcttgtcccacttgccggacaaacatcttctcctccccacctcaacttcactcacaaagcttaccactaacgagtacaccttagtcagatggtagctagttcctggtcttgcccactttttttttatctttattttctttacaacttcacaccactatcatgttttacaagttagtttattttttacctttctccttttatattcctctcgagggggggcccggtacccaatcg

SEQ ID NO: 260 - DNA, 2853 bp, Arabidopsis thaliana
  Clone ID: ARATH-23APR03-CLUSTER14719_1
tcactagtcccccccccccccgaggcctctctttctctttctttcttcctctaataagcggcgcactagtccccccccccccggttcgattccttactaaggctttctcgatttacgttaatctgagtagagattgggtttagtgaatcttgatttccgtggttgtgtttttcgattttgcttctactccacgttcttgttgttgttcccttttagctccagattatgcttttctttttgttttcttctcttcgacgatatctgccaccaactcgagtctcagtttaatgaaatgtttgtggatttttggtaaatagtactaatggatcaataatggctacaagaattgagtttagagatattctgtagcagggctaaagaacatcagagatggcagaaaaggagggtaaagcaagtggcacagacaatgacaatcgggtgaaaacgaaacgttcaagtcatagtcgtcgaaaggaatgtgtcaataagagtttggaacataatgatgagcttgtgaaatatatgtccaagttgccaggttatctccaacgtatagagagaggtgaagaaagcgttcatcaaagtaatgttttgaatgttggagtcttggattgggaaagtctacagagatggaagcatggtcgagcaaaaggcggtgaaatatcaggaagaagtgagagaaaagtgtctactattgctactacttctacttcaggagtagtagttcccaatgactcggctaataggtgtaagattgatgaccaagtgcatacttgttcgaatctcggtaaagttaaagcttcccgggatcttcaatattctctagaacctcagctggcttctagggattcattaaataagcaggaaatagcaacttgtagctataagtcctctggtagagatcacaaaggagtagaaccgaggaagagcagaagaacgcattcaaaccgggaatccactacaggtttatcgtcagaaatgggaaactctgcggggtcacttttccgggataaagagactcagaagagagcaggggagatacatgcaaaggaagcaagagaaagagctaaagaatgtgttgagaagttagatggggatgagaagatcattggcgattcggaagctggtcttacttctgaaaagcaggagttcagcaacatttttctccttcgatcaagaaaacagtcccgaagcactctttccggtgagcctcaaatctcaagggaggttaaccgctctctagacttttccgacggaatcaatagctctttcggattgagatctcaaattcctagttcctgtccactctctttcgacttagagagagattctgaagatatgatgttgcctcttggtactgatctttctggtaaaagaggtgggaaaaggcattcaaagacaacttcaaggatatttgatcgagaatttcctgaagatgaatccagaaaggagagacacccttcaccaagcaagcgatttagttttagttttggtcgtctcagccgaaatttcagcctgaaagatatttcagccggccaacctttgagttcttctgaggataccattatgtctggttctatgagatttgatggttcagtttgtccatctcagtcaagtaacccggagaaccagaacactcattgcagatctcgagttagccctctaaggcggtttcttgaccctttactgaaaccaaaagcctctgaaagtgttcttccatcaaaagcaagatcaagttcttccaatccaaagccaataaccaacagcaacgtaccacttcaagatgaaaagaagcaggatgcatcgagaaccctagctatttttcagctcacaatcagaaatggcatccctttgtttcaatttgtggtcgatgataacagcagcagcagcaggagcattctcggggctacaatgaaaagctcagattcatcgttcaaagatgattctgttcagtactgcacattctactctgttaatgaagtcaaaaagaaaaaaagtggaagctggctaatccatggacacagagagaaacattgcgggttcgtctacaacataatcggtcaaatgcagttgggaaactcaatgagcgtagatatatcagagcagaaatctttgatcacagagtcagttctgtttgacgaatcagagcaagtaaaagggaggaaggaggttgcagctgtagtgatcaagaagaagcctgtcgaaggaagctataccagcttcgaggaaactagtgtgataattccaggcggcgttcacagcttccccgagaaaggagcaccgtcgccattgattagccggtggaggtctggagggttatgcgactgcggtggctgggatgttggatgtaaactacatgtcctctccaacaaaacagtcctccataaattcaaccaaagcttcacacttttcgatcaggaagtgagtgaacaagactcgagtccagctttggcgatgacagagctgaagacagggatctatagggtggagtttggttcgtttgtttcaccgttacaagcgttttttgtgtgtgtgacggtactaacatgtgcttccaaggcaaagaccaccggaaaatcttcttctcctatggctccgccgctatctcccgttggtagagtctaaactcaggacacagatagagagtatctaatgatcgttatctttcttataaattcctaacgttgtatgctcttgtgttgtgtccaaaaagacttaaatcataagagtatacactactattaaagttacactatcaactctacacatatattgatttgcttagagttgaagaaatacataaacaaaaatgttcaaaaataacatttttatataggaaaaaaaaaaaaaaaa

SEQ ID NO: 261 - DNA, 2394 bp, Arabidopsis thaliana
  Clone ID: ARATH-23APR03-CLUSTER14730_1
gagaaaacagtcgaccgtcatttcttcgacggctcgcttctcttatcagctaaccctaagtacgccgactttcaaattcgccactcccgttcatcttttctctgcatcgataagcgaagatggttcaatataatttcaagaggatcacagttgttcccaatgggaaggagttcgttgacatcatcctttcacggactcagcgtcagacaccaactgttgtccacaagggttacaagattaaccgtctccgtcagttctacatgagaaaggttaagtacactcagaccaacttccatgcgaagctctctgcaatcattgacgagtttcctcgccttgaacaaatccatcctttctatggtgatcttcttcatgtgctttacaataaagatcattacaagcttgctttaggccaagtgaacaccgccaggaacttgattagcaaaatctccaaggattatgtgaagctactcaagtatggtgattctttgtaccgctgcaagtgtcttaaggttgctgctcttggtcgtatgtgcactgttttaagcgaatcactcctagtttggcttatctcgagcagatcaggcagcacatggctaggcttccttccatcgatcctaacactcgtactgtcttgatttgtggttaccctaatgttggcaagagttcttttatgaacaaggtcaccagagctgatgttgacgtccagccttatgctttcaccaccaaatccctctttgttggtcatactgattacaagtatctcaggtaccaagtcattgatacccccgggattttggataggccctttgaggaccgcaacatcattgaaatgtgcagtatcactgccttggcccatcttcgagctgctgttttgttctttctcgacatttctggatcatgtggttacactattgctcagcaggctgctcttttccacagcatcaagtccctctttatgaacaaacccttggtcattgtctgcaacaagactgatttgatgcccatggaaaacatctctgaagaagatcggaagctgattgaagagatgaagtctgaagctatgaagactgcaatgggagcaagtgaagaacaagtgcttttgaagatgagcactctgacagacgaaggtgtcatgtctgtgaagaatgccgcatgtgagaggctgttagatcaaagggtagaggccaagatgaaatccaaaaagatcaacgaccacctaaacaggttccatgtggctatcccgaagcctcgtgatagcatagaaaggctcccttgcatacctcaggttgttctggaggctaaagctaaggaagcagctgcaatggagaaacgaaagactgagaaagatttggaagaggagaatggtggagctggagtttattctgctagtctaaagaagaactacatcttgcaacatgatgaatggaaggaagacattatgcctgagattctcgatggtcacaatgtggctgacttcattgatccagacattttgcagaggcttgcagagttggaacgtgaagaagggataagggaggctggggttgaagaagctgatatggagatggatattgaaaagctttcggatgagcagctgaagcagctttctgagattagaaagaagaaagctatactcattaaaaaccacaggctcaagaagaccgttgcacagaaccgatcaactgttccaagaaagtttgataaggacaagaagtacacaacaaagagaatgggtagggagttatcagctatgggacttgatccgtcttctgcaatggaccgtgcaagaagcaagtctagagggaggaagagggatcgatcagaagatgcgggtaatgatgctatggacgttgatgatgagcaacagtcgaacaagaagcagcgtgtgagatcaaagtctagagctatgtcgatatcaagatctcagtcgaggcctcctgcacatgaagttgtgcctggtgaaggattcaaagactctactcagaagttatcggccattaagattagcaataaatctcacaaaaagagagacaagaatgcacgtcgtggtgaagctgacagagttataccaacgcttagaccgaaacatttgttttcaggcaagagagggaaaggaaaaaccgacaggcgttgatgaaaccaaacaagagaaaacagatgctggatccgttgaagaatctctgtcaagttttggaatttgctttacctttaggttactttttatattctgcatcgtttgtgttttttctcagacatttatggattattattattatagctttccagtgtgtttggaggacgaatgctcgtttaagcaaaccttataatggctttttggattttaagataagttggttcttgctagtaattggttatttggtaattttttgagtc

SEQ ID NO: 262 - DNA, 1493 bp, Arabidopsis thaliana
  Clone ID: ARATH-23APR03-CLUSTER147907_1
tttttttttttttttttgttcaaatgcaatcacactatttgaataaattgtggattttgcattggtgggttattttattcatgttatcatacaattgttaactttgatgaatcctcagagattccatgggttgttatgtcttggagggtcaatgttttttagggctttccatacaacactattgcatttaaaccctgacccgaaaccgatttgccaaaccctatctcctcttttcatcttcgccttgtgttctaggtaagccagctcgtaccatatactgctgcttgatgtgttcccgaaacgctccaatgtccgtcttgatgcctccatattctcttctgtcaacttgagatccttatgaatgtcatcaagtactttcttactcgatgctaatacgcatatatgttcaaaggaaggctcaagacgaccaagcgttgcaatgtttgctttcagtgcatggcgcccaacttccattacatctctagatacatatagtccttgtttcccatctctgtcttctcttaactctatgctcttgtaacttgtgtcttccatgcctttatgggttcttactagctgcataagttggtatttggctcgccatctgtcgatacgccgactagatagcataactgcagctgctcccattcgaaagaagcaatttggtggaagcaacgcgacgtcattacctgagtaccaagtgaagcttactatctcagtgctcaccaccaaagcgtaagagccttgatgagcgtttaaaagatctttggctaaatcaatggctatgactccggcgctacaccccataccaccaagattgtagctctctgtgttatgcctcagcttataatggttaatcaccatggccgatagagatggcgtggtgttgaggactccgcagtttagcaccaggatcttgatatgcttcacattgattttggtcgctgcaagaagttcatcaattgctccaaagatcaccattgctgcttcttcacgaccatcacgaagattgaccctgtgaccaggcttgaagaccactctcggcatgtagctctcctctcctatccctgattggtccagcacttttctttgaagctcgatggcagtctcgttgaagttaccagacttcattgccagctcgatgaagtcgctttttgtgatcttgagatgatcgggtgggcggtaacaggagaaatcgagaagaaaaacagaggaaggagtaagataatgatagatgaggaggatgaagaaggtagacaaagggaaagccaagattgggagaaatcgagaaacaaagatgaagagaagaagaagaggaggaaggaagaaacaaaaggtacgtgagagagagagaaggtaaatgtatccaagcttgacatatctcaaattatatccgaggaaatcaggactgcccttaggtgactttgacttaactccaccattcaccatctttgttgcctctttttccattttcactaagcatcaaaaccttt

SEQ ID NO: 263 - DNA, 1334 bp, Arabidopsis thaliana
  Clone ID: ARATH-23APR03-CLUSTER149483_1
cctctgtaagtcaactctctgtttgtctctacatacatccatccatctatctttggatcgtcattttctcgccgttgacttcttttcctctgtaagtcaactctctgtttgtctctacatacatccatccatctatctttggatcgtcattttctctttgtggactaaagtttaagagagaacatgggtgtatttcctggatttggtagctggatcaatcaaaacactcaacagcttcctcacaaggcagagtccgagagatctgagaatgcgaaatttaagtcaaagtcagagacaaacactcatgaggcgagagatgaaatgaaacagcaattaaaactttggagagatacagagaagaaggaacaatggaatgatgctcctcctaatgtgaaggtggaaagaagaaatgatctagaatggggtatgtcaactatagaaatgcaatttacattaggattgcctcctcaagcagcttacaacgttttaactaatccagacaaccaaccatacttcagaatcatcaaaggacgccaacttttggtttcttcttttaacttatcatttcattgattcaaataaaataatgataacaagatttgagagtgtgtcatagttttcttcttatgaaaggaaaacatatcaagaaaagttgtgtcgccggataccgggaaagggcagcttgtggacaccaagaaagctgtggcctggaacttcctttggttatctggaactatcccgataattgcaaattttatcgaacaccgacaagtccttaccgtacaatatacggtaaaaaataagatgttcataaacatgtttgtcagtataaagtggagccgctatacgtagattcagaacgcttgtgcaaacaaaagaagccgaagagtacagaagaatacgaaagatgtagccgcggaccgggaaggattgggtcgaaagtgacattggaccagatgtttaagccttcttttatttttaatctgccaccgatttcttggtacgttcgtcggataaccatcaagaccatgaaaactctgatcgaagatcttcaaattacaagtgccatgatccgaggtatttgaaacgtcccaaatccgctacaaattgatagaacatcaaataaagttataaaatcactttttataaatttaaatagcagaatattacatatgactttagaagtgtatgttcttatggtcactttataacatcaaattaaatgtatagaaaatgtttctaaccaatagttcttaattagacgattatacatagtcaatttgtgtcttttcatattttttaatatcatatattttcaaaaaaaaaaaaaaaaa

SEQ ID NO: 264 - DNA, 1402 bp, Arabidopsis thaliana
  Clone ID: ARATH-23APR03-CLUSTER149535_1
gtaccgggccccccctcgagttttttttttttttttttttaactaaagaacaaacgaattaaactgtgaagtatggtattatgatgctatacaaaacgtttctaataactcactcggtaagaaaatttcgcgaaatttacaaactcaagaggtttcttcttgtctatattattcaagtattggatgggtcgattctgataacgagaggctcttgtagatccggtggtggctctgcgatcgggagtacggaagcgtcgtcattcttcttcccatctaattcagtaccattctcagccaatgctttgtccaaggatgatttcgccactcttgttatgcatattatcagaattacagctagagctacgccaaccatcataattacccaacgaaatactgacacctcatgccatccatgtgtaatatcagaaagatctttcagagtagttccaacatatactagcgcaaatgtaatgggcatcattcccaaccaagtggccagcatgtattcccctaagcgaacaggagttacagataggaggtaattcaacatattgaagggcagtatggggacaacgcgtagcagcaagactatcttgaagccagatttttgaattgcaacggaaacagcttgaaactttgggtaatgctttatttttgaagtgacataagatttaccaatcgttctaccaagcagaaatgccgctgttgcacctaatgtagctccaagagagtcggctacaaatcctactggcaggccaaaaaggtaaccaccacctagcgtgagtacagaagcaggaaccgccacaattgtgagaggaatataagccaaagccaatgcaagtggaccaaaaggtccaagatcttccttaatccataacaagaagtccttcaatttctgttcgaccgggagaaaaatgacggcggagacgatagcaacaagaaggagcaacgagatagcgattcgaaaagtggacggagtaaaggacatggctgccatatacaaggatctgagacgacggcgccaccaaggcctggaatggtcgtcttccgaaccgtcgtagtcatattgatctccatttatacaagctcctggcttaagccacggcctcgcccttaggccctccactttcgccagatttgtctaccctcccaaaacgaaaatctgcctcttcttctcgccgcgtttttcttcaccccgattacggagatatgcttcagacgcgtcgtctctctttcttccgaattgggaagcgaaacatgcgatgacgagagatggatagagagattgcagagatggagaagcttgtgcttcaattcttcgatttcactgtccttcgatcttcagattctgttcgcggggggggggggggggaactaaggggagctctctctcctctctctc

SEQ ID NO: 265 - DNA, 2209 bp, Arabidopsis thaliana
  Clone ID: ARATH-23APR03-CLUSTER149707_1
aatttttttttttttttttgtttttattgttctctttcatatcattatgaaatacaatatctgattctatctaactatacctctatactatacgcattctacagaaagcttaggttcgtcatctgagtgatgagtatccaagccgttaccaaagctatcatcttttctttgagggtgtggatccgcaaacacttcctccctttgggggggttcgcatagaatatccatagcaccagacatagtaagactcctacggagatcagtccgagtcctgcgttcacaatcctcagattacgtactaacggtggacagtaatctgaggtaatactcataaatgtttccctaacaaagttgcaatctcggaagctaagcaatggaggcgtgtaatgctctagagcgtagctctcattcacagctgctaccaactgtccaaaggtatctggcgttactctccccacggtggtgcagattccagatggtgtaacctcgcatttgtaattctcccagaccgatgatgcattttctattgatagttcccaaggcgagcactggcgatcttccatgtttgcatcaaatgggatgcataaaggaggcatcggaggtccagactggttgtaatagcggtcttgacctggagctgggtttgtattggcaacagcatagacaaaggtgtttacaacggtcacgatgctgttgataacaactttactctgtgaaagagtctggtttgttgtttgctgatcaacgcatgggagaatgctgctgagagctgtttctgcgtgaggattatcaacccattccttcattgctacacacgtatcagaaattgcattgtttaggatcagaaagactccacaaagaacaaatgtcacagccacaagtatccacccactcacgacgaatatatgaacaacatgttggtggcggaggacagaaagcaatagacctacaaaagaaaggatgagcatcacagtagcgaccgtgatcaaagctgatcgcacagcatagaaaactctcttaattttagcagcgttatctgttgttgtctctcccagtgttacagctgcagtgttaagattgacatttaacttgtcaatttcacccattacatcagacggaatgacaatctgtgtcacgttaatcgttttcgcaagggacagatattgagtcacattctggaggatctccacagtgtagtctgactggtttacaacatacttaagagtatgcatagcttcggtatgaaacttatcttgtccaacagataaaagaatgcatcccaccgctgcaacacatgtaaacacaatcaacaaaatgaaacagattcttcgtgtatcgaatgatgatcctttagctttatcacatattctccatttgaagcaatgataaacaacaagaagagagccaaaagacaagagccagataacagctagtatgaaaccaggagcacctgtaaatccaacagaagcccaatagtgattattggtgatgttccagccaccatggtaaggcttaaaagctctaagaatgtcaggtctcttggttctatgagctgctaagaggaggtaatcagagacaacatcatcagattcaggtcctggtgctaatgagattccacctttccatgttccaaaattcggtgaacctaatatgagtctgagaggatcctgtgaagcggaaacagatgaatcaacggaatgcggaagagagaagaaagcgagagaaacgaaaacgacgacggagaggataaagaagctcatcttcttcttcttcctcagtcactaggatgctacgtcgacaaaacgagttcgaggcatgagagatagcaaaattcaaatcaggatatgatcagatcggagaagcagccattgttgaagaagatgctccacgaaaacgcaggtgaggaagagagagatttatccccgcgcttacgcttacgcttacgcttacgcttacgcttacgcttacgcttacgcttacgcttacgcttacgcttacgcttatggggctttaagctgaatttggctctctcttcaatgaggaaagtgaaaaggaagaagagtgctttattaggaggcgtcctttactctctcttttgtccttttccacttttcttgttttcacacgcacactactattcaatttgagtaaagatgatttaacaaatgaagatttagttgtataacaacttgtactaattgagtaattg

SEQ ID NO: 266 - DNA, 2259 bp, Arabidopsis thaliana
  Clone ID: ARATH-23APR03-CLUSTER14984_1
attacagagtttctggttttttttggcttgcgtgatctctctcttctcttctctctctcactcatccaaatctttgatcatctcatcatcattggacttgaagctaactccagagttttatccagattcatcattttccaacgtttttcttcaatcgaatcatcagcgagtttggttccgacgacgatcttagtagcttcataagctcaagattcttcaggtttcggtggattttcttgagctcttctaagcttctccattttgtgagcctccgatttcgaacctggtagtgttgtggatctcactggaccacgaagctttcttcactgagctaagcttgaagtcaattcctctgttcgacaatcaatagaggaagatgaattatttcccagacgaggttatagagcacgtgtttgacttcgtagcttctcacaaagacaggaactcgatatctctggtctgcaaatcatggcacaagatcgagaggtttagtaggaaggaagtgttcatcggaaactgctacgcgattaacccggagaggttgatcaggaggtttccatgtctcaaatccttaactttaaaagggaagcctcattttgcagacttcaacttggttcctcatgaatggggaggtttcgtgcatccttggattgaagctttggctagaagccgtgtgggacttgaggagctgaggttgaagcggatggttgtaacagatgaaagcttggaccttctttcacgttcttttgcaaatttcaagtctttggttcttgttagctgtgaagggtttaccactgatggcttagcttccattgccgctaattgcaggcatcttcgtgagctggacttgcaagagaatgagattgatgatcatagaggtcaatggctgaactgttttccagatagctgcactactcttatgtcgttgaatttcgcttgccttaaaggagagaccaatgttgctgctttagaaaggcttgttgctaggtcaccaaacctgaagagcttgaagttaaaccgtgcagtaccgcttgacgcactcgcaaggttaatgagttgtgcgccgcagctagtggacttaggagtagggtcttatgagaatgagccagatcctgaatcttttgcaaaactcatgactgccattaagaaatacacatcgttaaggagcttgtctggctttttagaggttgctccactctgcctcccagcgttctacccaatttgccaaaaccttatctctttgaacctcagctatgcagctgaaatccaaggcaaccacctcattaagcttattcagctttgcaagagacttcaacgattatggatattggatagtattggtgacaaaggacttgcggttgtcgctgccacatgtaaagagttacaagagcttagagtttttccctctgatgtacatggtgaagaagataacaacgcatctgtgactgaggttggactagtcgccatttccgcaggttgccctaaacttcattcgattctgtacttctgcaaacagatgacaaacgcagcgctcatagccgtggccaaaaactgtccaaacttcatccggttcaggctatgcattctcgagccacacaaacctgaccacattacatttcaatcactggacgagggctttggtgcaatcgtacaagcttgcaagggtctaagacggctctctgtctccggtctcttaaccgatcaagtctttctctacatcggtatgtacgcggaacagctcgagatgctttcgatagcttttgcgggggacactgacaaaggaatgctctatgtgttgaatggatgcaaaaaaatgaggaagctggagataagggacagtccttttgggaacgctgcgcttcttgctgacgtgggtaggtacgaaacaatgcgatccctttggatgtcgtcttgtgaagtaacactcggtggctgcaagaggctcgcgcagaattcgccacggcttaacgtagagatcatcaacgagaatgagaataatgggatggaacagaatgaagaagatgaaagagagaaggttgataaactttacctctaccgaacagtggttgggactagaaaagatgcaccaccatatgttaggattctttagtctctttgcaccttcatgtgttttcaaacttttctttgtactagtttttgccttttatcaaacttggaacaaatacaaatgtcgcattttattatcaccgtaattcagccattgaaaacataaatttaggtaaaagaaaccaaatttga

SEQ ID NO: 267 - DNA, 1675 bp, Arabidopsis thaliana
  Clone ID: ARATH-23APR03-CLUSTER15000_1
aacgaggctgtggagaaaagaacaaggtagctaattctcttctttgaatgtagattgaggaagagaaaatcaaaagctatctcttgttgttagagatgcggaatgtagagctcatcttcatccccacaccaaccgttggtcatcttgttccgtttcttgaatttgctaggcgtctcattgagcaagatgataggatccgtatcacaatcctcttgatgaaactacaaggtcagtctcatctagacacttatgttaaatcaattgcctcctctcaaccgtttgttagattcattgatgtccctgagttagaggagaaacctacacttggtagtacacaatctgtggaagcttatgtgtatgatgttattgagagaaatatccctcttgtgaggaatatagtcatggatattttaacttctcttgcattggatggagttaaggtcaagggattagttgttgactttttctgtctccctatgattgacgttgctaaagatataagtctccctttctatgtgttcttgactacaaattccgggttcttagctatgatgcagtatctagcagatcgacatagtagagatacatcggtttttgtaagaaactcggaagaaatgttgtcgatacctggatttgtaaaccctgtcccagccaatgttctgccgtcagctctgtttgttgaagatggttatgatgcttacgttaagctggccatattgtttacaaaggccaatggaatcctagtgaatagctcctttgatattgagccttactctgtgaatcattttcttcaagaacagaattatccttctgtttatgctgttggccccatatttgacttgaaagcccagcctcatccagagcaggacctaacccgtcgtgacgagttgatgaaatggcttgatgatcaacccgaggcatcggttgtattcctttgttttgggagtatggcaaggttaagaggttctctagtgaaggaaatagctcatggacttgagctatgtcaatatagattcctctggtcactccgtaaagaagaggtgacaaaggatgatttgccagaggggttccttgaccgtgtcgatggacgtggaatgatatgtggttggtctcctcaggtagaaatactggcccataaggcagtgggaggctttgtttctcactgtggatggaactcaatagtagagagtttgtggtttggcgtgccaattgtgacatggccaatgtatgcagagcaacaactcaatgcgtttctgatggtgaaggaactgaagctagctgtggagctgaagcttgattacagggtacatagtgatgagatagtaaacgcaaacgagatagagaccgctattcgttatgtaatggacacggataataatgttgtgaggaaacgagtgatggatatctcgcagatgatccagagagctacgaagaatggtggatcttcgtttgccgcaattgagaaattcatatatgacgtgataggaattaagccctagccttttcttgtccaataagctataaccttgttactttgtactaaaacttgtttttgaaagagctacgaatgaattttgctgaaaattgatttttatagccaatgaagcaattcttctgttatggattttgttcaaaattgggtacatctcttattctttaaaaaaaaaaaaaaaaa

SEQ ID NO: 268 - DNA, 1233 bp, Arabidopsis thaliana
  Clone ID: ARATH-23APR03-CLUSTER15001_1
aaaatatttgcagaggaagagagagagagagagagagatcatgggaatatatggagtgatgacagggaaaaaaggaaagagtgggtttggatctgcttctactgctgaagatgttactcaagccattgatgccagtcatctcacttcatgggaatatatggagtgatgacagggaaaaaaggaaagagtgggtttggatctgcttctactgctgaagatgttactcaagccattgatgccagtcatctcactgccatcatcacaggtggaacaagtgggattggattggaggcagctagagtgttagcaatgagaggagctcatgtcatcattgccgcaagaaacccaaaagctgctaatgagtctaaagagatgattcttcagatgaaccctaatgctcgcgtcgactatctccagatcgatgtctcttccatcaaatcagtcagatccttcgttgatcagtttcttgcccttaatgttcctctcaacattctcataaacaatgcaggtgttatgttttgtcctttcaagctcaccgaagatgggattgaatcacaattcgcaacaaaccacattggtcattttctgttgacgaatctgcttctggacaaaatgaaaagtaccgcaagagaaagtggagtccaaggaaggattgtgaatctgtcatctattgctcatacttatacttactctgaaggtatcaagttccaaggcatcaatgaccctgctggatattcggagagaagggcttatggacagtccaaactctcaaacttgttgcactccaatgcactctctcgtagactacaggaagaaggtgtgaacatcactataaattcggtgcaccctggtcttgtcaccactaatctctttcgctactccggttttagcatgaaggtcttcagggctatgactttcctcttttggaaaaatatacctcagggagcagcaacaacatgctacgttgcacttcatccagatctcgaaggcgtcaccggaaagtatttcggcgactgtaacatcgttgctccgagcaaatttgctaccaacaattctctcgccgataaactttgggatttcagtgtctttctcatcgattctatctctaaataatctatcatcatcaagacaaattcttagacattcaaaatttatttatccttcttgatattgttacattaatgccatatctttttcaccaccacatatttctttatggaataccataattta

SEQ ID NO: 269 - DNA, 1949 bp, Arabidopsis thaliana
  Clone ID: ARATH-23APR03-CLUSTER15005_1
atcaaggtgtgcctgccttcttctcagctcttctctttctacttcatttcccttggttccatggccatgcccctaacgcttcgattactttaattccaacccttggttccatggccatgcccgtaacgcttcgattactttaattccaatatttccgatcttttcgtcttcgagtttctattgagcgtcgtcaaaccctaattttgacttccgggtggataatcccaaatccgtttcgtagctcgatttcactgataaatttcccagctttcggtgttttgattcgcatgaggatttgaattggcatggattgaataaaaagatatgtcgatggagagatcgttagaagctttgggaagaggttctacgatatgggcaagacttagctgatagacttgctcagggatttaccggtttgattcatataaacccaccttcgtttccatggccgccgaatcaccatcatcttcacaaggcgaaactgttctcacccaaccaatcaacggaacaattcagtgtcattagggattctaggtttagggtcaagctggtgttgactttggtgctgggttgaatgtgatggtccaacagttcttcaggaggttgcctataccgttcttacacgaggataataacaagcttgttgtctctgtggatggtgataagagtacaaggagccatagagcttatgtgatcacaaaaggggatttgggaatggctacagaacggttgagggactcagggttttctaagacagatgatactgcttctgttactatgtctgaggaggaagttgcagattcctatcttagagctgctggattgcttggaagatcaaagggaacaattgatacgtcatcaagttatgacagtaggacaaatggtatggaacattcattggcagccagaggagatctctggagggtagaagcttcacattcgagttctactgcaagcgatggaaattcgtctctctttcttctccaacttggaccacttctctttctacgcgattcaactcttcttttaccgttacacttatcaaaacagcacttgctctggtatggatatgataggaagaaaggtatgcattcactctgtccagctatatggtcaaagcatcggaggtggcttatgatgtcaatgctctctctcaatcctttagcttgctcatttatggatttgcaatttccaaacgggcaattgacatatgtatctggcgaaggactgacgacaagtgcttttgtgcctttttgtggtggtcttcttcaagcacagggtcaatatccaggcgacatgagatttagttactcttgtaagaataaatgtggaacccgaatcacaccaatggtacattggcctgataaatcatttgggttggatctttctcaacccttggcttggcgtagatccggactactgatgaaaccgacaattcaagtcagtgtatgtcccacattcggtggaagcaatcccgggattaaggcagaagttattcactcgttgagcgatgacttgaatctgatatgtggctacgcactcaatgcacatccttcagcatttgcctctgtagcttttggtcggtcgaaatggaatggaaacattggacgcacgggaatagttgttagagctgatactccacttgcaagtattggccagccttctttctctatccagcttaataacgctttcgagttctgaatctttccaatataacataggagaaaaaaaactctgtccatttagtcgtcatgtacatatatatgtttgaacagactgcttttatccctcggtcacttttgtatatggtagtttactcaattaacccacaagacagtttctgtaattccagcaaatattttcctattaacccacaagacagtctctgtaattccagcaaatattttcaccacgtaaagattacagtttcactaaaaaaaaaaaaaaaa

SEQ ID NO: 270 - DNA, 1878 bp, Arabidopsis thaliana
  unsure (1)..(1878): unsure at all n locations
  Clone ID: ARATH-23APR03-CLUSTER15015_1
gagttttatttttgttttctctttccatttcttgccaaaaccctaatttcaccttcacttaagaaatttctcccccaacttaaaccacccccttagaaaaaataaacaaaaaaaattagatctttcttgtttgcttataatatgtatgttttaggtcgaattttctgaaattaagattcattcctccatggaagaagctctgtttttattctctttagcttagcttagcttctactgatctgtttttgctacaaaatcccatctttttctttaaaactctttatctctgaatcttgagtttcttgtagaagaagaagcaattttgaatctttcgtaatcataaagattcgtggaggatctctactgatttgtcggaatctctcactacagaatcacttgatcttatgtccggatggaggagagagaaggaaccaacatcaacaacaacatcactagcagtttcggcttgaagcagcaacatgaagctgctgcttctgatggtggttactcaatggacccaccaccaagacccgaaaaccctaacccgtttttagtcccacccactactgtccccgcggccgccaccgtagcagcagctgttactgagaatgcggctactccgtttagcttaacaatgccgacggagaacacttcagctgagcagctgaaaaagaagagaggtaggccgagaaagtataatcccgatgggactcttgtcgtgactttatcgccgatgccaatctcgtcctctgttccgttgacgtcggagtttcctccaaggaaacgaggaagaggacgtggcaagtctaatcgatggctcaagaagtctcaaatgttccaattcgatagaagtcctgttgataccaatttggcaggtgtaggaactgctgattttgttggtgccaactttacacctcatgtactgatcgtcaacgccggagaggatgtgacgatgaagataatgacattctctcaacaaggatctcgtgctatctgcatcctttcagctaatggtcccatctccaatgttacgcttcgtcaatctatgacatccggtggtactctaacttatgagggtcgttttgagattctctctttgacgggttcgtttatgcaaaatgactctggaggaactcgaagtagagctggtggtatgagtgtttgccttgcaggaccagatggtcgtgtctttggtggaggactcgctggtctctttcttgctgctggtcctgtccaggtaatggtagggacttttatagctggtcaagagcagtcacagctggagctagcaaaagaaagacggctaagatttggggctcaaccatcttctatctcctttaacatatccgcagaagaacggaaggcgagattcgagaggcttaacaagtctgttgctattcctgcaccaaccacttcatacacgcatgtaaacacaacaaatgcggttcacagttactatacaaactcggttaaccatgtcaaggatcccttctcgtctatcccagtaggaggaggaggaggtggagaggtaggagaagaagagggtgaagaagatgatgatgaattagaaggtgaagacgaagaattcggaggcgatagccaatctgacaacgagattccgagctgatgatgatcatacggtttcttttcgcggatttgttaggtttgatggatttcagattttggttgattgtttttattaacacagaatgtttagaagctgctatctttaggttcccatcctcttgtgattgttgtagtatccttgttagaaacaaacttactgttgcaaaactctccttcaagaaagttttcactttgctttaccaaaccaagcccnnnnnnnnnnnnnnnnnnnnnnnnnnnnnnnnnnnnnnn

SEQ ID NO: 271 - DNA, 1677 bp, Arabidopsis thaliana
  Clone ID: ARATH-23APR03-CLUSTER15016_1
gggataaaacagaaacctaatcccttaaacctcgccggcgacggaaaatggctttcgcgtctccttcgctccgtcttcttcctcagtctccgttaggtcgaataacatctaaactacaccgtttcagtactgcgaaactctcactcttctcctttcaccatgattcttcatcttctttggctgtcagaactccggtatcttccttcgtcgtcggcgctatctccggaaaatcctctaccggaacgaaatcgaaatccaaaaccaaacggaaaccacctcctcctccgccagtcactactgtggctgaagagcaacacattgctgagtcagagacagtcaacattgccgaagatgtcactcaattgattggaagcacaccaatggtctatctcaatagagtcacagatggttgtttggctgacattgctgccaagctcgaatcaatggagccctgtagaagcgtcaaagataggatcggtctgagcatgatcaacgaggcagaaaacagcggagctataactccgaggaagactgtattagtagaaccaacaaccggaaacactggccttgggattgcatttgtggctgcagctaaaggctacaagcttatagtgacaatgccagcttctatcaatattgaaaggaggatgcttttacgtgcactaggagcagagattgtgctaacgaatccagagaagggtctcaaaggagcagtggataaagccaaagagattgttctcaagacaaagaacgcatatatgtttcagcaattcgacaatacagcaaatacaaagatccactttgaaactacaggaccagaaatctgggaagatacaatgggtaatgtcgatatattcgttgccggaataggaactggtggtactgtaactggtactggaggtttcttgaaaatgatgaacaaggatattaaggtagttggcgttgaaccatcagaaagaagtgtgatttctggagacaaccctggttacttaccgggaatcttggatgttaaattacttgatgaagtgtttaaggttagcaacggggaagcgattgagatggcgaggagactagctttagaggaaggattgctggttgggatttcatctggagctgctgcagtagcagcagtcagcttggctaaaagagcagagaatgccggtaaactaatcacggttctgtttccaagccatggcgagcggtatatcacaacggctctgtttagttccatcaacagagaagtccaagagatgagatattagtagcagccattagaaaagcccccaaagtttggtccttttggagagtgtaaacaacaaatctctttgcaatacagaaaagagaggtttcagaagactgtgaggttagagctcacacgagaactgagagataaacatgtctcgagcccaaccagttttattcaaagatttgtgaatgtatagaagatcatagaccttgttgcattattcttcttcttctcactcatatgtcagggaagtatgctgaacaaataaaagtttgatcatctaaaccctgaaattgatttgagatctccaagattggaaaaactcaccgagagcaagcatgtatgtacattatatggtggttagaacgcaaaactttttgcccaaaaaaaaaaaaaaaaaaaaaaaaaaaaaaaaaaaaaaaaaaaaaaaa

SEQ ID NO: 272 - DNA, 1464 bp, Arabidopsis thaliana
  Clone ID: ARATH-23APR03-CLUSTER15021_1
gaaatcctgttttcaatccccaattcgaaatcctagctgaagtctatgctccataatcaaatccagttcatcagagatcaaagatggctattgcacgaactggagtttatgttgatgattaccttgagtatgcaagcactttccctgcagagctacaaagattactaaacacagttcgcgaactagacgagagatctcaatcgcttataaatcagacaagacagcaaactaagtattgcttagggcttgcttcacagagttctaaaaagggtaatggtaatcattacaataatggtggtcttgatgaagaggaaacgattgagaaaatgcgtaaagagattgagtctagtcaggaaaatgcgttaagtttgtgtaccgagaaggttttattggcccgacaagcgtatgatcttatagatagtcatgtaaaacgacttgatgaagatctgaataattttgcagaagatttaaagcaagagggaaaaattccaccagacgagccctctgtccttcctccactacctatagtacgtaaaacggcaaaccgtaaggcctgctattgcacatcgcaactggaatcgttacagggatgaggaagagactcgtcccccgggaagcaatctgaaagcccttctcccaacagaaaggaatcgaaaagatcctaagccaatagcagaccatccattcgatccaatgtacttaactgactgtgtcgcctgtgaggtgtcctttggagacatgatttgctgtgataatgagtacgtgggcctggtctcccagcatcttactatttattttttaatgtatagctgctaagatgaaaccttttgttactgtttcaccagtaccaaggaggcgaatggtttcactatacatgcgttggcctcacacctgagaccagattcaaagggaaatggtactgccccacctgcagactcctcccacagtcacactaatatcatttgtacctgtgagaaggtattgctttactatcatcagaactaagctctcctcctgcaatttccatgcattctgtagctaatataatacgtatggagatttgcacgtacttatgatattaattctcataggtgccactggcatcttctttggcaccttcccttcatgaccaatgccaccaaactcatctttcttgttacccaacatctagcaagtgcaagtagaagcaaactttagatggagaaatcatcatgttttgtaaacctcgggttaattcgtggagcatatattttgtatatcaattgtatttgggtattggtgggcattttccgttttattctactagtatcgatatttacatctgcttctttctttcttttttcccctcaaaccatgagcctttgtattgatcaaatgacatgtacaaaggttttgttcatcagaaggaatttcactaaaataaaaaattgcttgataaaaaaaaaaaaaaaaaagggcggccgc

SEQ ID NO: 273 - DNA, 2314 bp, Arabidopsis thaliana
  Clone ID: ARATH-23APR03-CLUSTER15034_1
gatcatcatcatctccaaactcctaaaaccctaacaagaacccttatctctctcatttcctctgaaaggaatcatttttccactcagaaaatctcaaacatttcaaccatgtcgatttctaaagccgcctttttaaaccaccttcaaacactatcaagatcctaccgccaccgtgttccgccgcagccatttctcgccgtccgatacatgtcattcgcgactcaggaagaagccgccgctgaacgtcgccgtcgtaagcgtcgtcttcgtatggagccaccggttaattcattcaacagatctcagcaacaacaatctcaaatccctcgaccaattcaaaaccctaatatcccgaaattacctgaatctgtctctgctctcgttgggaaacgtctcgatcttcataatcatatcctgaaattgatccgagagaatgatttagaagaagctgctctgtacactcgtcactctgtgtattcgaattgccgtcccacgattttcactgtgaatactgttttagcggcgcagcttcgacaagctaagtatggagcgcttctgcaattgcatggattcattaatcaagctggtattgcacctaatatcatcacatacaatttgatattccaggcttatcttgatgtaaggaaacctgaaattgcgttggagcattacaagttgtttatagataatgctccattgaatccttctattgctacttttaggattttagttaagggtttagttagtaatgacaatcttgagaaagcaatggagattaaagaggatatggctgttaaaggttttgtggtggatcctgttgtttatagttatctaatgatggggtgtgtgaagaattctgatgctgatggtgtgttaaagctttatcaggagttaaaggagaagcttggtgggtttgttgatgatggtgtggtttatgggcaattgatgaaggggtatttcatgaaggagatggagaaagaggctatggagtgttatgaggaagctgttggagagaattcaaaggttaggatgagtgctatggcttataattatgtgctggaggctttgagtgagaatgggaagtttgatgaggctttgaagttgtttgatgcggtgaaaaaggaacataatccaccgaggcatttggctgtaaatttgggaacttttaatgtgatggttaatgggtactgtgctggaggaaagtttgaggaagctatggaggtttttaggcaaatgggtgattttaagtgtagtcctgatactttatcgttcaacaatctgatgaatcagctgtgtgacaacgagttgttggctgaggctgagaagctttatggtgaaatggaagagaaaaatgtgaagcctgatgagtacacatatggtttgttaatggatacttgtttcaaggaaggtaagatagatgaaggagctgcgtattacaaaacaatggttgagtctaatctaagaccaaatttggctgtgtataaccgtttgcaagatcagttgatcaaagctgggaaactcgacgatgcaaaatctttcttcgatatgatggtgagcaaactcaagatggacgatgaggcttacaaattcatcatgagggcgttaagtgaagctggtagactcgacgagatgctcaagattgtggatgagatgctggatgatgacacggtaagagtgagtgaggaactgcaagagtttgtgaaagaagaactgaggaaaggaggaagagagggagatctggagaaactaatggaagagaaagagagattgaaagcagaggcaaaggcgaaagagttagcagatgcagaagagaagaagaaggctcaaagtattaacatagctgcattaattcctccaaaagcagtggaagaaaagaaagaaaccgcaaaactgctttgggaaaacgaagctggtggtgttgaagaagccgatgtggtggagatggctaaaggagtagaagcaggtggatccaatggtcaggatccaccgtcctgctgatcttatttttttccttgaattcattagactctagttatcttcttatcattcaacttttatgtaattagggatttgtttgggacaataagctatgattaatcttttgctataatgcaggtgtttgcaaaatcttttttccatgtttgcttttgatttcaaattaacatgctatgtagaacatttgttttagtggatggtctatgtaatcatttctttattactcaatttagtgcattaaaaaaaaaaaacctcgcgcgggggccggcccccccccccgccctatagtgagtcgtatacatttcactggccgtcgttt

SEQ ID NO: 274 - DNA, 1640 bp, Arabidopsis thaliana
  Clone ID: ARATH-23APR03-CLUSTER15048_1
gagagagatggccggacttctagcttgggctgccgatgtcgtcggtaaaaatggaaaagaaggagacgatgagaaggatcggatcccattggttttcacggaggagcagcagaaatacgtcgatgagcttggccgaaaagcgacaaacctcagccgttcgatccaagatctgcggctcagattgcctccaccggatatctcccagcgtctacctgaccttcatgctcactcccttgcgtccaatgccgctctcactcttcagcttgattcgcactccgctactcgtgaacaggcacacatgagagagcagacactgctggaagaaaatagtgcatatgagaatgcaatatcaacctgtgagacaaaaatagaagagaagaggaatgaagcagattctcttcttagaaagttgaaggagctagaagctgtagaggaaaacttgaaaactgagcaggataatgcacaagcttctctagatgcaaggcagtccaaaagctctagtgaaactgttattcagcctgatgggaatggaaaagatggagcagatacagaggccatgaagtcctttatgctagagaagttggagagcaaaaagaacgatatgagtttaatggaagaaaaagttcaggatttagagaggagttgggctgttatacaggaaagagcactgaagcagccttctccagctcagagagagaagacactggataaacaacttcatagcctaatcgagcaattagctgcaaagcaggcacaagcagaggggattgttggtgagattcatctaaatgagatggagttagagagactaaacaatttatggagaagatatgaaagctttaacgttgaagggaacgctgcgaggaacagattcaagagaacaaattcagatagagaatttacatcagaccacgaagttgatggtcattcctaccttccatattcatctgctacaagaaatgggacccaaacaaggcttatgtatctcaggtcagcttttgtcgtctacattttggctttgcaagtcctggttttcatcagaatttccttttgagaagttgtgtacacgagtagtctgttctgcttttagtttgcgcaagggagtcaaaatactgcatataaaaatttataggaatacaataattgttgtcaaatggttttctgtccttccatatggatatatggcaattgaatactgagactcctacatgaatctttctttacaatttttcttgatattagatatatgtctccactactcattcttgagggatgctttctagttatctgtcttcatcttttgtagcaatatatcattcagagtatcgataggtccaggcaggcaccaatgaatacagtcatttcttaaagtcacatttggattctgtagatgtccatatctcccaggatgcccatctggtcgcaatagcattgcctgtgtcgtgtccattaacttcagtctcaaaccactcttcttcatcccatcttcttctgcagctctaaattcctccctttgaatgtcgtgaaccttgagatctgcctcgggtatagtctcgtttcttctgtaaggttgtgtccgtacacagtcccctccttcgttccaagccccaccttcgaaatgttgaggagaaaaactcctt

SEQ ID NO: 275 - DNA, 1363 bp, Arabidopsis thaliana
  Clone ID: ARATH-23APR03-CLUSTER15057_1
aaaaatcaagaaatatggccacaagagcttctacatctagcagagtctctccagctttcactttcctcgtcatcttcttcctcttatctctcactgcttcagtagaagctgctggtcgtggagttaacaatgacaagaaaggcggcggattaggagcttctttcatattcggagattctctagtcgatgccggaaataataattatctatcgacgttgtctagggctaatatgaagcctaatggtattgatttcaaagcctccggaggaactcctaccggctcggttccccaatggaccggagcagcggtgatagggttggagaggaactcggagacctccgactaccagacgaccttcttggaaccaggttcttggggcaacgcttgagtaagggaaaagcttttttagccggagtgagctatgcatccttaatgggaaggggaaggaggtaatcatagaatgccaccgggagaatctttgtgaatagattacgtatcggatgtacaagttgatttcttgaacactacacggaaacagtttgatgatcaacttggaaaagagaaagcaaaagattacatagccaagaaatcgatattctcaatcactataggagcaaatgatttcctcaacaattatctattcccactactctcggtagcatacatgatttccatattccttaggtccaacgcatcagagagagaaacgaaagtccctgaaaggtcggagacaaagaaagaggtataatctcccgctttaatgcttttagctctgttaatcaaaagtttgaaacacttgaactggtgtcgaagatatggtttataaaggataaaatcatttcagaattgtattagagagttcattagaggacctaaactagaaactctccagagcaatatttgtccatgcaaacgtctacgatctcgtcatggagctcattactaactacgataaatacgggttcaaaagtgcgacaaaggcttgttgcggtaatggaggacaatacgcgggtataattccgtgcggaccgacttcgagtttgtgtgaagagagggataaatatgtgttttgggatccttatcatccgagtgaagcagcaaatgtcatcatcgcgaagcaattgttatatggtgatgttaaagttatatctccagttaatctcagcaaacttagagatatgtgatttgattgtttgttgaactaaattaaatgtcccttggaggtatttatatacataatttgttatacgccaagttaagattactctttcactctttgtatatgtatgtgtgttggtcgtgtttgattttagtgagaatgcttttgttttgtcaagatgtgataaaattcgattccctctt

SEQ ID NO: 276 - DNA, 2504 bp, Arabidopsis thaliana
  Clone ID: ARATH-23APR03-CLUSTER15069_1
gtcttcttcgccgtagaatttgaagttcctccgtcgtagaagatcgtctcttgtttcacctactccgatatagcccctctctgaattctccatcctccgagcagagaaggctgttggtagaaagttatattctcaaattttctaattttgcctcctccttggcgaagcaattgcgtcaattccttgcacgccactattacgactacgaaaatctagatcggagagaagactaaattatcttcactgatcgcacggtgagatggctaacggagccgatgaggatgctgtcctcagcgatgtcgagtccgatgaaccagcgcctgttgttttaaaggattcgccgcgggaagaagcatcggatgagaggataacggagctaatagcggagcttgatcgagagaagaaagctcgagaagcggctgagagttcgaaatcggagcttcaggtttcgttcaatcggttaaaagctcttgctgtagaggcaatcaagaagcgcgacgagtctaagcgagaacgtgatgaagcattgaaggagaaggagaatctaacaaatgagcttgagaatgttaataaaggtaaggatgagatgtcgaagaaacttgatgaggctttgagatctagagatggtttaaaagcagagattgagaattcctcgcatatgttggtttctgggattgagaagatatctggtaaagttagcagctttaagaatttttcaaatggtggtcttcccaagtctcagaaatatacaggtttgacttctgtagcttatggagttattaagcgtactaagaaaatcgtggacgggattggtaggcagattgatacgactgcaaagtcgaggaatgaagctagggagcagatggaccaacggaattatgagatagctattgaggtttctcagttggaatctgcgatcagtaatttaagattagaggttgcggaaaaggcttcgattgttgatgatttagagaggggtgtgagtgagaaagagaagaggattgctgaacttgagaaaggtaatttagagaaggtcagtttgctggaaggtgaagttgtggagctgaaacagttggttgatgagtatgatgggaagttgaagactatggaactgaagatggtagctcaacgtcctttgttgatggatcagcttaatcttgtgtcaaggatccatgaccagctttacgaggttgtaaggatagttgacgggaatagttcagaacagtcagatttgtctgagtctttctttatgcctcaagagacagagatggaggagaacattcgagcttctttagcaggtatggaatccatcttcgaactgaccaaagtggtttctgggaaagcacagagtttggtggaagagaagagccatgaactgaagaatttgaatgaaactgtgggtctattagttaaggaaaaagaacatattggtactttactgaggagcgctttgtccaaaagggtgataggagagcagccatctcaaaaaagagaattgtttcaagctgcagagaatggtttgagggatggtggtactgattctaaatttgctaaactcttaaaggatgggaaggttcaggactctcgtagtgataatactcatgaccatagtaaagaagacaatgaaatatactccctggccagcacattggagaatattgtcaaggcatctcagctcgagatcgtcgaactgcagcacttgttggaagcatcaagggaagagactagttctcttagaaaacaattggacactcagacaaaggagcttaaccagagaatgcgccaaatagaagaacttaaagaaaaggagaggatagcaaacgaaaacgttgaagggcttatgactgacattgctgctgctgaagaagaaataacaagatggaaagtagcagccgagcaggaggctgctgctggtggagctgttgaacaagacttcacgtcacagctgtatgtgctaaaagaagaacttgaagaggcaaagcaagcaataatagaatcagaaaagaaactaaagtttaaggaagagacggcagcagcagcaatgggtgcaagggatgcagcagagagatctctgagactcgcagacaatagggcgactaagttgagggaaagaatccaagaactaaaccgtaaagttgaagaattagaaacccatcgagatatgaatacttcaaacagagctagatatgcgtgttggccatggcaacttctcgggattgattttgtgggaagtcgaagaattgagtcgggacaagaaagtgcgaacgagatggaactcgctgaacctctactatgagaaaaaccggtactgtataccaaaaccatactctctgtatttgtttttgatttttatgtatataccacctgaaaaatgtttttaaaagctttaacacgttctcatgttgtaatgtttgagttaaagaagtttaatttggaggcttggcgaaaagtaaaatgtttcccacacccaaacagtgatcaataaaatataaaacttccccttc

SEQ ID NO: 277 - DNA, 1772 bp, Arabidopsis thaliana
  Clone ID: ARATH-23APR03-CLUSTER15072_1
gtgccatacgtgtaaagagttaactttactctctctctgactcataatggcctcattctctcttccccactccgccacctactttccttcccactctgaaacctcacttaaacctcactccgccgcttccttcaccgtccgttgcacctccgcctctcccgccgttcctccacagactccacagaaaccccgtcgttcacccgatgagaacattcgagacgaagctcgtcgccgtcctcatcaactccaaaacctctccgcacgttacgtccctttcaacgctccaccttcttcaacagaatcctactccctcgacgagatcgtctaccgttcacaatccggtgctctcctcgacgtccagcatgatttcgccgccttgaaacgctacgacggagaattctggcgtaaccttttcgattctcgcgtcggtaaaacaaattggccgtacggatcaggcgtgtggtcgaagaaagagtgggtactccccgagatcgacgatgacgacatcgtctctgcttttgaaggaaactcaaatctcttctgggctgagagatttggtaaacagtatctgcaaatgaacgatctatgcgtccgcggacgcgtgggcagccacactggctcctttaaagatctgggcatgagtgttctcgtttctcaggtgaatcgtctccggaaaatgaacaaaccagtcatcggagttggttgcgcttctactggagatacctccgctgctctctctgcttactgtgcttccgctggaatcccctcgattgtcttcttacctgcggataaaatctccatggctcagcttgtgcagccgattgcaaacggagcgtttgtgcttagtattgacactgattttgacggatgtatgcatttgatcagagaagttacggcggagcttcctatttacttggcgaactctctcaacagcctccgtctcgaaggtcaaaagacggcggcgattgagattctgcagcagtttaattggcaagttcctgattgggtcattgttcctggaggcaatcttggtaacatctatgcgttttacaaagggtttcatatgtgtaaagagttaggtcttgttgatcgtatccctaggcttgtttgtgctcaagctgctaatgcaaatccactttacttgcattacaaatctgggtttaaagaagatttcaatccattgaaagcaaacactacatttgcttctgctattcagattggtgaccctgtttcgattgatagagctgtgtatgcgttgaagaaatctaatgggattgttgaggaagctacagaggaagagttgatggatgcaacagctcttgctgattctactggtatgtttatatgtccacatactggtgttgcattgacggcgttgatgaagctgagaaagtcaggagttattggagcgaatgatcggactgtggtggtgagtacagctcatggattgaagtttacacaaagtaagattgattatcattctaagaacataaaggagatggcttgtagattggcgaatccaccagtgaaggttaaggcaaagtttggttcagttatggatgttctcaaggagtatttgaagagcaatgataaataagctttgtgtgtttgtttcttctaaagctcttcacgtcctatgatgatattgttggctttgttattagaggaagtaatgaaatttcgtttctttggacttgtggaataaaacgactggttggttccataaaaaaaaaaaaaaaattcatctcgagcggcggcccggttcccaatcg

SEQ ID NO: 278 - DNA, 1385 bp, Arabidopsis thaliana
  Clone ID: ARATH-23APR03-CLUSTER15073_1
gaatcgttatctttctcttctttccttaaaccaaaacccaaaaaagagagaccagacaaaaaaaaaaaaaactccccaacaaaaaaaagatatctgtctctactaaaagtctctctatagcgatgtcatcggacaacgaatcgacaccgtctcaagcgacggtagaaatgatggcgacttcgccggcgaagattaaagagtatccagaaccattggctttacatgaagttgtcgtcaaggattcttctgtcttctgggatactctcaggcggtttcactcaattatgtccactaagttcatgattcctgtgattggaggaaaagaactagatttgcatgttttgtatgtggaagtcacgaggaggggaggttacgaaaaggtagtcgtagagaaaaaatggagggaagttggaggagtgtttagattctctgcgacaacaacaagtgcttcgtttgtcttaaggaaacattatctcaatcttctcttccattacgaacaagttcatctcttcactgctcgtggtcctcttcttcatcccatagctacatttcatgcaaatccctcaacgagcaaagaaatggcgctcgtcgaatatactcctccgagtataagatatcataatactcatcctccttctcaaggttcgtcgagtttcacagccataggtacaatagaaggcaaattcgattgtggttatctggtaaaagttaagttgggctcagagattcttaacggcgttctttatcattcggcccagcccggcccatcatcatctccaaccgctgttctaaacaatgccgttgtaccttatgttgaaactgggaggagacggcgtcgtttaggtaaaagacgaagaagcagacgcagagaagatccgaattacccgaaaccgaaccggagcggttacaatttcttctttgctgagaaacattgcaagctcaaatcactttatcccaacaaggagagagagtttacgaaacttatcggagaatcgtggagcaatctctctaccgaagaacgaatggtttatcaagacattggattgaaggataaggaaaggtatcagagggagttgaatgagtacagagaaacgttgagacttagggatggtgacatgacaaacggcaaggctttttaggtgatttagttaaaacggcaagtcgttttgttgtaggtcgtttctctcttttaagattggacgcctcgccgtttcttttattttctagcttattgtagttgtccatgcttgcttaactaggctcagtgagaggctagacttgccaaacttgaagagtctttatttatttaagaattttagatgttctaatgtattaatcctttttcgtaaacctttcctgttaaacaagaggtttatgttgcatgc

SEQ ID NO: 279 - DNA, 3953 bp, Arabidopsis thaliana
  Clone ID: ARATH-23APR03-CLUSTER15103_1
gaccttctctctatttctctctctctctctctctctctatctctaacttctgcggtggtgatctagaaaatgggagatgggactgagtttgtggttgggtcagatagggaagataagaagcttgctgaggatagaattagtgatgagcaagtagtgaagaatgagttggtgagatctgatgaagtaagggatgataacgaggacgaggtttttgaggaagcgattggttcagagaatgatgagcaggaggaggaggaggatccaaaacgtgaattgtttgaatctgatgatttgcctttagtggaaactcttaaaagttctatggttgagcatgaagtggaggattttgaagaggcagtgggtgatttggatgaaacgagtagcaatgaagggggtgttaaagattttacggctgttggagagagccatggtgcgggagaggctgaatttgatgttttggctactaaaatgaatggtgataagggggaaggaggtggaggtggttcttatgataaagttgaatcgagcttggatgttgttgataccactgagaatgctacatcaactaatactaatggttccaatttagcagctgagcatgtgggtattgaaaacggaaagactcattcttttttgggaaatggaatcgcctctcctaaaaataaagaagtggtggctgaagttatccctaaagatgatgggattgaggaaccatggaatgatggcattgaagtcgataattgggaggaaagagttgatggcatacagacagaacaagaggttgaggaaggtgaaggaacaactgaaaatcaatttgagaaacggacagaagaagaggttgtagaaggtgaaggaacaagtaagaatctatttgagaaacagacagaacaagatgttgtggaaggtgaaggaacaagtaaggatctatttgagaatggttcagtatgtatggacagtgagtccgaggcagaaagaaatggtgagactggtgccgcctacacaagtaatatcgttactaatgcttcaggtgacaatgaagtatcaagtgctgtgacttcatctccattggaggaatctagttccggggaaaagggagagactgaaggggacagtacttgtttaaaaccagagcaacacttggcttcttcgccgcactcatatcctgagtcaactgaagttcacagcaatagtggctcccctggggtaactagtagagaacacaaaccagttcaaagtgctaatggaggacatgatgttcagagtcctcaaccaaataaggagcttgagaagcagcaaagcagcagagtacatgtagatccagagattacagaaaattcacatgtggaaacagaacctgaggtagtaagttctgtttcaccaacagagtctagaagtaatcctgcggcattaccacctgctcgtccagcaggtcttggtcgtgcttctcctcttttggaacctgcatcacgtgctcctcaacagtctcgcgtcaatgggaatgggtctcacaatcagtttcagcaagctgaagactctaccactacagaggctgatgagcatgatgagacccgcgagaagctccagttgatcagggtaaaatttttgaggcttgcacatagactagggcaaaccccgcataatgttgttgttgctcaggttttatacaggcttggattggctgagcagttgaggggcagaaatggaagccgtgttggtgcttttagttttgatcgcgccagtgccatggcagaacagcttgaggctgctggacaggatccacttgatttttcttgtacgattatggttctcggaaaaagtggggttggtaaaagtgcaacgatcaattctatatttgatgaagtgaaattttgtactgatgcattccagatggggacaaagagggttcaagatgttgagggtttggttcagggaattaaggtacgggtgattgacactcccggtctcttaccttcctggtctgatcaagccaagaatgagaagatcctgaattctgttaaggctttcatcaagaagaatccacctgacattgtactatatcttgataggttggatatgcaaagcagagattctggtgacatgcctctcctgcgcaccataagtgatgtttttggtccttcgatatggtttaatgccattgtgggtttgactcatgccgcttctgttccaccagatggcccaaatggcactgcttctagctatgatatgtttgttacacaacgttctcatgtcatccagcaggccattcgccaagcagctggagatatgaggctcatgaaccctgtttctttagttgagaatcactcagcttgcaggactaatcgggcaggccagagagtattaccgaatggccaagtgtggaagccacatttgttgctactctcatttgcatctaagattctagcagaagcaaatgctcttttgaagttgcaagataatattccagggagaccatttgcagctcggtccaaggctccgccattaccatttctcctttcatcgcttctgcaatcaagaccacaacctaagcttcctgaacagcagtatggtgatgaagaagatgaagatgatttagaagaatcatcagattcagacgaagaatcagagtatgatcagcttcctccgtttaagagtttgactaaagctcagatggctacgcttagtaaatctcagaagaagcagtatctcgatgaaatggagtaccgagagaaacttttaatgaagaagcaaatgaaagaggaaagaaagagacgtaagatgtttaagaaatttgctgcagagattaaagatttgcctgatgggtatagtgaaaatgtggaagaggagagtggtggacctgcatcagttccagttcctatgccagatttatctctacctgcgtcttttgactctgataaccctactcaccgctaccggtaccttgattcctccaatcagtggcttgttaggccagtcctggaaactcatgggtgggatcatgatattggttatgaaggtgtgaatgcagaacggctctttgttgtaaaagaaaaaataccaatatctgtctcaggtcaagtgacaaaagacaagaaggatgcaaatgtgcagctagaaatggccagctcggttaaacatggagagggtaaatcaacttccctaggtttcgacatgcaaactgttggaaaggaattggcttatactcttcgaagcgaaacgagatttaacaatttcaggagaaacaaggctgcagctggtctttctgtaacacacttgggtgattcggtttctgcggggttgaaagtcgaagataagtttattgctagtaaatggttcagaatcgtaatgtctggtggagctatgactagtcggggagattttgcttatggtggtactttggaagctcagttgagagataaagattatccgcttggtcggtttttgactactcttggactttctgtaatggattggcacggtgatcttgctattggagggaacatacagtctcaggttcccattggacgttcctctaatttaattgctcgtgctaatctgaacaatagaggagcagggcaagtaagtgttcgtgttaacagctccgagcagctccaacttgctatggttgcgattgttcctctcttcaagaagctacttagttattattacccgcaaacgtaatatggacaatgattaagaaacatttaggctgatttcacttccatccctttgcactggagtattaggaatcgattagtcacaagaacatgttagagtgagttgaaaaggatctgtctggtagcaagagaccaattgttggaggaaagtttgtgtcttgaaatagccagaacataacacgttccttgtctgatatataatagctcagtggtttgtttttcttctatttctaagaccttgtgatctcccttatgaatgaagcatatctacttttgtcc

SEQ ID NO: 280 - DNA, 2287 bp, Arabidopsis thaliana
  Clone ID: ARATH-23APR03-CLUSTER15112_1
gaaacatgcctaactcgattctctttcttcttctttcattcctgtatctcacaaactgcgttgctcaatctccatcacaaacttgtcctttagatttctctcatgtcctaacaatcccatggaacacaacagattgtcaaaagtccgacaaatcagccgatagcaagaacagttgttgccaatctcttttaactctaatcggaatccctctagctcatcgtctcaaacaaacttccaatttccgtctcccaaatctcgctacttcaatctcttgtctcaacaatctccaaacgaagcttagttcactctctctatcttcgaatctcacctctctctgtttcgatccgaatcagttcgtcatcaataacgaaacctgtgctggaatccaaacgactcaagattgggtatctcgtctcggtccatctacggcgcttgactccgcctgtagcagtggtctcactgatctaacgcgatgcgacgcttgcgtggcggctgggtttagggttcaaaaacagctcatcactttggacggtaatagctctcacggtgtttattgttaccattttgtggttacttacgctgctggtattgttaacaagaaaggacctgagagtgatgatgctttgtcttgtctcttctctttgagtttgagatctccattgaactcaaagaagaaaagacacacggtggctcttgctttagggataaccggagctattttcggggctctggttattgccggtttgatttgtttgtatttccggtttggtaaagctgttaaaggaggagaggttggttgggaggatcaagggtctagaccgaaatggagaccaaacactggctctatctggttcaaaatcgaggaactagagaaagctacgaataacttctcgcagaagaatttcatcggtcgaggcgggtttggttttgtttacaaaggggttttaccagatggatcggttatcgcggttaagaaggtgatagagtctgagtttcaaggggatgcagagtttcgtaatgaggttgagatcattagcaatttgaaacataggaatcttgttccgcttagaggttgtagtatggtggatgatgatagtgagagtcagagatatcttgtttatgattacatgtctaatggaaatctcgatgatcacttgtttcctcgaggtgagactacgaagatgccattgagctggcctcagagaaagagcatcattttggatgtggctaaagggttggcttatttgcattacggtgtgaaacccgctatttatcaccgggatattaaaggtacgaacatattgttagatgtcgatatgagagcgagagttgcggatttcggtttagctaaacagagtagagaaggagagtctcatctcactaccagagttgcgggaacacacggttacttggctccagagtatgccctctatggtcaattaaccgagaaaagcgatgtgtatagcttcggggttgttatattggagatcatgtgtggaaggaaagctcttgatctgtctacttctggatcaccaaacacttttctgatcacagattgggcttggtcattggtaaaagcagggaaaacagaggaagctcttgagcagtctttgttgagagaggaaggctcagggctctcgaatccgaaagggataatggagagattcttgcaagttgggatattgtgtgcccatgtattggttgttttaaggccaacaatattagatgcattgaaaatgcttgaaggagacatcgaggttcctcctattccggaccgaccagtcccgctcgcgcatccttcgtaccgtatggacggaaacggattcacaatatcgcctgcgcttagcggactacaaatacattccggagatatgctcagatgaaaaaactaggctcatgtgagattttattttgtaaatatttgaaagcaacgatcacgtcttttgattacatcatgtaaaacaatttcagaatgttgtagtatatcataagtagggaaaacatatagttcattgtaggattatattctaaatcaaagtagaggcgaaggctgagatgcgggggtgagggcggtagctggtggaagccttccggtacaagtgcaaaagttattaaggcactcacatttggtgcagtggttcacagtcctgcaccatcttgacactaatggtcctctcgcctcagccaccatgtaaaattctgcaaccattcaaatttgtgtttatttttgtccgttgcaaaatttatatgtatataaataagaagaaattacatatttttttttttt

SEQ ID NO: 281 - DNA, 786 bp, Arabidopsis thaliana
  Clone ID: ARATH-23APR03-CLUSTER151408_1
tttttttttttttttttggaagttattagtactattatttggatttcatagtacatatagatcagttataacctttagttgaaataaaaacgttaccgaacatggtctgattaatttccaacaaatgaaaacctagctgataaagacgtgaaataaatatagtagatcatcagaagaagagtgttgccacgacagccgatgcaaagctaagtccaccgaagttgatggccggggctgagcttgttggcttggccgtcgaaggagctgcatttccggttgatccgcttcctgttccggtactggtggaagatgccggaggagttttcggggttgccggcggtgttgaagacgaattagtaccggcgctggttttgcatagtgacacgtcagctttggcgccacaagccttggggagatcgagagcgttttctttagtgaggttaagcgatttgagcatatcaacgttgttaaagacagcgcagagacacgtggcgtctttggctacgatctcattcaacggcatgcaacacgtcgccggcggcggagtcgccaagtgaagatacggctgacacggcatcagtttctgaatacacggcagtgagtgtgcgtctcctcctgcaccgccgctcggtggtgaagtcatctgagcattagacgacgtaacgtagcaaaatacaagaacgacggcgacggcgaatctaacagcctccatttcaaaacgttaaatatctctttgtattatgttctttctatctttagttggttgtgaagatgtacgatacggta

SEQ ID NO: 282 - DNA, 720 bp, Arabidopsis thaliana
  Clone ID: ARATH-23APR03-CLUSTER151488_1
gtttgaaatttttttttttttttttattttctagtcaagaacgataaatatttctgttatcgaaaataagaaatttaaaacactcctatacaattctctaacattacagaaaaaaaaaacagagaataggagctctctgtttgaccggacgcaaatccaaaccgggtaaaatcaagaagaagaccacgttgagactgagtttgatctcgacagaggaaaagaagagttcaagaactcaatgcaatcttcaatagcttctgctcgatgagactctgtctcgtttacagactttgacctcttcatataaatagctgacgaagaagaagacgacgacgacgaaggcaacaaaaacgatgacgtttttcttctatcagtagtatttcttctgaaggaaataaaacgcagcgttttggcgaatcttgctccaatacgttggatcaatttcctcgcggccggcgagctccttagaccaaaactgagaattccgacgagaaccacccttctccggctgtgatgtgacgagcttaaaccgtcgtgttttgggaatatgggttcgtctgtggcttctgggttcgggttaaagcttactcttttgcatgctcttcgtgacatattttttgttgtctgaaattgcggtgaagagagagagagagacagggcgaggagaaacagagagagagagaggggttgagagaagaccaaatagcaaatactaaagag

SEQ ID NO: 283 - DNA, 1700 bp, Arabidopsis thaliana
  Clone ID: ARATH-23APR03-CLUSTER15167_1
actgttaacggtcggaatctaaaaaatgtctcctaactactccttcttcttcttcatcttcttcctcacttcacactcttctgttttctccagaatcttaccagagacctccacaaccactacctcaattctcaatgtcgctgactccatccacagaaccaagtatacgtcgtcgtttcggttaaaccagcaagaagaacagactcactctgcttcttcttctttcagcttgcagcttcattcacgagtttccgtccgaggaactgaacactcagactataagtcactcacactagccagactcaaccgtgacacagcccgagtcaaatctctcataacccgtttagatctagccatcaacaacatatccaaagcagatctcaaacccatcagcacaatgtacaccactgaggaacaagatatcgaagctcctttaatctccggcacgactcaaggaagtggcgagtacttcacacgcgtcggtatcggaaaaccggcgcgtgaagtttatatggttctagatactggaagtgacgtgaactggctacaatgtactccttgcgctgactgttaccaccaaaccgaaccaatcttcgagccatcgtcgtcttcttcttacgagcctctctcttgtgacactccacagtgcaatgcccttgaagtctcagaatgtagaaacgccacgtgtctttacgaggtttcttacggtgatggttcttacaccgttggagatttcgccaccgagactctcacaatcggctcaactctagttcaaaacgtcgccgttggttgtggacacagcaacgaagggttgttcgtcggcgccgccggtttacttggactcggcggtggtttgttagctcttccgtcgcagctcaacacgacgtcgttctcgtactgtctcgttgaccgtgactcagactcggcttcgaccgtggatttcgggacttctctttctcctgacgccgtcgtggctccgttgctacgtaaccaccagctcgacacgttttactacctaggcctcaccggaataagcgtcggcggcgagttgcttcagattcctcagtcttctttcgagatggacgagtcaggcagcggtgggatcatcatcgactcaggaaccgccgtgactcgtctccagaccgaaatctataactcgcttagagactcgttcgtgaaaggaacgtcggacttggaaaaagcagccggggtggcgatgtttgacacgtgttataacctttcggctaagacgacggtagaagtcccgaccgtggcttttcatttccccggcgggaagatgttggctttgccggcgaagaactacatgattccggttgactcggtggggacattttgtttggcatttgcaccgacggcgagttcactagcgattatcggaaacgtgcagcaacaagggacacgtgtcactttcgatttggcaaattctctcattggattctcgtctaataaatgctaagctgttttcatcaaaaaaaacaaaaatgctaagctgttttttctataaatatatttgagttacaatgaaaaggaaaagtcacttaaaagatagtaatgttaagttagagtactgtactactgtttggttgtgtttgtttcttgtacttgttgttgcaatgcatagagtgaaaaagagtaaaaaaaagatggaatttgtttttgctcaaaaaaaaaaaaaaaaa

SEQ ID NO: 284 - DNA, 999 bp, Arabidopsis thaliana
  Clone ID: ARATH-23APR03-CLUSTER15193_1
agaatggaaatacactccgatgactacttcttccttcctcctccctgcttctcctccctcagccgcctttctccggcggcgcttcttccgccactcctggctttcctctaagatccaccaccgtcttccccaagttatgaatgattccacgaggactgaagtatccattgataaatcagaagtagacaagcttgttgacaagattgattttggggaattatgcaacgattttgagtgcacaagtagtccgcaggtggaatccacagctagacaacttgttcgcgacattcttgaaatcagagaaggaaatcgtgcctttgcatgctatgcagtttccgttaaatataaggatccggttagaagttttacaggtcgtgagaagtacaaaagaccaatgtggataactagtggattagagaatcctaccgtgacggtacaagagatggtaatgttatcgaccagcgtcttgcgaattaaatggacagtgaaaggaaaaccaaaatctattcttgctgctgtaagtggagatttgatagtaaaagtcaaatctgaatttactcttaaccagattagtgggcaagtgtttgagcatgaagagtcttgggacttatcttcatcatcccctattgctcaagcctatttctggacatcccgccgcctctttgctgcttctgaatccgcaaaagatgtcgccgatgtcacaaaagacttgaccgccaatttgacaactcgaaaagaggacacagatatatatcgcgatccaaccgatccaaataagtttttccaaagagacaacagctttgagagagatgtgtatcaaattgcactgtttctagccattgtctattttgttgtacagttcttgaagaacacaatctagttaccttctctcccatcctctataacagatatgtaaatgcctatatattgttgtatatgatctgtaaaaaaaaactgaacaagaaaagagatgtgtttgtttgtgttggaagaaagact

SEQ ID NO: 285 - DNA, 1522 bp, Arabidopsis thaliana
  Clone ID: ARATH-23APR03-CLUSTER15199_1
gaatcaaaacaaaactcaatgagccagtcaagattcttacttggatctgctctctcaaacccgccgtctctagcaattggatctgctctctcaaatccgccggctctagccgtcgcgtattcttattcttacctcgtccacgtctgcctcgtccgccgtcgacctggaaacccccaaaacccgggtttgcctcgtcggaagtagaccaggaccatacacggcggcgaactatgcatcaagagcgtcgcttacgccggttctcttccaacgacggatggctaacgacatcgctcccggcggtcaattaactacaacaaccgacgtcgaaaacttccctgggttccctgaaggtattctcggtattgatatcgttgagaaattcagaaaacaatcggagagatttggaactacgatcttcacggaaactgttaacaaagttgatttctcatcgaaaccgtttaagctattcactgattcgagaactgttctcgctgattctgtaatcatttctactggagctgttgctaaacgtcttagcttcactggatctggtgaaggtaatggtggtttttggaatcgtggtatctccgcttgtgctgtttgcgacggagctgctccgatttttaggaataagcctcttgtggttattggtggtggtgattcagctatggaggaagcgaattttctgactaagtatggatctaaggtttatattattcataggagggatacgtttagggcgtctaagattatgcagcagagagctttgtctaaccctaagattgaagtgatttggaactctgccgtggttgaggcgtatggtgatgaaaatggacgtgttcttggaggattgaaggtgaagaatgttgttactggggatgtttcagatctgaaggtgtctggattgttctttgctattggtcatgagccagctacgaagtttttggatgggcagcttggagcttgatgaagatggttatgttgtgaccaagccaggtactactaagacgagcgtggttggtgtatttgctgctggagatgttcaagacaagaagtatagacaggccatcactgctgcaggaactgggtgcatggcggcattggatgcagagcattacttacaagagattggatctcaggagggtaagagtgattgaagaagctgtaggagaaggatccatgataaaatcactctctctccaccttatttgctttgccatttttataaccaataaaggatcagattgatctcatacagacaaatctgaatagaattttgttatttgcatttgtttgcagttggattttgtgccaagttgtaaactctttagttgtcacagcttccaccaaattcatcttttaagatttgttcctcaggtgagaggactttttcatatgagaattagattattacttaacattgcatatattcagagaacatgatttatccaataatgttttatgtagttcttataaattagtataatataaaaatgggtttccataaaaaaaaaaaaaaaaa

SEQ ID NO: 286 - DNA, 1919 bp, Arabidopsis thaliana
  Clone ID: ARATH-23APR03-CLUSTER15231_1
gatccacaagacagttctttaacaaagtcattaaacatttcccttaccttctaaagatcaactctttcaaacacttactctgcatgtaacttcatagattgaacgaagaaccaaaaaaacagagcaaaacaaacaaaagatggttcaaaaccaccaaacagttctcgccgtcgatatgccacaaaccggcggctccaagtacttggacgacgacgggaaaaacaaaagaactgggagtgtttggacggcgagtgcacacataataacggcagtgataggttcgggagttttgtcactagcgtgggctacggcgcagctaggttggctcgccggaccggtggtgatgttgctcttctctgccgtcacttatttcacttcttctcttcttgctgcttgttaccgctccggcgaccctatctccggcaagaggaactacacttatatggatgctgtccgatcaaatctcggtggcgtgaaggtgacgctatgtgggattgttcagtatcttaatatctttggtgttgctattggctacacaattgcttcagctataagcatgatggcaataaagagatcaaactgtttccacaagagtggagggaaagatccatgtcacatgaacagtaatccttacatgatagcttttggattagtccagattctattctctcagattccagattttgatcaactttggtggctctcaatcctcgccgccgttatgtccttcacttattcctcagccggtctcgccctcggcatagcccaagttgtcgttaatgggaaggtgaagggaagtctcactgggattagcataggagcagtaacagagacacagaagatatggaggacctttcaagctcttggagacattgcttttgcttactcttactccattatcctcatcgagattcaggacacagtgaagtcaccaccatcagaagagaagacgatgaagaaggcaacacttgtgagcgtcagtgtaacgactatgttctatatgttgtgtggatgtatgggatatgcagcctttggagacttgtctccgggaaatctcttaaccggtttcgggttttataatccttattggcttcttgacattgcaaatgcagccattgtgattcaccttattggtgcataccaagtctattgccaacctctgtttgctttcatcgagaagcaagcttccattcaattccctgatagtgagttcattgcaaaagatatcaaaattccaattcctggtttcaagcctctccgcttgaatgtcttcaggttgatatggaggacagtgtttgtgatcataacgacagttatctcaatgcttcttccgtttttcaacgacgttgtgggtctgctcggggcactagggttttggccattgacggtgtattttccagtggaaatgtacatcgcgcagaagaagatacctagatggagcaccagatgggtttgccttcaagtcttcagcttagggtgtctagtagttagcattgctgcagctgcagggtccatagctggagtacttcttgatctaaagtcctacaagccatttcgaagcgaatactgatcaacttgaatagtagccaattcaaagcgatgactaagtcagttttaaacacaatggatttatcaagaacagtcaagagaaccaagaaccatgaatttgggaattttgatcagcttttttttatatagatagaagcaataatgctgttagttcttctctataatcttctctgtaccctgaaggcaagaattgtagtcctaatgagtaaatcttcgattaatggcagagtcatgtgctacaacagaatcatgaactagcaccataatagtatattaccattgtggtaaaatttcaataacaagttcttgtacttaaaaaaaaaaaaaaaaaaaaaaaaaaaaaaaaaaaa

SEQ ID NO: 287 - DNA, 1423 bp, Arabidopsis thaliana
  unsure (1)..(1423): unsure at all n locations
  Clone ID: ARATH-23APR03-CLUSTER15246_1
aaccatgtcttcatatcaactaagcaaattccttgatagaaacaaaatggaagacaataaaagaaaagtattagatgaagaagcgaaagcttctctagacatatggaagtatgtctttgggtttgcagatatagcagctgcaaagtgtgccattgatcttaaaataccagaagccattgaaaaccatccttcttcacagcccgtaacactagccgaactctcctccgccgtctccgcctctccctcgcatctccgccgtataatgaggtttcttgtacaccaaggaatctttaaagaaatccccacaaaagatggtttagctacaggctacgttaatacgccactctctcgccgtttgatgatcacaagacgtgatggaaaatcgctggctccttttgttctcttcgaaacaactcccgagatgctcgctccatggttgagacttagctcagtcgtttcttcgccggtcaacggttcaactccaccaccgtttgatgcagtgcacggtaaggacgtgtggtcgttcgcgcaggataatcccttcctcagcgatatgatcaatgaggccatggcttgtgatgcaaggcgcgtggtgccacgtgtagccggagcttgtcacggcttgtttgatggcgtgactacgatggttgacgtaggaggtggtacgggagagacgatggggatgcttgtgaaggagtttccttggatcaaaggatttaactttgatcttcctcatgtcattgaagttgctgaagtcttggacggtgttgagaatgttgagggcgatatgtttgattctattccggcttgcgacgccattttcatcaagtgggtgttacacgattggggagacaaagattgcataaagatattgaagaattgcaaagaagcggtccctccaaatatcggaaaagtgttgatagtggaatcggtgatcggagagaataaaaagacgatgatagtggacgaacgagatgaaaagttagagcacgtgagattgatgcttgatatggtgatgatggctcacacaagcacaggcaaagaacggactttgaaagaatgggactttgttcttaaagaagctggctttgctcgatatgaggttagggacattgatgatgttcagagtcttataatcgcgtatcggtcttaagaggaggacatgaaagatatatctttcctttgaggaaaactcaataaattagtgattgttgatttggtgtttttatacagaacgacgtgtgggtgaataattgtgttgtgtgataataagtaaggcttgtttcagtatcagcagagttgttttttatttgtatttttcacatttttttatcattaatttccttgtgaatggcaactcaaaataaactttttaattgttaataaaaaaaaaaaaaaaaaaaaaaaaaaaaaaaaaaaaaan

SEQ ID NO: 288 - DNA, 1335 bp, Arabidopsis thaliana
  Clone ID: ARATH-23APR03-CLUSTER15254_1
tctttttactgtttccccaaaaattcttttgaaaatcgaatcgacaaattccttccgccgtcggaatgtcaattcccgatcccaactcctccgcatctctaacggtgtctccgtctctatccaccgcatcggaaactccggtaacaccagtaaacactgttagaccaccgccgtctcagccacctcctgctccgccgccactaccgccgccgacttacagacccatagctccgcttcgccaccctaatccgttccaacaacaatctgcttatagtaataacctctacgcacattcgattccggtcagacgccaaattcaagatccgtcagctgttctttacccgtttgctctaccgggtcgagggttttcagcccgacctgttcgaggattcgtcgcagatccttccgtgacggctggtaatctgagtgggtaccctcctcgcccgagttttacttacgatcctggaccatatgagcagcgtcaaatggaatccttgttgcagcagtttataagggagagaaatcctcagattcgtccattaccacgccttggattgggttctcctgttgggttgggtcccattagagcaagtcctcaatttctgcaaccgcgggttgccccgcccccaacttcaattctagacactagcaggaatagaaaggccagaagcaaggatggggctcttgccgttgttagagggagaaaggtccgaatcactgaggggtcttcttctctttattcacttggtcgatcgtggttgaaaaatggtgctcacgttggaattcagccgcaaaggagtggtataatgaaacctttgccaaaaccgttacctgtggatttaacaacagagacaagtgtaccagatgatccagatgaagaatcagcggatgaagacaaagaggacgaggaagctgtaaagcaattatctgagaaggatcttttgaaaagacacatcgagcgagctaagaaagtccgtgcacaattacgagaagaacggtcgaggaggatcaggaggtacaaagaaagaataactcttattctggcacaatccgaagaccgatgatgcttgaagaacgactaaaaaagggtaaagttttgttaggaattagcttcatatgactgttgttgatttagcatactagtaccacgtaacaacatacgtgtagtaatagtataggtgtgttcttcttcgtcttctatagattagtaggactactcaatgaatagtgtttcattcttcctaaaactaaagaggaagataaaattgtttccttaaagtcagcttttactaatttgacaataaaaatttcttctctcaaaaaaaaaaaaaaaaa

SEQ ID NO: 289 - DNA, 1441 bp, Arabidopsis thaliana
  Clone ID: ARATH-23APR03-CLUSTER15270_1
aaaaaaaaaaagagttgccatggaagctcttattgcttccacttccttcttcgtccccatctccaactcttcctcctcacacattatcaataacagattcttcccttcattttattctcccaacttaaatttcgggacttttcggaaaacttccttgtcatcatcacacctcgtcttctcatcttctgcaatttccgcaccgccttcttctactgttcttactcgaaacagctattggatggtgttattggataaacctccgcattgggtttcttccaaatcagccatggtagattattatgtcgagattcttgcgaaagtactgggaaacgaaaaagatgcgcaagtgagtatatatgatgcttcctttgatacccatttcgggttttgttgtcatatcgacgaagatgcttcacgacagctcgctagtttacctggagtagtgtctattagacctgaacaggattacagttcagagaagaagaattatggcattggtagccataaaggtgtttcattgtttgatcatgggacagtaaaacattggatggtacgaatagataagccaggagttgggattgttactaaagcacagatggttgatcattgtgttcaattgctatccaaggttttgtggaatgagaaggatgcacagatgtgtctttatcatgtttcctggcagtctgatttcggattttgttgtgatctcgatgaaagaagtgctgtggagttagctggcgtacctggtgttcttgctgttgttcctgataacagtttcgagtcactaaacaaagactatgaaggcgatagtacgcaagattcaagagatcaagatgattcagagtctcctcccgtaaagacaaagaagctgtttataactggactgtctttctacacatctgagaagacattacgtgcagcatttgaagggtttggtgaactagtggaagtcaaaataattatggacaaaatatcgaagagatcaaagggctatgcctttctagagtacacgacagaggaagccgcaggcactgcactaaaagagatgaatggaaagattatcaacgggtggatgatagtagtagatgtagccaagaccaaaccgttcaggcaaaacagaagtcaaccaagtttcgggctctagaatctgagtgttagggtgatacaaccatggggatttaagatgcttcaggcgaagaaagataaggcaagtagtatcatttttcatactagatcaaatataaatttcacactatgtgacagctctgcaaaaaaaattcacatgtacatatctatatttgagtttacaagatttcggccgaatgaaaggcctactgatacaagtattatatagttgtcaccttggggcttgggcgattaacacgcttaacgagtaaataaactactactatttattttttcagaaaaaaaaaaaaaaaaa

SEQ ID NO: 290 - DNA, 1857 bp, Arabidopsis thaliana
  Clone ID: ARATH-23APR03-CLUSTER15278_1
gattattcaaaaaccaatcacaaataacaaaacgaaaatgaagttttggtcacgaccattaacgtttcttataattattatctatctcataattcaacaagtcaactcatcaccaccgtcattatctataccggagcattttctccgatgcctcgacactcaaccatccgaccacggcagtcccaactcaagaaccgccgtgatcccaacaaactcatctttctcaacaaacctaatgaacggcgtcagaaacctccggttcgcttctgtctccacaagaaaaccagaagttatcgtcgccgccgtcaccgaaactcacataagagcaacaatctcttgcctgcaaacatccctaaacctcgaggaagtagtaatgttttgatgcctggacaacgcaggcatctccaacaattctccggtacctttcgtaatcttagacatgtacaacttcaacaaaatcgatatcaacatgaaagacgaaaccgtttggatccaatccggagcttcactaggtcagctttactagtaacatgaattacaacgccggggtataatgcgacgtatgaaggagctaagatttatggggatagttatttcaaagggaattatttgagattggttaagattaaagcccggttcgaccggactaattttttccggtctcagcaagggattccggttcttgcttagtttggtgattggtgagtgtagctatgggagaagacgtgttttgggctattcgcggcggaggcggcggaagctacggagtcattcttgcctggaagataaaactcgttagggttccggagaaagtcacagtttttaaactagaaagaacggtgagagaaggagccgttgatttagttcataaatggcaacaagtagctccggttatcgacagagatttgtttatccggttagagattaaaccaataaaccggaaaatctcaaaaggtaagacgattaaagtctccttcatcggaatgtttcttggtttacctgagagacttttaaacataacgaaacagagtttccctgagctacatttaacgaaagaagattgtatggtcaagaaatggatcgaatctagtgttttctgggcgaattatccagaaaaagcaccgatagagttacttctcaaaagagtatcaaccaacgaatactactggaaacgtacttcagattttgttcaagcaccaatctcaaaacagggtcttgcaaagatttttcaaacaatgattgatcattcgccacttccacgacgagtttggatgcaatggaatccatggggagggaaaatggctgagatagcgtctgatgcgacggcgtttgtgcatagaggtggtaatgttttcatgattgagcatttcatgaattggtatagacctggagatgagcttgaagagaagttcttggcgattgcaagaagttttaaagaagctatggctccgtttgtttccaagaatccgagagaagctttctttaattatagagatgtcgatatcggaattactacgccggggtataatgcgacgtatgaaggagctaaggtttatggggatagttatttcaaagggaattatttgagattggttaagattaaagcccggttcgaccggactaattttttccggtctcagcaagggattccggttcttgcttagtttggtgattggtgagtgtttgaattgattgtattgttgtgtgggaaggagtatactattaagttattaaaagttgaaatttgggatcatatccaatgaatctattgggtatatatgttccttagttgttctggcatgggcagttgataattttgtgttaaataatggtttacttcccaaaaaaccccaaaaa

SEQ ID NO: 291 - DNA, 3376 bp, Arabidopsis thaliana
  Clone ID: ARATH-23APR03-CLUSTER15321_1
tgagtcacaacactttgatggctcttataaagtacttgctgaagaggactttggtgattcccagaagaagaacccagaaatcgatcgaagatatggttcacaacgcttatgattcgtttcagcttctcaaagattgtcccgctaggatcgatgctgttgaatcctacggctccaagctcttcgctggatgttatgacggttctctccgcatttactctccaccggaatcttctgcctccgatccgtcggagctgcatcaagagacttacgtgctagagaagacggtagctggattctctaagaaaccgattgtggcgatggaggttttggcttcgagagagttgcttttgtctctctctgagtcaattgcgtttcatggacttgctaatttggagactcttgctgtgcttacgaaagctaaaggtgctaatgcttattcttcggatgatccgcagatatttaggcctgagttgatcatcgaatatctcaagcctctctgcaggactgatccaatgcttgtcttggagtattctatgcttgtcctgcaaagctgtccaactcaaaccatcgagcttgtttttgtctggaaatatctcagctgaccttgtcaattcgtatctgaagcagcatgctccatatatgcagggtagatatttagaacttaggatggcaatgaatgacaccgcagtttctggaaatctccaaaacgagatggtacaaatctatctttcagaagtgcttgacttgtatgctgcaaagagtgcgcagcagaaatgggatgagaaggatcatcctcctgaaaggaaaaaactattgtctgcgttagagagcatctccggatatagtccgcagcctttgttgaagcgtcttccacgtgatgctctctatgaagagcgtgcagttatattgggcaaaatgaaccaacatgagcttgctttgtccatctatgttcataagcttcatgcacctgatctggcgctggcttactgtgatcgtatatatgagtctgttacttatctaccatctggaaaaccgtcaagcaatatctacctcacagtgctgcaaatatacctgaatcctaagaaaagcgcaaaagactttgcaaaacgaattgtagctctaggatcattcgaaagttcagacaccacaaaaatgatggactctgttttatcttcaaaagctaaaggaggccgatccaagaaaattgttgcaatagaaggcgctgaggatatgcgagttggtctcagtagcagcactgacagtggaagaagcgatgttgatactgaagagcccttggaaggggagactccaccgttatgatctctgaagttcttgatctgttgagccaaaggtgggagaggatcaacggtgcacaagccctcaagcttttgcctagtgaaactaaactccatgtaaatgttttgaatctgacttatacttatcccataactacttactagcattttattgaagctcccctattctatttgttggtaaaacttacggggcaaatgattcatctaagtctaagaagtccagcaagggacgtggtatgatccctcttaattcaggtgcaagagagatggcagcaatccttgatacagctcttctccaagcacttctacacactggccagtctggagctgctatagagttattaaagggtgtcaactacagtgacgttaagatttgtgaggagattctcatgaaaagtaaaaattattctgcactattagaactgttcaagagcaattcgatgcaccatgaagcccttaagcttcttaaccagctggcggatgagtctaaaacaaaccagtcacaaactgatgttacacagatatttagtcctgagttgatcatcgaatatctcaagcctctctgcaggactgatccaatgcttgtcttggagtattctatgcttgtcctggaaagctgtccaactcaaaccatcgacttgtttttgtctggaaatatctcagctgaccttgtcaattcgtatctgaagcagcatgctccaaatatgcagggtagatatttagaacttatgatggcaatgaatgacaccgcagtttctggaaatctccaaaacgagatggtacaaatctatctttcagaagtgcttgacttgtatgctgcaaagagtgcgcagcagaaatgggatgagaaggatcatcctcctgaaaggaaaaaactattgtctgcgttagagagcatctccggatatagtccgcagcctttgttgaagcgtcttccacgtgatgctctctatgaagagcgtgcagttatattgggcaaaatgaaccaacatgagcttgctttgtccatctatgttcataagcttcatgcacctgatctggcgctggcttactgtgatcgtatatatgagtctgttacttatctaccatctggaaaaccgtcaagcaatatctacctcacagtgctgcaaatatacctgaatcctaagaaaagcgcaaaagactttgcaaaacgaattgtagctctaggatcattcgaaagttcagacaccacaaaaatgatggactctgttttatcttcaaaagctaaaggaggccgatccaagaaaattgttgcaatagaaggcgctgaggatatgcgagttggtctcagtagcagcactgacagtggaagaagcgatgttgatactgaagaacccttggaagaaggagactccaccgttatgatctctgaagttcttgatctgttgagccaaaggtgggagaggatcaacggtgcacaagccctcaagcttttgcctagagaaactaaactccataacctgcttccgtttcttgcaccccttctaagaaattcaagtgaagctcacagaaacttttcagtcatcaagagtttgaggcagagtgaaaacttacaggtgaaagaggaactatacaaacataggaaaggagtagcgcaagtaacaagcgaaagcatgtgctcattgtgcaacaagaagatagggacaagcgtatttgctgtttatcccaacgggaaaacgttagttcactttgtatgcttcagagattctcaaggcatgaaagctgtttctaagacaacacatggaagaagacgatgaggtaatcatcaattactgtaacaaagagaggtttaagacactaaaccatcttttcttttttacaaaactcccaaagtgcaattaaagaaaaagctcctttcgtgttgtttgtctgtttatagagagagatttggagctacttttttggtgttttcttctgtggttttttgtgtttggttcaaaatgatggtcttgactcttgacaaaaccagtttggctcttgttgtaaaatctgttagtttatataaagacttttcattaaggaaggggagggggagggtg

SEQ ID NO: 292 - DNA, 1362 bp, Arabidopsis thaliana
  Clone ID: ARATH-23APR03-CLUSTER15337_1
aaaagtgtttcactaggagccctcgtacttcctcgaagtgtaccggagaatctaaacccaatgtcgaaatccggcgataatcaaccagttgatagatacctccgccgtcaaatcctcggagaaggaacatacggtgtcgtttacaaagccaccgacacaaagactgggaaaactgtagcagtgaagaagataagattaggaaaccaaaaggaaggagtaaatttcacagctttaagagaaatcaagctactaaaagagctgaatcatccacatatcgttgaactcattgatgctttccctcacgatggaagtttgcatctagtttttgagtatatgcaaacagatttagaagcagtgattcgtgatcgtaatatctttttatctcctggtgatattaagtcttatatgttgatgactttgaagggtttagcttattgtcataagaaatgggttcttcacagggatatgaagccgaataatttgttgattggagagaatggtttgttgaagttggctgattttggtttggcgaggttgtttgggagtccgaatcggaggtttactcatcaggtatttgctacatggtacagagcgcctgagttactgtttgggagtcgacagtatggagcaggagttgatgtttgggctgcaggctgtatttttgctgagttactacttcgtagaccatttcttccgggttctactgagattgatcaacttggaaagatctttcaagcgtttggtactccagtaccttcccaatggtctgacatgatctatctcccagactacatggaattctcctatacacccgctccaccattacgtaccattttccctatggcaagtgatgacgctttggatcttctagcaaaaatgttcatctacgacccacgtcaaaggatcacaatacaacaagctttagaccacaggtatttctcgtcttctccatcaccaactgagccagggaagcttcagattccagcttccaaaggagacgcactcgaaccaaaggcctccgagcaaaaccaacatggaaatagcccagcggtactgtctcctcctggtaaaatgaggagagtgatgggtcctgaaggattcacttgagaagatgatgtttcatttcttttggaaaatatcaatggatatgcccagaagatttcaaaattagatttttaccattgataattcaatattagttaactatcaaagagaaaaaatttaaagccataaatgtccttcttagttcttactttgtttaatttaccaaatatgtcatgtatcaactattgttataatttcactatatatcaactatcttaccataaaaaaaaaaaaaaaaaaaaaaaaaaaaaaaaaaaa

SEQ ID NO: 293 - DNA, 980 bp, Arabidopsis thaliana
  Clone ID: ARATH-23APR03-CLUSTER153877_1
tttttttttttttttttggattcaaaaatttggataaaagcttcacaattcaactttcagttgctaacacaaaacaggagttactgaaacaaacaccaatttgatctaaactgtttcataaacttattataaccatgctccaaaaacgtagctctcttgacttacaaaacattcaagaatcacaaaccaagaagatactggaatctaagaagttttgatctttagatccgagcggattctgcttccatatacttacaaatcctctccataacctctcttcctttagcgctattctgcatgaatttctctgcgcacttctgttcaaccttctcagccattgaggccagagccgacaagggtttgatccgaatgcttgtctcctggctacaaaccgtccaggctgatggattatctggatgcggatcatatcttatcctctcctccacttcaatgaactttttgagactaatgttctttgttgttagctgcatagaacgtgatttgccatctacaactgttgattcaacacagtgacagatgtcctggccaatgatcctatggagaaaccatggaccaggagcatggatggtgagagcacgcgtggtgtggagtttcccggtctcagtgtcgagtttcctgttcaaggtatcgacttcaaggatgtgagaaaggatgcgtttgttttcagggtccgcaaacttcctccatgaagcagcactcacccgctcccacggatgcttgtaaacatgctcttgtctgtatgcttttaccatcaagaatcttgagaggtcggcaaattcaagatcttggtgagcttcgagaagtaataatgacccaaaagtggaggacgtgacgagagtaaaaatagagaggaagctaatcaatggcggtgtttatagagagagacttgcggcttatccccttttgtcgtcttctcgcagccgcccacgcgtccgcccacgcgtccgcggacgcgtgtg

SEQ ID NO: 294 - DNA, 4245 bp, Arabidopsis thaliana
  Clone ID: ARATH-23APR03-CLUSTER15415_1
gaccacctgattcatcttcttcatcattcacccactacactgttgactcttcgctaaaactcgatccttcaacgatcttcgccaccaaagcaagagagagtgagatgggaactgtaatcgaaggaaagctaagattttgtatagatagaggaggtactttcactgatgtatacgctgagattccaggacattccgatggtcatgtgttgaagcttttatcagttgatccatcgaattacgacgatgctccggtcgaaggaattcggagaatactcgaggagtatacagggaagaagataccaagaacgtcgaagataccaactgataagatacagtggattagaatgggaactactgtggcaacgaatgctttgttagagaggaaaggtgaaagaatagctttgtgtgtaactaaagggtttaaagatttgttgcagataggtaatcaagctagacctgatatttttgatcttactgttgcgaaaccgtcgaatctttatgaggaggttatagaggttgatgaaagagttgtgcttgcgttggaagatgatgatgatgatgaagggtcgttgattaaaggagtgtctggggagtttcttagagttgtgaagccgtttgatggagaaggtttgaaacctttgttgaagggtttgcttgataaagggataagttgtttggctgttgttttgatgcattcgtatacttatccgaagcatgagatggatgtggagaagttggctttagagatgggttttagacatgtttcgttgtcttctgctttgacacccatggttcgggctgttcctcggggtttaacagctactgtggatgcgtatttgacaccagtgattaaagagtacttgtcgggttttatttccaaatttgatgatgatcttgggaaagtgaatgttttattcatgcaatctgatggaggtttagcaccagaaagtaggttttcagggcataaggctgtgttatcaggtccagcaggaggagttgttggttactcacagacactctttggtcttgaaactgaaaaaccgctgattggatttgatatgggtggtacgtcaacggatgttagccgctatgatggaagttatgagcaagttatagaaactcagattgctggaacaattatacaagcgccacagcttgacataaataccgttgctgccggtggtgggtcgaaactaaagtttcagtttggtgctttccgagtgggacctgattctgtgggtgctcacccaggtccagtttgttaccggaaaggaggtgagttagcagttactgatgcgaatcttgttttggggtttgttattcctgattattttccatccatatttgggcccaatgaagatcagcccttagatgtagcagcaacaagagaagcatttgaaaagcttgcaggacagattaatatatatagaaagagccaggatccatctgcaaaagacatgtctgtggaggaaatagcaatgggttttgtgagtgttgctaacgagacaatgtgccgtcccatacggcaactgacagagatgaagggtcatgaaacaaagaatcatgcactcgcatgctttggaggtgctggaccgcaacatgcttgtgcaatagctaggtctttgggcatgaaagaagttcttgttcacagatactgtggaattttgagtgcttatggaatgggtttggcagatgtcattgaagatgctcaagagccatattcagctgtttatggccctgaatctctttcagaggtctttagaagggaaacggtattgctgagagaagtgagagaaaagctccaggaacaggggtttggtgatggaaatatctccactgagacatatttgaacttaagatatgatgggacagatacagctatcatggtaaagggtaaaaaaactggagatgggtcggcatttgattatgctgcagagtttctcaagcttttcgagcaagagtatggatttaaacttcaaaacagaaatcttctcatatgtgatgttcgggttcggggaattggagtgactagtatactaaaaccacgggcagttgaagctgcccctgtcactcctaaggttgaaaggcactacaaggtttactttgaaggcggatggcatgacacaccgttgttcaagttggagaatttaggttttggccatgagattctcggccctgcgatcatcatgaacgggaacagtacagttattgtagaacctcagtgcaaagccatcattacaaagtatggaaacattaaaattgaggtagagccagcaacgagcagtgtgaagcttgcagagaatgttgcagatgttgttcagctatccatatttaatcacagattcatgggtatagctgagcaaatgggaagaaccctgcaacgtacttccatatcgacaaatatcaaagaaagattggatttttcatgcgccttgtttagtcctgacggtggcttagttgctaatgcgccacatgttccagttcatctgggtgccatgtccagtacagttcgctggcagctcaaacattggggtgaaaatctgaacgaaggagatgttttggtaacaaatcatccttgcgccggtggtagccatttgcctgatataaccgttatcacacctgtttttgacaagggaaagcttgtgttctttgtggctagtagaggtcaccacgcagaagtaggaggcataactcccggaagcatgcctccgttctcaaaggcgatttgggaggaaggagctgcgataaaagcatttaaagttgttgaaaaaggtgtttttcaggaagaaggaattgtaaaacttcttcaattcccttcttctgatgagacaacaactaagattccaggaaccagacggattcaggacaatctctcggatctccaagctcagatagctgcaaaccaaagaggaatttctctaattaaagagctgattgagcaatatggccttggaactgttcaggcttacatgaaatacgttcagcttaacgccgaagaagcagtgagagaaatgctgaagtctgtagctaatagagtttcctcggaaacaccaaattccagggttggtaactccgtgaccatagaagaagaggattacatggatgatggatccataattcacttaaaactcacaattgatgccgacaaaggagaagcctcctttgactttacaggcacaagcccggaagtctacggtaactggaatgccccagaagcagttacatctgcagcggttatttactgcctccgttgtttggttaatgtcgacattccgctaaaccaaggctgcttagctccggttgagatccgcatacccgctggttcattcctgtctccaagcgaaaaagcagctgttgttggaggcaacgttctaacatcccagagagttacagatgttgtcctaacagcattccaggcttgtgcttgttcccaaggatgcatgaacaatctcacatttggagacgacacatttgggtactacgagaccattggtggtggatgcggagccggacccacatggaacgggacaagcggagtccaatgccatatgactaacacgcggatgactgatcccgagatctttgagcaaaggtacccggttctgttgcatagatttggattgagagagaatagtggaggcaatgggttgcataaaggaggcgatggattggtgagagagatagagtttagaaagcctgtagtggttagcatcctctcagagagaagagttcactcgccacgtggattgaacggtggccaaaatggactccgtggagcaaactatctcatcactaaagacaaacgaagaatctatcttggaggcaagaatacggtacacgtagaagccggtgaaatcttacagattcttactccaggcggtggcggattcggctccaacatataaacaattcatctcctcctcataagtctcttctcgaacttcattactccttcatttaacgtataatccaaattagttgtttatgtgtcttgttgttgtttcggtgtctcttagccggatattctttggaggtttggccattttcagtgaaataaggatcagattcttgattcattagaaacaaggtaataaattgtcttggtgaataagttttagttgttgttgtatgtacttatgtatcactattgctggtccaagacttttggctggatttcattgatgccattgtcgacattgaaaagagatttgtgtctgctaaaaaactcgagggggggcccggtac

SEQ ID NO: 295 - DNA, 1163 bp, Arabidopsis thaliana
  Clone ID: ARATH-23APR03-CLUSTER154176_1
ttttttttttttttttgagtaagaagttgacttcaccttttaccaaaaaaaagtaagaagttgagttcactggaatcttagttaaatgaaatcgggaggaaaacaaaaatgaagtgagtagcggagtataatcaatcccttcaagaggatctaacgttcactgtttgtttgtatgttaaatgggaaaaaattggagatgggttaaaaggtgtgtgtatgtggtcattggtcagagagctgccatcattgctcgtcttgtggcctcctgcttcatctctgctgctttcccgctccccctgaagtacatgtacacttgctgaataacccagatgctgacgagtgactccagacagaagaacccaaacccaatgaagtaaaatatcccgaccaagatattcccactcaatacgtcgatcgccggcaatattcctgtcagcgattttcccttgaagataattggaggagccaccgccgcaaacacacaaaacgctatgtgaaacagatacgtgaagaaaaaccacccaaaattcagagcactatcagtcctcatggcacgataaagagggcgataccacataacatacgctccaggaacccctgatatgaaatagataatagctagaaaccatattgttggaccttctcccttaatccacgcagtagtaactgcgacaatgttccataacaggcacaccacaagacccagcattgatgtgaaagcaacatattggattctctgcagatggatgggtatctcatttgaaatgtcatgatggatgagaggaaaaaacggtggccagtttttctcttctatcacaattccggcctgtgctatagcatcttctttccgcttgatttcctgctcccgcctcttcaattcagcctccttttcccggagttccttctccttagctttcagatcctttccagagtcaagaggaatatccattgtggcaccacggtcgtacggctcagggggaagaggagaaagctttgacgttgcagctgggacacttgtaggattcgcaaaaggattaatttctccgtcatcaaaggaatgagactggtagcgagacattgcaccgttactcagcaaatccaatctctctacacggatcacaccgagcgagagagagagagagagagagagagcgattggagat

SEQ ID NO: 296 - DNA, 2540 bp, Arabidopsis thaliana
  Clone ID: ARATH-23APR03-CLUSTER15441_1
gaccttctctttgccttagatggtttcgtttacctcaaaaagtcaaaaatcaaaatcctcactaaaaccctaacatttcccagagcttcgcaatcgctgttcttcagtctcgcttctttgtaaactgtaaaggatcaagcttttctattcagatcaaatccacttcactatacccttttttagtttcgttaacccagctcaaatccgagatgagatatcaacaatggcgattgatgcttcttcgaagctaccatcgttctcatcttccttatctatctccttgttctcaggtaacctccatttcatcgcgatctttctcttctttcattcaccctgggatcggagctttgcaacaaagtgaacaactttgtcccttacgatccccaatgacgagctctggcaacttagtgaaatcagtgggtcgaagcttctcgtccgagcctgcggttgaagagaaatcttctgctgaggctaccgtgattgatatttttagtagattgagtggtgaggatgagattaggaaggagttggaatcgagtggtgtagtgattagccaagatttagctttgaaggttttgagaaagctcgaatcaaaccctgatgttgccaaaagttttttccagtggattaaggaggcttctcctgaggaacttagctcgaagaactataacatgatgctgcggattctgggtggtaatggacttgttgatgagttttgggggttggttgatgtgatgaagaagaaagggcatggtttatcggctaatgttagagataaagtgggtgacaaatttcagaaagatgggctggagagtgatttgctgaggctgagaaagctttttacttcagattgtttagataattcggcggagaatgtttgcgatagggtgtgtaagattgtgatgaaggaagaatggggtgatgatgtagagaaacgggtaagagatttgaatgttgagtttaagagtgatttagtgaagatgattgtggaacgtcttgatgttgaacccaggaaagctttgttgttcttccggtggattgatgagtctgatctctttaagcatgatgagaaaacctataatgctatggctagggttttgggaaaagagaagtttcttgatagatttcagaacattgtagtagaaatgaggagtgctggttatgaagtggaaatagagacttatgttagagtttcaacgaggttctgccagactaaattgatcaaggaagctgttgacttgtttgagattgcaatggcaggtagtagtagtagtaacaaccccaccccacactgcttctgtttgttgctcaagaaaattgtcactgccaagattctagatatggatttgttttcaagagctgtgaaagtttataccaaaaatggtaatgctttgacggattccttgctgaaatctgtcttaaagtccttgagaagcgtggatagggttgaacagagcaatgagctgttgaaagaaatgaagagaggaggctatgttcctagtggtgatatgcagagcatgattgcatcaagtcttagtcgtaagggaaagaaggacgaagctgatgaatttgtagactttatggaatcatccggaaacaatctagatgacaaggcaatggcgtctcttgttgaagggtattgtgattccgggaatcttgatgaagctttagtgtgtttcgagaaaatggttggaaacacgggagtctcctatgctgattattcatttgagaagttggttcttgcttattgcaacaagaatcaagtaagagatgcatacaagcttttgagtgcacaagtaacgaaaaatcaactgaaacctcgtcatagcacatacaaaagcttggtgacgaatctgttgacgaagaagattgcaagggatggtgggtttgaagaagctttgagtcttctaccgataatgaaagatcacgggttccctcctttcattgaccctttcatgagttacttctcatcaactggaaaaagcactgaagctctcggttttttgaaggctatgacctcgaataactttccatatatatcagtggttctgcgtgtattcgaaactatgatgaagtctgcaagacacagtgaagcacaagatttactctctctgtgcccaaactatatccgtaataatccggatgttctagaactcttcaataccatgaaacccaacgaatctgctgtagaaaaacctttggctgcttctgcttagctccagttttagtttacattccttcaagtctttttggtttctgggcatttgattcaaataatttggccagaatatttcctgctgttcccttttgtttacatgtatcactcaccagtcaccagttaactttcttcatcaacctggtgcactggcaaaataattttaaggtactatgtttttttatattccacttgcttatcatcttatgcttcttggctctgccatggattgttccgtgtatcatcattatttgttaacaagatctgtctgtaactctgttctctttttaactttttctccgcactaatgtattgcctattgatc

SEQ ID NO: 297 - DNA, 5743 bp, Arabidopsis thaliana
  Clone ID: ARATH-23APR03-CLUSTER15442_1
gaacttttttgcttccttctgattctctctctctccgcaatccaatcacgagaaaccttcacgtcaccatcccttagaaaaaccctaaaatctcatcaaatcccaaaatcagggtcttcgactagagattctctaatcccgcaggggaagggaacaacaaacaaacaagatggtgtttccgtggaacattgctaaatcagcggaggaagctttttctagatgggcggtgaagagggttgtcaaattcctgttgaagaagaaattgggtaaactcatacttggtgatatcgaccttgatcagctcgatattcagcttcgtgatggcactattcagctctccgatcttgctatcaacgttgactatttgaatgacaagtttgatgctccactcgtcataaaagaaggctcaattggatctttgttagttaaaatgccttggaagaccaatggttgtcaagttgaggttgacgagctggagcttgttcttgcaccacgtttggagagtaataaatcatcttcaaatgaagccagcacctccgcctctacacgagaagatttacataatatacgtcttgaaataggaaagcatgagaatgagatgttgatgaatgctgcaaaatctgcgtctatcgatgtccatgaaggtgttaagacggttgccaagatagtgaaatggtttcttactagttttcacgtcaaaattaagaatctgattatagcatttgatcccgattttggcaaaaaacagtctgaagctggtcctcgaccaacattggtacttagaatgacagaaatagagtgtggaatttcagaggagcaagtttcggctaatgaagtttctcctgataatttccttggtattaatcgacttgcaaactgtgtgaagtttcaaggagccgttgtagagcttttaaatatggatgatgatgatgatggcgacaaaacttgtgataaaaagacatcaaatgatgtgactttgatcatgacaggcgtaggaggtggcttttcagggagtttaaattttagtataccctggaagaatggttctttagacattcgcaaggtggatgctgatatttctattgatcctgttgaagtacgatttcaaccgtctacaattagatggttcttacaattgtggaagacgttcacaagttttggatcagactgtttcccctcagtttctcattctgattttttgacggattcacctacaatacctactaatgtaatggtaacgcctccagctacactatccttgtcaggtggccaagaattggagcatgatactacacctaacttacagtttataccggattggtttccgtcttcgttcagcaagaaagaagaggatggagaagtagatattggggcaagtgtggaccagttttttgaatgttttgatgcaatgaggagttaccaatcagcttctggaagccaaggaatgtggaattggacatcttctgttttcacagcaataaatgctgcatctagccttgcttcggggtctttgcttcttccttctgaacaacaacatgttgaaacaagttgtaaagtatcctttgctggagtttcggtggtattatttttccaagatgaagtcaattggaagggtgtttcaacgcggattcactacttgggtgccgaactcagagatatttcggtctcttttcaggtatgccttcatgatctgaggttagaaggagaagtgaacagcatggagatcgccgattattgtcaaggtggaaatgttgttgacactgctaatgctgaatctcagacttgtttgattaaggatttacaagccaaagttcagactagtcttcctccctttgcctcttctgatatgcattctgactctgaaagattaagcgagatagtttctgatggattcctctttcgtaacaagggtttcgcagtcaagacattgttggttatagctgcagggggcagtggatttcagtttactgtcaatttccaatcatccaaagccagccatagaggatcaaactcattctcattgagtttaccccctaccacattctggctgaaccttcattcggtagaaatgttggtaaatcttttcaacgatgtatcagaatctatccccataaccagtcatgaaaggaatcaggtggcatcctcttctaaatcagaaagtttgcgaggtagtgtgtcaatctgcaatgctcgagtgattctgtggtttccttttgagagcatttcagaaaggttctgcaactcgcttggtcagcaatttatcgtcgtcgatctatcttcctctccgccatctgataaggaaagggctaaggaaagaagtccaggagaaatgcactttccatcagctactcgctctatatgcttcagtgttggtgatgctagcatctatttggtcacttctgaccttaaagattctgaaacaaattcatatcataggcaggttgaattctctgcgtataatattttacataccaacaataaaactaggcaccaactttcaacaattggcatgttttggcaagatagacctaccgttagcccttggttagtggagagagctaagatgttggctacgcaggaagaatctattcagacagataaatctggcgggaggggccttgagtttgctgctgttgctacgcccaaagatcaagacgacatctactctcgaagcaggaaagaaataattttggcttcttcgttctgcctttatgttcatttgcttccacttgctatccatttagatagttggcaatacagcaaattatgtaatctaatagaagaggcaaaaaattggctatcgcgtatggcagccaatacagctgagcaaacagaggaatctgttgtgtgtcaaacgtctctcgttgttgactgtgattctattgacatattggttaggccagaacctcgaatgggcataaaaaaacagcttcagactgagctccctggatcatggattcagttcaacctgagggttcagaaattaaatcttatgtctgtcccaaatcttggcagtgtctctggtgctgatttcttttggttagcccatggggaaggtacattattgggttctgttacaggtctacctgatcaggaactgttattactctcatgtaacaactctgccatcaagcgtggtaatggaggaggttcaaatgcgttgtcgtcaaggttcgctggcttagattttctgcacttacaggaaccaggaatttgtaacgattatttagcagtatctgccaggggctgtacgatctcggccgtaggaggacgcctggattggatagaagtggctacttcttttttctcttttgaagatgaaaaaaaaactcaagagatcaactccagctcatctagcggctcctcgtttattctgaattttgttgatgttggtctaagctatgagccccaccatgagaatacagatcatttacgtcaagcaagtgatccatgggttgcctgtctggtagctgcatcttcttttagcctttcaaagaaaagtctggttgattccataagaaatgattatagaatcaggattcaagatcttgggcttcttctgtccgtggattttgaccttagcaagcttggtggaacgtacagttcagagcatcttcatgagtctggctatgttaaagttgctaatgattcgcttattgaagcaattctaaggactaactctgaaaatggccttctttgggagttagagtgttcaaaatctcacttagtaattgaaacttgcagtgacacgacttctggtttgattcgcttggccacccagctccaacagttacttgctcctgatttggaggaatcagctgtgcacttgcagactcgatgggacagcattcaacaggcaaatgctaggaatgatttagatatcagcgatagactcagtagctccgattcaagtggagaaatgaaatatttaagattagagtcagaaaatgaaactggggtcattggtttgatggacgaaataaatgaagatgcattccaatttgatgtcaatccgacatatcagtctgactctgtggaatgtcagaataactatatgtcacctcatggaatctctcatgggcaggcatataattgggtaccagctactgagaaactaccttctaatcaaagtatttgtgggtcgtcatccagaataaactcagaaagcagtcaagtattcctagaaagagagagcctgcctgaaatatttgaaaactattgtttgtctgagttccgtccatcgtcagaggtacctcaagaaggggattcgtcggggagagaattgtttcctgagactgatctgaggagaggaaattctgggtggtatgatgacgcgtccttaagaattgtagaagaccatgtgtcagaagcaactgaggaagatcatgaggaacacattctggatggagaatgttcatcttttggccagacgtcttattctgctgtagcagctaatggacgtatccttctgacaagcactgactatcatagaagaagcgcttcttccatattttcagaaattcgacatatggcctgttaatgttcgagttgattacagtccccatcatgttgatatagcagcactaacaggagggaaatatgcagagcttgtgaaccttgtaccctggaagcataatttgctcatcacagaagaacaaatgcaggggattgaattacaactcaaacatgtgcatgctgctggaatctatggctggggaaatgtatgtgagactatactgggagaatggttggaagatgtatctcagaatcagattcatcaacttttaaaggggatcccaacagtaagatcactttctgctctttatgctgctgctctaaagctggtctcgtcacctgttgaaagttacaggaaagatcgaaggctagtgaagggagtccaaagagggactgtagcgtttctcagaagtatctcactggaagctgttggactcggtgttcacttggcagccggggctcatgatattttattgagagcagaatatatatttgcaagttcaccatcattgccacaaccccaaggcagaacgaagacgaatgtcagacataatcagcctagaaatgctaagcaaggcatgcttaaggcatgtgagagcatcggtgatggaataggaaagacagcttctgcattagtccgcacacctttgaagaagtatcaacgtggagacggagctggatcagcatttgcaactgttgttcagggagttccaacagctgctatagcacctgcttcagcttgtgctaaagctgtacatagtgctcttgttggcatcagaaataggtcggttcatattaaatattttggaaatacggctggaaatatctgttatttgcaaagtattaaagactcatgtagattatttctcctttcagtcttgatcctgaacataaaaaggaatccatggaaaaatacttaggccccgccaaacaaaggaagcagggccaaccccgataaactcagattatccatgttggggggacttcccttttacatatagcatgtgtataggtttgaatagagtaaaagtgcagaaccattcttttaaccatcgaaaagccaaaaagatgggaaaatttttggtatagaaaataaatcttttaaacattatagaatcattcagtttgtttgtttctgtacataaacattttcgatcttgctccattgtaaatttacccccccaagtttgccaaatgagtgaaagtggacagttttttttttttgttt

SEQ ID NO: 298 - DNA, 1645 bp, Arabidopsis thaliana
  Clone ID: ARATH-23APR03-CLUSTER156494_1
caaaccgaaattcaaacaagttgcaacatctatggctaagaatttttttttttttttttaagaagaacaagatcatctttaaaagaaatgctaaagcttaagtttgtgacaaaaacagactcctacactgaaatatgctcatgggcttattcatggttgcggatcaatcttcatcactcatcatcaacgataattcgacattgttgagaacgttttgtgagtttatcaaggtcctcgtagacatctgaatttgaagcatatcgagggtagtctataaaactcatagtaagtttcttgaggactgctgcgttttcaagaaagtacctcgctattttcatctcctcttcctcccattcaaacaatccttttatctcaacacactcgagagtcgatacgatacaccgaggcacgtttatgagattcagctcctccgtctcatcatcctttgcaaaagcaatcttcaagattaggtttttcagattcgggaaactctcaagaaaggctggcaagaacggtaacaaggggctcgggaacacagcttttaaatgtgacaagttattgaatttgggaatcgatccaacttttgagtaactttcaagagccttcactgttttctgagagatgatcatatgtcttgcacgagatatcccagtgagaaaatcaccaatttcatttctcttcgataagtcctctggatcaaaactcctgcggtaatcgacagcaaacttgatattaagttcaatcatgaacaaagaagtcaggttcttcaccacgattccatcgaaatggtcttctttgagagtcatattctctagtcctggagcatcaatctcaagtactttgtctgggactcttgacctacaaccaactccatacgcgagcggaacataaaacgtcttcagactccgagatctcacacgcgtaaccgccaattcatcgtcatcaatatcacatatcaaggtccttaccaaggtaagttcttcaagaacaggacatccagagacaagtttctcaagactcatggtaccagaccatcgaacttcacgaagaatcatgaacttaagacaaggcatagaaaccaaacccggatcgttaagagccgaatcccggagctttaaagtaaccaacgtcttgcttgtaaagagattcagaggcatgaactccaaataaggatacataatgcattcctcctcccaatacatggtactactcacagcatctagaagtcgaattccgcggttaatcgctgtaccgatccgatccttgaacccgcgtatctcacgccttttgtaatctacctcgaatgtttgcaggcgtgactcaggattaaactctagaaacctgtcgatgaagttaatgaacacttgttcatattcttcatcttcaaaagggaaatcactgcaagttaagtcaagtccgggaacatttagccatagattcttccacctagtcgataaaacactcgtcttcaccgaatctttagtcggaaggcataagagtatttgagtaatcagagattccggtaattcgctaattctatcgaacccaggcatcacgagacacaaaacccgtggatttgattctccggcgaattatcgaccggagctctggcgtcagaggctaagtggtaaagctagtatcgatc

SEQ ID NO: 299 - DNA, 940 bp, Arabidopsis thaliana
  Clone ID: ARATH-23APR03-CLUSTER1566_1
gacttcattagtctccaagaagaaaacatctctcactctctaaaatacacactctcatcaaaaaccttctcttcggttcagaagcattcaagaatccattatgagctcatctgattccgttaataacggcgttaactcacggatgtacttccgtaacccgagtttcagcaacgttatcttaaacgataactggagcgacttgccgttaagtgtcgacgattctcaagacatggctatttacaacactctccgtgatgccgttagctccggctggacaccctccgttcctcccgttacctctccggcggaggaagataagcctccggcgacgaaggcgagtggctcacacgcgccgaggcagaaggggatgcagtacagaggagtgaggaggaggccgtgggggaaattcgcggcggagattagggatccgaagaagaacggagctagggtttggctcgggacttacgagacgccggaggacgcggcggtggcgtacgaccgagcggcgtttcagctcagaggatcgaaagctaagctgaattttccgcatttgattggttcttgtaagtatgagccggttaggattaggcctcgccgtcgctcgccggaaccgtcagtctccgatcagttaacgtcggagcagaagagggaaagccacgtggatgacggcgagtctagtttggttgtaccggagttggatttcacggtggatcagttttacttcgatggtagtttattaatggaccaatcagaatgttcttattctgataatcggatataattagttttaagattaagcaaaatttgtccaacgagttttgctgtatgaaatatctatcgatgactcaacaggttttgatcatgatcatatgtaatgtgatggaaattaaatattgacgtttgtttttttcttctaaaaaaaaaaaaaaaaaacggccgc

SEQ ID NO: 300 - DNA, 3081 bp, Arabidopsis thaliana
  unsure (1)..(3081): unsure at all n locations
  Clone ID: ARATH-23APR03-CLUSTER156_1
gatcgaagatgatanncnaanagtgnagttatcaacaagcttcaaaaatgggggaagaagaagagaaccctaattcgatcgacattcttcccgagctacttgaagaagttctccttagattgcccacgaaatcgatcctcaaatgcagaatcgtctcaaaacaatggaggtcactcctggaatcgagtaggttcgcggagaggcatatgagtcttcaaaacagccgccggagaatcttagctgcttacaactgcgactgcggcggacggaggaagctcctacccgagtcacggtttgaaggggacgaagagattgtctatctgcactgcgacgcctcacgaccctcgatgacttgccaaggtgtgatctgcttccccgagcaagattggatcatcgttttgaacccatcgactagccaacttcggcgattcccttccggcttgaaccataactgcagatttagaattggattatggaagactttctctccgggaaactgggtaatggggtttggtagagacaaagtgaatgggaggtataaagtggtgaggatgtcttttgctttctggagagttaggcaagaggagcctgtggtggaatgtggtgttcttgatgttgatactggtgaatggcggaagctgagtccacctccttatgtggtcaatgtgggaagcaaatcggtatgcgtgaatggatctatctactggttacacattcagacggtttacagaatactagccttggatcttcacaaagaagagtttcataaagtcccagtgccgcctacgcagatcactgtggacactcagatggtgaaccttgaggaccgtctcgtacttgctataaccagagttagccctgaatggatactagaggtatggggcatggatacatacaaagaaaaatggagcaagacttactccataagtttggatcatagagttgtttcctggcgaaggcagaaaaggtggttcacgcccgtggcagtttctaagcaagcgaatcttgtcttctatgacaataagaagaggctattcaaatattatccagtgaaagatgagattcgttgtctctccttagacatttgtgttctgtctccttacgtggaaaacttggtccctcttccgttaaagccaagccatccgcatcctactccgaaaaattcagattttgaaatgaggatatcaagatgccgcttgttttcgacgccaggttcttggatatccaaaattttgaaatggaatgttatgactctagagattttgtttacctctctagcaatagttggttatatatgcttacctctctaggagttatttatcttgtttcaaaatattagttggttatatatgctttcgagatctttctgatatttattctgccaactcatttttcttcctctttcctttaacctttaaatcgatttaagtagattcctatgcatgcctctctttcactctcctcttctatgcaagtaaacacaaatcctcagttttctacttgtttacgggatctggatattgactaggagcagaactttatgtaatactatggtataatggtttagcataaagagctattcactttgtgcccaaagacagcttctgcatagatgttgcagaccaaataataaagactacatgctgtgtttcgacatgctccctgatgtaataaaatgatttgagaagcttacaatgatttgatatcagtaaaagaagatttggtacagaggaaaactgaaaaagctcctttgatcaaaagcatcagcaagaggaaggaagagcaactgcttctgctgatcgaactgcagagctgtggaaaactgatggaacactccaacaaagttttaaaggttatttgaattgtgttgcacgtgttgctttccacccatatgggaaatacctcgggttaacaagctttgacaaagcatggagattgtggagtagaagctgcttttgcaagtagtttacagtcacaatgtctatggaattgcaattcaacaagatggagtattagcagcttcttatgcgtgtgattcacgcccacgggtttgagatctccccccttgtaggagtattctcgtcgtcaaggacacatgaaacccataagactcaagttttgttcccttggtcctcttcctcaggtaaaaacctgaccatttattaacccttgatagttaatctcctttctgctatatgcttccctaaggaagctgcagtgccgaattgaaagaaagaaaaaaaaatcaccaatattacgaatgggcccaaagcccattaatgttgtcccttttttgttattaaaagcccatttataaccatgagtcgttgtttctctctttcaaattgtcctgtgagatcatagcgccaaagaagcaagaagctgaagatcattctcttttttcaccgagttttcttctctcttatcaccgagactcaaggtacacgtctctgaatcgctcttcttgttgtgtattccatctgaaatcgatctttgggtttcttgataaaaaattgtttttcccgatgaatcgactgaagaaataatgaaggatacttttataatgatccttatgaatcttggtttcagtgaatgagatcttcgtctgtttagtaaatgataatcgctcaatgtatttgttgaatcgattttagatgttcctctgttaatagttcttaatctgcgaactaattgatgctctgataatcatctagctgtattcctagatatgataacttctgatgaatctctatctcacagtgctttggaatcaaatgtgttttctatttaacttcctcaataaacgcaaagtgttatgatctatctttgcttgtctagagtcagtgttgggtttgcttgatgaagtatagtattacttatgaataatcgtatagtttcatttgatatcaatgggcaactaatagggaaattcatttcgttagcgatccttcagaaaaatactttttgatttggttttatatttacactaaaccccactaataagaacctgaaatgatcacatctgacatgacaggagaaatcaaaagtctttaatgaaatatttaaagacagaagaaggcc

SEQ ID NO: 301 - DNA, 2166 bp, Arabidopsis thaliana
  unsure (1)..(2166): unsure at all n locations
  Clone ID: ARATH-23APR03-CLUSTER1583_1
aaaacaacactcaaaagtctcttcttcttcttcttcacatcgatcatcatacaacaacaaaaaatggattacagagaatccaccggtgaaagtcagtcaaagtacaaaggaatccgtcgtcggaaatggggcaaatgggtatcagagattagagttccgggaactcgtgaccgtctctggttaggttcattctcaacagcagaaggtgccgccgtagcacacgacgttgctttcttctgtttacaccaacctgattctttagaatctctcaatttccctcatttgcttaatccttcactcgtttccagaacttctccgagatctatccagcaagctgcttctaacgccggcatggccattgacgccggaatcgtccacagtaccagcgtgaactctggatgcggagatacgacgacgtattacgagaatggagctgatcaagtggagccgttgaatatttcagtgtatgattatctgggcggccacgatcacgtttgatttatctcgacggtcatgatcacgtttgatcttcttttgagtaagattttgtaccataatcaaaacaggtgtggtgctaaaatcttactcaaaacaagattaggtaccacagagaaacaatcaaatggttgtgaatatacattataaggttgattaatgtttgtttcactgatttagtgaagtttggtccattgtatacaaatctattcaagaaacctagcgcgagatcatgtttcgtgattgaagattgagatttttaagtattcgtaatatttttgtaaaatacaaatatgtttctgatcagctattattcgatacgaaatacatgggcgaaagcaggcgtcctaattgtgatgctttcgcccagtgaaagactccgacaaatctacaagagttcctccaagtaccttatagcttaagtcactgatttctctctcaagtgtcatttgtaaagtctctgcttattgaatgtttctcttcttcaatcattccatcaagattgtccgccaaattgcttttggagatccgtgaaggatacggtggctgaacctcttcgtttggcctgcgggtgagacgaatgttctctccatcctgtcatgtaaatcacctgaaaagtagcgggtatagtgccgtcctctgtggcaaacatggagtcatatatggctgccgtggcaacagcagtttcacgattcaaaatcttgtttctctcgagaagagcattggtttcacccatcgcacgaagatgctctataagatccatcgctctcttgtatttaactacatattcatcaacatcaacaccaggaagactaaaacccgccctggtcaacagattccctgcgtccctaacctgtgccaaaggtgatagccgaggactaatccctccttcccgctccatgtgagccaaagtgcatgctattctcagctcctttaaggtttctccaccaagaattgctgctaaaaataagccatccggcttcagtgctagcttgcactgtatcatggatccaggaagatcatttgtccagtgaagccccaacgaactaatgatcaaatcaaccgaactctctttgactggcagaaactcttcatcaccaacaaagtaagaggtttcaatggagttatcgagtgaatcgtcttgagcatctctacatgacttaatcatgtcatatgaagtatccatcatgataagcttctcaatcccaccgcgacgacgtagtaatctcttaacagcaccaagagatcctcccaaacaaaatgcagtgggaaaactcttcttacaatcctctaagcgatcaagtagattatctgcaacagcgtcaacaaaagaatcgtttttttggcgagaaagccacgccgctcgatcacgatgtattcgcttgaggtctcggtcaaagatcttgactttggagctgttctgctgaaactcaccgtcaccgccataagcaccttccgtagagaaggagagagatgcgagaaatgtatgagcttgcttcgtagatttctcgggtactcgttttaggagaccaattcttccgtacagtgaattgatcctccgcatctctatctctctatctctggttcttagctgcaccggaattggtcggacggaggttctgggtgacgcgtgggtcgaagcgggaattctggcccggtccctnaacggct

SEQ ID NO: 302 - DNA, 1263 bp, Arabidopsis thaliana
  Clone ID: ARATH-23APR03-CLUSTER1589_1
tggagctcacgggggtgtccgccccctccgtaaatcttccggctgccccaagtctgcaacatcatcttcattaatctgatcaaataatagggttaatcaaaagtccagaaaccaacacagttcaattttacgaaaactctcagaaatggagaagtacgagaagctagagaaggtcggagaaggaacatacgggaaagtctacaaagcgatggagaaaggaactggtaagcttgttgctctgaagaaaactcgtctcgagatggacgaagaaggtattccaccaactgctcttcgtgagatctcgcttctccagatgttatcaacatcgatctatgttgttcgattactctgcgtcgaacatgttcatcaaccatcaaccaaatctcaatctaccaaatccaatctctatctcgttttcgagtatctcgatactgatcttaagaaattcatcgattcgtataggaaaggacctaatcctaagcctcttgagccttttttgattcagaagttgatgtttcagctttgtaaaggtgttgcgcattgtcatagtcatggtgtgcttcaccgtgatcttaaaccgcagaatcttcttctggtgaaagataaagagcttcttaagattgctgatttgggtcttggtcgtgcttttactgttcctcttaagtcttatacgcatgagattgttactctttggtatagagctcctgaagttcttcttggatctactcattattcaactggtgttgacatgtggtctgttggttgtatctttgctgagatggttcggaggcaagctcttttccctggtgattctgagtttcagcaattgcttcatatcttcaggttgctaggaacaccaactgagcagcaatggcctggtgtttccacactgcgtgactggcatgtttaccctaagtgggagccgcaagacttaactcttgctgttccttctctttcacctcaaggagttgatcttctcacgaaaatgctcaagtacaatccagccgaaagaatttcagcaaaaacagcacttgatcacccatattttgacagccttgacaagtctcagttctgaagttcattgctgtatctgttgtcatcgtcttggtgaatttaaacatttgatctatctttgtttccgacacattagtgtcttatgtttggtttagagatttgtagtctttcagaagaaactggtaaagcttgtattctcaagtgaatgtaaaacacaatggtgtggtagcaaaaaaaaaaaaaaaaatc

SEQ ID NO: 303 - DNA, 1680 bp, Arabidopsis thaliana
  Clone ID: ARATH-23APR03-CLUSTER1590_1
gttaagggagaagaaagagacttactttggatatcaaaacatgtcttgctctctattctaattaagtctagcctatctacaacatacataaacctctatctacgattatatttggatctacaagtgaagattgatcgatgttagctctgtctccggcgacaagagatggttgcgacggagcgtcagagtttcttgatacgtcgtgtggattcacgattataaacccggaggaggaggaggagtttccggatttcgctgaccacggtgatcttcttgacatcattgacttcgacgatatattcggtgtggccggagatgtgcttcctgacttggagatcgaccctgagatcttatccggggatttctccaatcacatgaacgcttcttcaacgattactacgacgtcggataagactgatagtcaaggggagactactaagggtagttcggggaaaggtgaagaagtcgtaagcaaaagagacgatgttgcggcggagacggtgacttatgacggtgacagtgaccggaaaaggaagtattcctcttcagcttcttccaagaacaatcggatcagtaacaacgaagggaagagaaaggtgaaggtggattggacaccagagctacacaggagattcgtggaggcagtggaacagttaggagtggacaaagctgttccttctcgaattctggagcttatgggagtccattgtctcactcgtcacaacgttgctagtcacctccaaaaatataggtctcatcggaaacatttgctagctcgtgaggccgaagcggctaattggacacgcaaaaggcatatctatggagtagacaccggtgctaatcttaatggtcggactaaaaatggatggcttgcaccggcacccactctcgggtttccaccaccaccacccgtggctgttgcaccgccacctgtccaccaccatcattttaggcccctgcatgtgtggggacatcccacggttgatcagtccattatgccgcatgtgtggcccaaacacttacctccgccttctaccgccatgcctaatccgccgttttgggtctccgattctccctattggcatccaatgcataacgggacgactccgtatttaccgaccgtagctacgagatttagagcaccgccagttgccggaatcccgcatgctctgccgccgcatcacacgatgtacaaaccaaatcttggatttggtggtgctcgtcctccggtagacttacatccgtcaaaagagagcgtggatgcagccataggagatgtattgacgaggccatggctgccacttccgttgggattaaatccgccggctgttgacggtgttatgacagagcttcaccgtcacggtgtctctgaggttcctccgaccgcgtcttgtgcctgaaacgcacaagatccgtaggcaagcgagaaccaaacaaaaattcgacgacatgtctttcaattattgtacttttatttttccaagggttgtttttgttttgacccttgttgtgttaagagttactctttacttaatcgtcccatgtgactaataaggagacccttttcatatgtatctagggtgctaagtacactctagctctattaacgcaaataaattacctatattttctctaaaaaaaaaaaaaaaaaaaaaaaaaaaagggcccggtacccaatcg

SEQ ID NO: 304 - DNA, 4018 bp, Arabidopsis thaliana
  Clone ID: ARATH-23APR03-CLUSTER16051_1
atggccgatcagagaagtaaaaccaatagatggaactgggaggtgagtgggttcgaaccgaggaagtcttcttccaatgcatcgtttgcggagagtactggtcaccgtacgactggtcctctgcttcgccggaactcgatttcgactccctcgcttccgcctaagcaagcaattgcatctaaggttaacggattaaaggagaaagttaagcttgcgaaagaagattacttggagttgagacaagaagctactgatcttcaggagtattctaatgctaagcttgacagggttacacgttacttaggtgttttggctgagaaaagtcgtaaattggatcagtttgtccttgagactgaggctaggatatctccacttatcaatgagaagaaaagactgttcaatgacttgttaacggccaaagggaacataaaggtattttgccgtgcaaggccattgtttgaggatgaaggtccctctgttatagagttccctggggattgcaccatatgtgtaaacactagtgatgatactctgtccaatcccaagaaggactttgaatttgaccgagtttacggacctcatgttggacaagctgcactgtttagcgatgtccaaccttttgttcaatctgcactggatggatctaacgtctccatattgtcatatggacaaactaatgcagggaagacatacaccatggaaggttcgaatcacgatcgtggtttatatgctcgatgttttgaggaactcttcgacctagccaattcggattcaacttcgacatcacgattcagtttctctctttcagtgtttgagatctataatgaacagatcagggatctactttcggaaactcagagcaacttgcccaatatcaacatggatttacatgaatctgttatagaactcggacaggaaaaagttgataatccattggagttcttaggagtcttaaaatctgcatttctgaaccggggcaactataaatcaaaatttaatgtgacacatctgattgtctcaatacacatatactatagcaacacgattactggagaaaacatatatagcaagctctctctggttgacttggctggaagtgaaggtttaatcatggaaaatgatagtggagaccacgtcactgatctgctgcatgtcatgaattcgatttcagcgttgggagatgttttatcctcgttgacatccggaaaggattcaattccttatgataattcaattcttacaagagtacttgcagattccctaggaggaagttccaaaacattgatgatcgttaacatctgtccaagtgtgcaaaccttgtctgagacaatctcatgtctcaattatgctgctagagctcggaatactgtaccaagccttggcaatcgagatacaatcaagaaatggagagatgtggcaagtgatgctcggaaggagctgttggagaaggagagagaaaatcagaatctgaaacaagaggttgtgggcttaaaaaaagctcttaaagatgcaaatgaccagtgtgtattactctacagtgaagtgcagagagcgtggaaagtttcatttacattgcaatcagatttaaagtcagagaatattatgcttgtagacaaacatagactagagaaggagcagaattctcagttaaggaatcaaatagctcaatttttacagttggatcaggaacagaagctgcaaatgcaacaacaagattccgccattcaaaatctccaggctaaaattacagacttggaatcacaagtaagtgaagccgttagatctgacacaacaagaacaggagatgccttgcaatctcaggacatattttctccaataccaaaagcggttgagggtacaactgattcttcttctgttaccaagaaacttgaggaagaattgaaaaaacgtgatgcactgattgagaggttgcatgaagaaaacgaaaagttgtttgacagattaacagaaaggtcaatggctgtttcgacccaggtgttgagtccctcattaagagcttcgccaaacattcagcctgccaatgttaacaggggtgaaggatattcggcagaagccgttgctttaccatctacaccaaataagaataacggagcgattacgttagtaaaatctggcactgatttagtaaaaaccactccagctggagaatacttgacagctgcattgaatgactttgaccctgaagaatatgaaggtcttgctgccattgctgacggcgcaaacaagctactaatgctggttttggcagctgtcatcaaggctggtgcttccagagagcatgaaatccttgctgagattagagattctgtcttttcatttattcggaaaatggaaccaagaagagtaatggataccatgcttgtttcccgagttaggatactatacataaggtccttactggcacgatcaccggagcttcagactatcagggtctctcctgtcgagtgctttcttgagaagcctaatactggtagaagtaaaagcactagcaggggtagcagcccaggtagatcccctgttcgatatcttgatacgcagatccatggctttaaagtaaatataaaggcagaaaggagaaacaagttggcatctgtggtatcaagaatgcgtggacttgaacaggatgctgggaggcagcaagttactggagttaagctgcgggaaatgcaagatgaagccaaaagttttgctattgggaacaaagccttggctgcgttatttgttcacactccggctggtgaactgcagcgacagattcggctatggcttgcagaaaattttgagtttctttccgtgacctcagatgatgtatcgggaggaaacggtggccaactagagcttctttccacagcaattatggatggttggatggctggactaggggccgctgtgccacctcatacagatgctctcgggcagcttctgtccgagtatgcaaaacgtgtctatacttctcaaatgcagcacatgaaggatattgctggtaccttggcggcagaagaggcagaagatgctggtcaagtgtctaagcttcgatcagctcttgagtccgttgaccacaaaagaagaaagattttacaacaaatgaaaagtgatgcagctttgcttaacctggaagaaggcagttctcctattccaaacccttcgacggcagctgaagactcaagattagcatctctcatttctctggatggcattttgaagcaagtcaaggaaatcacaagacaagcctctgtccatgttttgagtaaaagcaagaagaaagcattacttgagtcccttgatgaactcactgagcggatgccttctcttcttgatatcgaccatccatgcgcacaaagagaaattgctacagcacaccagttggtcgagacgattcctgaacaagaggacactaatattctggaacaatcacacgaccggagaccctcattagaatcaatatcctcaggtgaaactgatgtatctcagtggaacgttttgcaattcaacacaggctcttcagccccattcatcataaaatgtggaggcaacaacaactcagagctcgtgatcaaggctgatgcacgcgttcaagagcccaaaggaggtgaaattgtcagagttgtcccaagaccttctgtgctagtaaacatgagcttagaggaaatgaaacaaatgtttgtgcaattacccgaagctctaagtttgctggctttagctagaacagctgatggcacaagagctcgctactctagactctacaaaactctggccatgaaggttccctctcttaaggaccttgttagtgaactggagtaagatacctaagtcgtgaaatggcatacagatgttgcagagatactatccaacaatggagattccatgtgtatttattattttttgtgagatttttggctggttatgctacatatgagctacagattcattgtgtaatatgtaacttcattttgtattcacacagctataaattactttctcagcaaatgagcttttt

SEQ ID NO: 305 - DNA, 3767 bp, Arabidopsis thaliana
  Clone ID: ARATH-23APR03-CLUSTER1605_1
gcgggcttcataaatctatatacagacaaatttacacataaagaatcgtaccaattttgaaaaccctaaatctcaatcctcgacgctctctactaagaaactcaatcttactttctctgtaattcgtagcttccgaaatcttttctcaagaatctcataaccatggcgaatcctgctccgaatctagaatgtcgtatgtacgaatcgagataccctgatgtagacatggcggtgatgattcaggtgaagaccatcgctgacatgggagcttacgtatctctccttgaatacaacaacatcgaaggaatgatcctgttctccgagctctctcgccgtcggattcgtagtatcagtagcttaatcaaggtcggtcgtaccgagcctgttatggtccttcgtgtcgatagagagagaggttacattgatctcagtaaacgtagggttagtgatgaggacaaagaggcttgtgaggagaggtataataagagcaagcttgttcactctatcatgcgtcatgttgctgagactgttggtgtcgatttggaggagctatacgtaaacatcggttggccattgtataagaagcatggacatgcttttgaggctttcaaaattgttgtcactgatcctgattcagttttcgatgctcctgagtcttgtctgctataaacttggatcaaagcctctccatctgaatgtgtctcattcaaggcgtgtgaaacattcgtcacgagcatatacgtatccttgtcgttggttaaccctctaagagtagagtgatcactgtaagaggatatgtccgctggtgcacgactcgattcaccgcctcaccaaggaagccatgaccaaggcagaggctgtaggttctgatgattgtccagtcaaaatcaagctcgttgctccaccactttatgtactcacaactcatcctgattatggggaaaaaattatttttacttgagctaaagcaattatcatattcaatactcaccttgaggaacacaagggtaaacttgtcgttaaagaaggtgctcgtgcggtgactgagcccgatgacgaattgcttgctgtccacatggctaagcttcgaatggataatgaagaaatgagtggtgatgagggaagcgaacctcaagccaggatatccctgcgtggaccccaaacgcaaactcatgagactttccttctaaaagcaaccgcaaaagcggcgtcacggccgtgtctgcggtaggtccttcgaaggcgccgcccgctgcgcctggtccctgttcttgggttggcccccaccagtaaagatcaccggaaatggcacctcggatcccacgtatctcccatctatcttaacaaaaacttcccggtatgcaccattgccacgcccggttgctagattgttcgttctgatataagaatttggcgggtttgaataccagaactcatcgtttccatggaacgatacatatagttccagcacaatctgacgagtgttggacggaatttgaattccttttgagtaagtttctctggggttctcgatcatgaaccagaaccctctgttccctccgtcacataccggaattatcaaatccgcaggggtttgatctcttttctgggaatccacaaaccctaatctgttactaatcttcaatttgacgcaataggattgaattcgtagaagatgagggtgacattgatatgatagatgcctgtgtaaacatcgttgactatgttctcaagcatcattgtgacatttaaatcggatctcataaagagcgaggaatacctagagacgcttctagctcgaaaagctccgttgggtcagatatggatggccgctacattgcacgcgaagatcaaccggaagaaactagataagctcgatatcattcaaatctgcgaagagattttgaatccgtcggttccgatggctcttagactctccgggattcttatgggtggtgttgtgattgtttatgagaggaaagtgaagctcctattcgatgatgttaatcgctttctggttgaaattaatggagcttggcgcacaaaatctgttccggatcccactttactacctaaaggaaaaacccatgccaggaaagaggctgttacattgcctgagaacgaagaagctgattttggagattttgaacagactcgtaatgttcctaaatttggcaattacatggattttcagcagacttttatttccatgcggttagatgaatcccatgttaacaataaccccgagccagaagatcttggacagcagttccatcaagctgatgccgagaatatcacactctttgagtatcatggttcattccagaccaacaatgaaacatatgatcgttttgaaagatttgacatcgaaggagatgatgaaacacagatgaactccaatccaagagaaggcgctgaaatacctacaactctcatcccatcaccacctcgtcatcatgacattcccgaaggagtcaaccccacaagccctcagcgccaggagcaacaggagaatcgtagggacggatttgctgagcagatggaggaacaaaacataccggacaaagaggaacacgatagaccacaaccagcaaaaaagagagcaagaaagacagctacttcagcgatggattatgagcaaactattatcgctggtcatgtttaccagtcatggctccaggatacttctgacattctctgtaggggggaaaagagaaaggttcgaggaactatccggccagacatggaaagtttcaaacgtgcgaatatgccacctacacaactctttgaaaaggacagttcttacccgcctcagctttaccagctttggtcaaagaatactcaagttcttcaaacctcatcatctgaatctcgacatcctgatctccgtgcggaacaatctccagggtttgttcaggagagaatgcataaccaccatcaaacagaccatcatgagcgcagtgacacaagctcccaaaatcttgatagtcccgcagaaatactccggacagttcgtactgggaaaggtgcttcagtagaaagcatgatggctggatctcgagcaagccctgaaactattaaccgccaggctgctgatattaatgtcacgccattctattctggagatgatgtgagatccatgcctagtacaccatccgcacgtggagcagcttcaattaacaacatagagatcagctctaaaagtcgcatgcccaatagaaaaagaccaaattcctcaccaagaagaggactcgaaccagtggcggaggagagaccgtgggagcaccgtgaatatgagtttgagttttcaatgttacctgaaaaacgcttcacagccgataaagaaatactatttgaaactgcatctacacagactcaaaagccagtgtgcaatcaatcagacgagatgataacagatagcatcaaaagtcacctgaagacacactttgaaacacctggagctcctcaagtggaatctcttaacaagctcgctgttggaatggacagaaacgctgcagctaaactcttcttccaatcctgtgtgttagctactcgcggagtcatcaaggtaaaccaagcagagccttatggggacattctcattgcaagaggacccaacatgtaaggtttgatttctaaattataaaagattctggtgaaccgattatccatagttgttttgcttttcatattctagcagagagagttcgtagacttttttaagttataaagagcaagcgttctttacccaaaaaaaaaaaaaaaaa

SEQ ID NO: 306 - DNA, 777 bp, Arabidopsis thaliana
  Clone ID: ARATH-23APR03-CLUSTER160996_1
tttttttttttttttttctttttttttttttttttttttttttttaggccattacaatattactcagcatcttacaaacaattgacaaaccataaaaccaaaaagatacaaaatagagaaaaatcaataacattgtcttatgtaattagtatatgatgatcttcaaaacccaaatcagtaagtgggtggtgcagtcgcagggcagtggtcaggacggaaagccaatggaccagcggcgtaaatcacggcctcatagttagtccacttgagcctcttctcttcatatcggagtggagctccatctagagcattgttaatgttggagaagagattgcagtcttcacgaggagaagagacgagcttggctcggcaagaatgaagaggatggtccaagaaatgtggagtcatcttgaaacctttgagctcaccatagaaatggccgtaggaatcagttcgaaagactttgtagaaactcacttgttgcctatgattcttgcagataatgctgattttagctccggctatagcttctgctccggccaatgaccatgatccgaatttgtcgcaggattgacagtacaccattccttccactgccgcttccacggttttcacggcagggtatgcggtggttggaggaggaggaggaggagtgtaagcgttggccaacaccgccgtagcaatgaggatgacgagaacggagaagggtaaggctcttgagtccatgttacttgttatacactctgcttcttaaacttcttcttcttcttgatgtgt

SEQ ID NO: 307 - DNA, 1575 bp, Arabidopsis thaliana
  unsure (1)..(1575): unsure at all n locations
  Clone ID: ARATH-23APR03-CLUSTER1614_1
atcactactacctcaaagtcctttcttacttatatcaaagctttattagtctctttgttttgtttgcttctacattacagaaatggcatcttttgtgatgggttacttcttattgttcgctgttgcgttcgtgtgtttggatgcgaggacggacaaaacgcaagattatacgtcgtttcagtaccataaaggagctctcctcaccggagacgtttccatcaacctaatctggtacggtaaatttaaaccgtcgcagcgtgcaatcgtaaccgatttcgttgcttcactctcgtcttcccggagatcgaccatggctcaaaatccctcagtcgccacgtggtggaagaatacaggcatcactactacctcaaagtcctttcgtacttatcaaagctttattagtctctttgttttcttgcttctacattacagaaattaaatggcttcttttgtgatgggatacttcttattgttcgctgttgctttcatgtgtttggatgcgagaacggacaaaacgcaagattatacgtcgtttcagtaccataaaggagctctcctcaccggagacgtttccatcaacctaatctggtacggtaagtttaaaccgtcgcagcgtgcaatcgtaaccgatttcgttgcttccctctcgtcttcccggagatcgaccatggctcaaaatccctcagtcgccacgtggtggaagacggtggagaagtattaccaattccgcaagatgaccacgacacgtggactcagtctctccctcggagaacagatcctcgaccaaggatactcaatgggaaaatctttaacagagaaaaacctcaaagacttggccgcaaaaggtggccaaagctacgcggttaacgtcgtgttgacctcagctgacgtgacggtccaaggcttttgcatgaacagatgcgggtcacacgggactggttccgggtcaggcaagaaaggatcaagattcgcttacatctgggttggaaactcagaaacacaatgtccaggacaatgcgcgtggccattccacgcgccggtttacggaccgcaaagcccaccactagtggcaccaaacaacgacgttggtttagacgggatggtgattaacttggcgagtctcatggctgcgacggcaacgaacccgttcggagatggatattaccaagggcctaaaacggcaccgcttgaggctggatcggcttgtactggagtctatgggaaaggttcgtatcctggttatgctggagagttacttgtggatgcaacgaccggtgggagttataacgttaagggactgaatgggagaaaatatttgttaccggctttgtttgaccctaaaacagattcttgctcgactctgttttgaatacctattagtatacgttagatacgatattcttttatttatactttatatattcgtttttgtaatcttctttaatcagtatgtaatgaaattatttgttattgactaaaaaaaaaaaaaaaaaaggccggccgcnnnnnnnnnnnnnnnnnnnnnnnnnnnnnnnnnnnnnnnnnnnnnnnnnnnnnnnnnnnnnnnnnnnnnct

SEQ ID NO: 308 - DNA, 990 bp, Arabidopsis thaliana
  Clone ID: ARATH-23APR03-CLUSTER161510_1
cacccaaattataaaactatatgattacgaaaataatcaaaattgtttacaaactaataaaaacataatttaagatgtaattattaaaaatacaaatctacatcttacataatttattaaatacgaatttaaaatcataattttcaccgaatagatccaaatcaatgaatcaaaacggaggaaaagttttgccataacgatgaatattagaaaaaagaccaacaagatcttgcttgtacggtaaatatgattttctcttgtcttcttctttaatcgctttattcctcagataaaacttctcatgtgcagaaactgtaactgaaactgaaactttcttcttcgatttggaagattcatcatcatcatctctgtttgttgggttcaagaatttaagtgattgtttaccatcacttttacttctcttgagaaagtctctcaaacgccatcgtttcgttgaccatgtagaggttgatgatgatcctgtagatttgctttttctacatcctccacttggtgacatatccgccgtagatctcgctggtgtccatggacaatagatctcgctcgggatcgaatcaaactcgtcgtcttcttcttcttcgtcggaagacgatgagtatgtttgttgcggtggttgttgatcgttacgttcacggaggaatagatccttcaacggaattactttctccggagaaacatctccggagattagattcttgttaaatacagggaaaactagtccaccgtcaccggaagaagaagtcgccgccgtcgaaaactcgaattcggcgtctgatttctctttgtaacagactcgttcggcgatttcgacgagtctatcgccggaataagtactgaagctaggtgaaaacgacgccgttgcatcgtctttctccattggatcagattttttacagttgagaaatgaaaaaagcgtgtgaggaagaaagagagagaggttttggagtttttctcgagccgaattccgag

SEQ ID NO: 309 - DNA, 921 bp, Arabidopsis thaliana
  unsure (1)..(921): unsure at all n locations
  Clone ID: ARATH-23APR03-CLUSTER1622_1
gaattttagaaccagaaaaaagaagaaaaaagtagcagcaatggcgacatctgttgcgactctatcttcaccaccaccggtatctctacctctcctctcatcatctcgctcttccttcttctccaattgtttcacagtcacgacacgaccaaacacccgttctctggtagcgatacgacgcagaatccgacaagatcacattaaaaaccagaaaaaaaaaaaaaagtagcagcaatggcgacatctgttgcgactctatcttctccaccaccagtatctctacctctcctctcatcatctcgctcttccttcttctccaattgcttcacagtcacgacccgaccaaacactcgttctctggtagcgattggacgcagaatccgacaagaaccaacgagaaagccactgacttgtaatgctttgtttggtctcggtgtgcctgagcttgctgtgattgctggcgtcgctgcgttgctttttggacctaagaaacttcctgagattggcaagagtattggcaaaaccgtcaagagctttcaacaggctgcaaaagagttcgagtctgagcttaagacagaacccgaagagtctgttgcagaatcatctcaggtagcaacgagtaacaaagaagaggagaaaaaaactgaggtttcttcaagctcaaaggagaatgtatgaagatgagagacttcagtgtttgcttttccttgtagctacaacaattttatgtcatgaagagtttagatcaaatattattgtctggaggaaacaaaatagccttccaatgaaaagtataaattaatttgtgtttgataaaaaaaaaaaaaaaatgcgggggccggacccatcgctnaggggcgttnnatactggcgngntaacgggggnngnaaccgggtnccattaagctgannatcccttng

SEQ ID NO: 310 - DNA, 1656 bp, Arabidopsis thaliana
  Clone ID: ARATH-23APR03-CLUSTER16336_1
attccatgtgcaataataagagtcgatcaccaacttcgctgtgtcactctctctatatataaagactttccctcctttagacttgggcattatccaaaaaatggagaagaagaagaacaacaacaatggaggagattttggagaagaacaaaggtccattgacggagacatactcgagtcaatcctctcctatttaccactcctagacctcgattcagctagccaagtctccaaatcatggaaccgcgccgtcttttactccctccgccgccttaaaaccatgaccaatggagaagaagaagaacaacaacaatggaggagatttcggagaagaagaaagttccattgacggagacatactcgagtcaatcctctcctatttaccactcctagacctcgattccgcttgccaagtctccaaatcatggaaccgcgccgtcttttactccctccgccgccttaaaaccatgccgtggttgttcgtctacaaccagagaaattctccgccgtacaccatggcgacgatggcgatggcttatgatcccaagtccgaggcctggatcgagctcaacaccgcatcatctcccgtcgaacacgtctccgttgctcgatcctctcactccacgttgctctacgctttatctccggcgagattctctttctcaaccgacgcgtttcatctgacttggcaacacgtggcaccgccgagagtttggaggatcgatccaatcgtggctgtagtcggacggagcctgattatagccggaggtgtgtgcgatttcgaggaggatagattcgccgtggagctgttcgacatcgaatccggagacggagcgtgggagagatgcgaatcgatgccagattttctctacgaatccgcgtcgtccacgtggctttccgtagcggtgagttcggagaagatgtacgtgacggagaagagatcaggcgttacgtgtagtttcaatccagtaactagatcgtggacgaagcttctcgatctctgtcccggcgagtgtagcttatactcacgttcgattggattctccgttaatcgtttaattatggctgggatcatcggagatgaatataatccgacgggaatcgaactgtgggaagttatagattctgacgaatcgcatttgaaattcgagtcgatcggatctatgcctgagacgtatttggagaaactaagagggattaattctgattggccgttaacgtcgatagtgttgaacgcggtgggagatatggtttatgtacatggtgcggcggagaacggcggagagattgttgcggcggagattgaaggaggaaagctttgtaagtggaggactttgccaaacgcagacgctacttggaaaaaaagtcacgcggctgagagagtaatcgttgcgtgttcaaacgttggttttagcgatttgaaacttgcgtttaggaataatttgagttttctctcaacgtcaaaatattgaatttaatcgtgtccgttaaattcaaagcttctagtcactttggcaatttcgtgttagctattttcaactaagcgagtgtgtagtgctcttgtgagatggattttaattagcgcatagggcccaaaattgtagcccattaatgatgcatggacgcaatttggttatccaaaaaaaaaaaaaaaaa

SEQ ID NO: 311 - DNA, 1551 bp, Arabidopsis thaliana
  unsure (1)..(1551): unsure at all n locations
  Clone ID: ARATH-23APR03-CLUSTER16341_1
gtagaccatcctaatcgaataacattagttttgctgcgtttagtattcaatttcatcgacccaaatcaaaatatataggatactagataaagagtgactgaaggagagaaaaacaaaaatggcgattgtttccgtctctaactcttttctcactttcaattctcccaatcagctccgatttagccgaagaagattctctgccatggcttcttcaactactggagtgagagtcgctgaaggagaaggcaatttgccaaaactagtccttacttctcctcagaacagcgaggctgagatatatctcttcggaggctgcattacttcttggaaagttgcgagcggtaaagatcttctttttgtcagaccagatgctgtcttcaataagattaagcccattagcggagggattccacattgttttccacagtttggacctgggctaattcaacagcatgggtttggaaggaacatggactggtctgttgtcgattcccagaatgcagatgacaatgctgctgttactcttgagcttaaggatggtccctatagtcgagccatgtgggactttgctttccaggctctatacaaggtcattgttggcgcggactccctttccactgagctaaagattacaaacacagacgataaaccattttctttcagcactgcgctgcatacttacttccgtgcttcttctgcgggggcctccgtgagaggtctaaagggttgtaaaactctcaataaggatccagaccctaagaacccaatagagggtaaagaagacagggatgcagtcacttttcctggatttgtggataccgtctatcttgatgctcccaatgaattgcagtttgataatggcttgggtgataaaataatcatcaaaaacacaaattggtcggatgcggtcttgtggaacccgcatactcagatggaggcttgttacagagactttgtgtgcgtggaaaatgcaaagcttggggatgtcaagctagagccgggacagtcttggactgcaacacaacttctcagcatcagttgaaaacattgtactttaaacttataatgtccagtggatccattttcttaagcaataaaagttttatttcctctcccaaaaaaaaaaagtagtccccacaactgcatttcccatctctgaaatgatggaaccttgtcctatctctcattacaatatccctcttgtatatcttaaagatgagcttcgttactttgtgacaatctttgcatactcggagattcttcattatacgaataatggttcctggtttagtcttgattaacccgtatgtaatagccaatttctcgctatgctgatgcacaatagcctctctttcatcatcatcaactagatcaagcagcatctcttctaactctggtacgtacccgttttcctcaagtttccttctcatgattctccatttagattgaattttctctatctctggngtgtgatncggtctcccgctaaaaactcgtgtgtggtcccttccaagctaattgtactacatcctggaacttttgctactcctt

SEQ ID NO: 312 - DNA, 1545 bp, Arabidopsis thaliana
  Clone ID: ARATH-23APR03-CLUSTER16376_1
tacagagagatagattgggaattgaatttgggaatccaggtttagggatgaatcgatcaacgatgatgattatgaggattgaagagtcggcgattgttttgtctctgctcaaatcggatctccggccgatggaagacgttttatcggaattcgactctaagttcgaaagcggtcgttacctcagtgtctgcaattctctttccatgatgttgcaggatcagcagatgtttaagaatactgaacgtctaattgcatttggtatcatataccagtgttattcttcacagaagccatctttcaacccgtttttatctgaaatgataagtgctgcttgtaatgaacagctggaaaagtctgaaagggcatttcttctccacctgttacaatggaatagttacaacaacgtgaaagagattctcaaacactcagctgttgattatatcagatcgtttgatccttcaactcatgattttccggaactaggagagctgcaacgagagtatggcgacaaagccgatcctggaccatctagtcacatttttgcagactattccctgaaaaagctattgcatgatcctgatgttcctcgtgggtgtgatcctaactctccagagtttgatgtgcaagctggagtgaatcccagaattggatctggtgatagggatgaggcactatctggattcttaggaaatttgacaatggggggattaggtcctaggtggatccgtccatgtccaccaaggtacccagttcatcagagcgagttgctttggattgaccctgataacaagcatgagcttgtttgggacgataaaatgtgtgctgatactagcagtggtgcaacagttagagacttgcttgttaagggtttaaaggtgacactttcacctacggagcaagaggacatcattacagaattggcaaatgacccaaagcttgtctttcactgcggaataactccacggaagctgccgcaattagtagagcacaatcctcagatagcagttgaaattctcaccaagttgaataactccacagagattaatgactattatgaagctctaggaaatatggacatgagcctgcactcaatggaagttgtgaataggctcacaactgcagttgaacttcccaaggacttcatacggatgtacatcactaattgcatatcgtcttgtgagaacgctaagcaagacaaatacatgcagaataggcttgtacggcttgtttgcgtcttcttgcaaagcttaattcgtaacaagatcatcaacgtgaaggatctattcatagaagttcaagctttctgcattgagttttctcgggttcgagaagcagctggtctcttcaggcttttgaaacaattggatgaataatttactctttcttcttcttcttcttctaatcatcttcgtctccattttattgtattccctatttttgtagctaaagaaagtactttattttgaatccaagacagttttcgcttaaaatagagtttcattctcgattcatatgtttttacaacaaaaatttctggttagactt

SEQ ID NO: 313 - DNA, 900 bp, Arabidopsis thaliana
  Clone ID: ARATH-23APR03-CLUSTER16440_1
atgggaagtgtagatccttcaagactatcattggtcttgtttgcgagactgtccggtttagtagtcgcagtttatgggaagtgtagatccttcaagactatcattggtcttgtttgcgagactgtccggtttagtagtcgcagtttcggttctgtactgggctctcttcctgcctaatctaggactcagctactctactcttcatcctctgctgatggtgattggcttcattcttgtaagtggagaagcgattctgatacacagatggttgcctggttcaaggaaaacaaagaaagctgttcatttatggctacaaggaatggcattggcctctgcagtgtttgggatttggacaaagttccattaccaacgtggagttttcgccaatttctacagtctccattcttggatgggtttgctctctgtttctctcttcgctgcccagtgggtgactgggttcatgagcttctggcatagaggagaagtacggactacaagaaccacgtttcttccctggcatgtattcctcggactctatacctatggtttagccattgccacagctgagaccggactgcttgagaaactgacgttccttcagaccaagaggaatgtccccagacgcggttctgaatcaatgactgtcaatggtttagggcttggcttggctctactcggttgcattgttataactgctgctattttgccaaagtatcagagccattctcgtgatgagaaactcgtttattcatctcaagatcgtcctaaatgtttgtcttcttgagtttttaattttcattctttttagtttggattggtttggggacaaactacacatctctggtgtacaaaaagaacaaattagttcttcgaaaatgtattaccgcattgtgccgatgg

SEQ ID NO: 314 - DNA, 3335 bp, Arabidopsis thaliana
  Clone ID: ARATH-23APR03-CLUSTER16494_1
atgccgcgaagcagagacgaagacgatgaattagacggtgactacgaagcattagatttagaggaagaagaggaagaagacgaagaagaagaagaagagagaggaagaggtggcggcggttctagacggaagagaggaagatcgaattttatcgatgattatgctgaggaagattctcaggaagaagatgatgacgatgaagattatggtagtagccgtggaggtaaaggagctgctagtaagagaaagaagccatctgcttctattttcttagaccgagaagctcatcaagttgatgatgaagacgaagaggaagaagatgaagcagaagatgattttattgtggataatggaacggaccttccggatgagcgtggtgatagacggtacgaacggaggtttcttcctcgagacgaaaatgatgaggatgtggaagatctcgagagaagaattcaagagcggttctcctctaggcatcatgaagaatatgatgaagaagctacagaagttgagcaacaagcgcttttgccatcagtccgtgatccgaaattgtggatggtgaaatgtgcgattggccgtgaaagggaggttgctgtttgtcttatgcaaaaatttatagatcgaggagctgatttgcagattagatctgttgttgcccttgaccatcttaagaattttatatatgttgaagcagacaaggaagctcatgtgaaagaggcaatcaagggcatgaggaatatatatgctaatcagaagatcttacttgtcccgataagagaaatgacagatgttctttctgttgagagcaaagccattgatctatcacgggatacctgggttagaatgaaaatcgggacgtataaaggtgatcttgcaaaggtagttgatgttgataatgtgcgtcagagggtcacagtcaagttaatcccaagaattgatctgcaggcactagccagtaagctggacggaagagaagtttcaaagaaaaaagcctttgttccacctccacgtttcatgaacattgatgaagcgagggaactgcacatacgtgttgagcgtcggcgtgatcacatgactggtgattactttgaaaatattggtggcatgcttttcaaagatgggtttcattacaaacaagtatcattgaagtccatcactgttcagaatgttacaccaacttttgacgaacttgaaaaattcaataaaccaagtgaaaatggagagggcgactttggtggtctgtcaacattatttgcaaacagaaagaaaggtcatttcatgaagggtgatgcagttattgttatcaagggggatctgaaaaacttgaagggttgggttgagaaagctagatgaagaaaatgtccttatcagatcagaagtgaaaggtctccctgatcctcttgctgtaaatgagagagagctttgcaagtactttgaacctggaaatcatgtgaaggttgtctctgggacccatgaaggagcaacaggcatggttgtcaaagttgatcaacacgtccgagtgtttgctgatcatgttgttgagagttcagaagtgacaactggtgttaccaaaattggggactatgaacttcatgatcttgtgcttctggataacctgagctttggagtaattatacgactagagaatgaagcttttcaggttcttaaaggggttcctgacagaccagaggttgctcttgtcaaactcagagaaatcaaatgcaaacttgagaagaaaatcaatgttcaagatcgctacaaaaatgccattgcggtgaaagatgacgtcagagtgatcgagggtcctagcaaaggtaaacaaggtcctgtaaagcatatctacaaaggagtcttatttatatatgatcgacatcaccttgagcatgctggatttatctgcgctaaatgcacatcatgcattgttgttggtggatcacgttctggtgctaatagaaatggtggtgattcgctttcaaggtatggcaatttcaaggcacctgccccagtaccctcatctccaggaagatttcaacgtggcagaggcggaggatataataactctggagggaggcatgggggtggaagaggacggggagacgattctttattgggtactactgttaaaatccgtctaggacctttcaaggggtataggggacctgtagtagaagtgaaaggaaattcagtgcgtgtagaacttgagatgaagattgtgacaggcaatcccttggattcaccacataatgttgcgacttcaccatgtcgaacgaactctaacaatagttcatatatgcagttgatcggggtgcaatatcagataatgttgcgacaacaccgtttagagatacatctcggtatagtatgggaagcgaaacacctatgcatccttcacggactccacttcatccttatatgactccaatgcgggactctggagctacaccaatccatgatggaatgaggacacccatgcgtgatagagcttggaatccttacacgcctatgagtccacctagggataactgggaagatggaaatccgggatcttggggaacgagtcctcaatatcagccgggaagtcctccttcacgggcatatgaagcaccaacgcctggctcaggatgggctagtactcctggtggtagttactcggatgcggggacacctagagaccatggttcagcttatgctaatgccccaagtccttacctgccatcaacacctgggcaacccatgacaccaagctccgcttcagacttccccggtactcccggaggacaaccaatgactcctggaactgccctcgatgtcatgtctcctgttataggtggggatgctgaagcatggttcatgcccgatattttggttgacatacacaaggctggagaggacaccgatgtgggcgtcatccgagatgtttcggatggaacgtgtaaagtgtctctcgggtccagcggtgaaggtgacactataatggccctcccaagcgaactggagataattcctccgaggaaatccgatcgtgtcaaaatagttggcggtcagtatcgtgggtctacaggtaagctgatcggaatcgacgggtctgacggtatcgttaagatagatgataatcttgacgtcaagattctggacctggccttattagccaagtttgtgcaaccgtgatactgttctaatgaacgttaacttttatcttgtgagactcgtatattgtaatcttatattcctcaatagtttataaagaaactttgaatcttgtttatcatcagagaaaacatctgaatcttatctccagttttgtgtttttcttgtaatgcctctatcttttctat

SEQ ID NO: 315 - DNA, 1446 bp, Arabidopsis thaliana
  Clone ID: ARATH-23APR03-CLUSTER1669_1
agactcagtgaggattttctaggcgattttctcgagaaaatgaggttttggttttgttgactcagtgaggattttctaggcgattttctcgagaaaatcgtttgaggaaaatggagacttctatgaggtataccagcaattccaagtctatgaagattcatgccaaagagaaggttccggtgaactcaaaaacccatttacagcttcatggagagttagatactggaactggggctccgagttacttctgtgcgatgattagacacttttttcctgaggcttcaacaggccttggggtaggattgcattatgataagcgccaaaagcttcggtgtcttgtacgcggaaaaaaagagtttcctgtaagagctgataagcgtgtaacctttaatattaaagggcggtgtgatattgatcaggacttaaatcagaagaaccccaaaggagcagcagaatttgcctggaacataatggatttcaaggaagatcaggatgtacggatcaaagttggctacgaaatgtttgataaggtcccttatatgcagattagagaaaacaattggactctcaacgcgaacatgaagggaaaatggaacttgcggtatgacctgtaactgcatttttttcaatcatcatctgagaaatgtattgataccactgctgatgaacacattttaattctaccaattaatcaaattcagagatcttccaaatcatcatctcttaaaggaaatgtcgttgttcctatgtcggataatagggttcgtagcaatatgtagtttgactttataagtagacttaaacactcctagatccctcagagatccattgatcatgaaccgtacataacttaaccggtaaaaacatgctaaaccatcaagccgaaattcgtcatgatttcactaaccaattccaaacccggaccatcgaaaaacaaactaactcagagcggtttggtttagttgaaattgagatggtgctgctcggaacatcaacatcagtaccaaaatctgagttaaaaagagtgttgatcttcagaatccgaagatggggtatgctcaagatttgcttactgatcatcatcactcaaaaagagggaaaatgaaaagatcaaagatcgttttcaaatggtaaaagaaaaactgaaaaagagactgagacaagtcaccaattttatcgttagatttgttagtgacttttacaaaattccacgtgatctctatgtatgattaattataatatctacaataatgtttttattagaggcggcgatatgtgaaagctcttaagtgatgaggtcgcttttggttttattatcccaaaagaaattttgttaattaaactgcactagatgtgacaagttttatcccaaatctttgttacatacttttaaatttaattccccaacttgtaaagatatttttgaaagcaaaaaaaaaaaaaaaa

SEQ ID NO: 316 - DNA, 1731 bp, Arabidopsis thaliana
  Clone ID: ARATH-23APR03-CLUSTER16707_1
tggtcttcaagggtttcgacttttgtgcggtagccattaacgttgttgcagaggaaagctggaaaatagagagttcgatgaactcttgttactataatggaggctcaggagtttgaaaaccgagagatttcccccggttcgaggttcctgattgagaatcagatcagaagtagctcaatatgttgacaactaccaccgatgaggaaatagacttgtcctgcgacggaggtgtcacggagcctcaaaaagttgctataatcttcgcgttttgtggtgtaggataccaaggaatgcaaaagaatcccggcgcgaaaaccattgaaggcgagctcgaagaagctttgtttcatgccggagctgtaccggagtccattagaggcaagccaaaactatacgatttcgcacgatctgcacggacagataaaggagttagtgctgttggacaagtagtttcaggtcgctttatcgttgatccacttggattcgtgaatcgtctcaattcaaatctccctaatcagattagaatcttcggttacaagcatgtaacgccgtcgtttagctccaagaagttttgcgatcgaagaaggtatgtgtatctgcttccagtgtttgctcttgatccaatctcgcatcgtgatagagaaacagtaatggctagtttgggtccgggagaggaatatgttaagtgctttgagtgctcagagagaggtcgtaagattcctccaggtcttgtgggtaaatggaaaggtaccaactttgggactaaatcattggattttcagtcagacatttcgtcgaacaactctagtgcattaagaagtgacatcaagattgaagctttgagttctaatttagctggcttatgctcgtccgcccacgcgtccggtaggatacaagaagacagttgtaaattgaatacaaattcatcagagactaaggtaaagagcaagttttgttatggtgaaaaggaaaaggaaaggttcagtagaatactaagttgttatgttggatcatataatttccataacttcactacaagaacaaaagcagatgatccgactgcgaatcgtcaaatcatctccttcactgctaatactgtgattaatcttgatgggattgactttatcaagtgtgaagtcttaggcaaaagctttatgcttcatcagattcggaagatgatgggtcttgctgttgcaatcatgcggaattgtgcttctgaatcacttatccaaagtgctttcagcaaggatgtgaatataactgtaccaatggcgccagaagttggactttatctggacgaatgcttcttcacgtcttataacagaaactttgaagacagtcatgaagaagtgtccatggaagcatacaaagaagaagctgaagcattcaaattgaagcatatctattctcatatcggcgctacagagcgaaaatacggaaatatggctctttggttacattccttgaactatagaaactatccagacctaaactttggcagctgtggacaaaacacagaccaagttcttgttcataagaaaattgatgaaagagcaagtcatagtctctaagcaaaatgatggaagcttagtttgaagattttgacattgtttttgttattgttggttaatcccaccatttttgtaactttttaatcaaattagtatatttttgtgttgtaaggtgacactaatgaattgatttgttatcctccaaaaaaaaaaaaaaaaa

SEQ ID NO: 317 - DNA, 1401 bp, Arabidopsis thaliana
  Clone ID: ARATH-23APR03-CLUSTER1673_1
ggtctcactgaaactgtgaaaattttatctcttttatagataaagaatcttgcttttttcagttttcagtatgaagaagaattgaagagagtgtccgaggaaggagacctttggttttcagtttgtgagtcttgttgtaatggctttatcaatggagtttgggttttcaattgggtcatgcttcaaggcaccaaacccacctgttctaatctctgcaagccctaataagatcaatttcacgttgagaaggagaaagaaaagattcttacttagagtctctgctgtgtcgtataaggaattcgcagagtctgctttagaagaaaccaggaaaaggatcgttcttgaaccttcacatctccaggaaaagtatagtagcatgacaggactagatggtaagaccgaacttcaaatgcttgcttttaaatcttcaaagattagactcttgaggagtatggcaatagagaatgagacaatgcaggtctttgactttgcgggtttcatggagcctgagtatgatactcccatattctgtgctaactttttcacatctaccaacgttaacatagttgtattggaccttaatcctttgcatcagttgactgaccagacggattaccaagacaagtattataacaagataatgtccatatatcacaaatatgctgagactttcccatggggagggaaattgactggtgaatccataaagtttttctcgcctttggtgatgtggactaggttttcgtctagcaaagaaaaacataaggctttgttctctgcgtttctagagtactatcaggcatggcttgagatgacaatccaagtgagggaggagatggaaccatctcatgtgagagccaattgtgaagcacaacacaagtacctgacatggcgagcacaaaaggatcctggacatggtcttcttaaaagattagtaggtgaagcaaaggcaaaggagctgctaagggatttcctgttcaatggggtggatgagttaggcacaaaaacattcattgattactttccagagtaccaaacagaagatggaactgtaagcgataaacgaagtatcattgggaagtcatatgaaactcgtccatgggatttaacaggacaatttatcggctaacaatgatatatgtgaacaagtcagatttcagagtcatcaacacaagaggacgtgaacttagggaagtaggaataagaaagagcagcatgaggagtctctcaggtctatctgcatttcaagatgattgtttgagttaccatgcattgtagttttacaagtgtagctctcagcccttcatcaaaatgagaatcctcgagtatgatatgattttaatgaaaatgtattcgtctctacctaatcaacagagattaacttaaaaaaaaaaaaaaaaa

SEQ ID NO: 318 - DNA, 1162 bp, Arabidopsis thaliana
  Clone ID: ARATH-23APR03-CLUSTER16842_1
ccctctctttaagctctctctctttctgtggctattctctttctctctttctctctgaatccgcctacacgccttctccatggcctggttttgccgcttgagcgtactttcgccggcgacaaggctcgcagcgacatggcctggcttagccgcgtgagaggagtttcgccggtgacaaggctcgcagcgattcgtcgatcttttggatcagcggccgcgttggagtttgactacgactccgatgacgagtacttgtacggagatgatcgccgcctcgcggaaccgaggcttgggttggatggatcggggccggatagaggagtgcagtgggtgcttatgggagcccctggagcatggaggcacgtcttcgccgagaggctctccaaactgcttgaagttcctcacatttccatggggtcccttgtccgtcaagaactcaaccctagatcttctctctacaaggagattgcaagtgctgtaaatgaacgaaagctggttccaaagagtgttgtgtttgcgttgctatcaaagaggctcgaagaaggctatgcaagaggggaaactggtttcattcttcatggcattcctcgcactcgttttcaagccgaaactcttgatcaaatcgctcagattgacctcgttgtcaatctcaaatgctctgaagaccatctggtaaaccggaatgaaacagctctgcctcagcaggagttcctcggctctatgttacactcacctgttgcaatcaatgctcggagggagagtgtcggtgtctacgcacaggaggtggaagaatactataggaagcagaggaaactgctagactttcatgttggcggtgccacatcagcagacacatggcagggcttgttggcagctttacatctgaagcaggtgaatttgacgacttcacagaagctaactctgtgatgatgaactacaaaacagagctttgctttataaattttgatctttctctctcattttatgggtcttcttaacccctaatatgcaactttttttttgttttctttttctgtaattcaaagttttgcgagagatcaaacgtgatgaggatgataccactaaagcttgtaatgagtctattatatatacaacaaagattttccatctaaaaaaaaaaaaaaaaaagcggacgcgtggg

SEQ ID NO: 319 - DNA, 2760 bp, Arabidopsis thaliana
  unsure (1)..(2760): unsure at all n locations
  Clone ID: ARATH-23APR03-CLUSTER16861_1
gaaaataatttctcgaaagagaaaaaaagagagagagagagagagatggagcttctacagtactaaaagctgagtgaatcccaanaaatctccgccaacggaatattttttttctgggagctgaaaatcgttggtgacgatggcggattctctttctagggtttacggaactctgtttagtggtgttaatatatctctcttctcggatccaccgttgaaaaccccctgaagagtgtttttttttccgggtttaaggtcttttacgtttcgttttttcttgagatttcgtcttccgctgtgagtttctgttctcgcggcgagtttttgtgtagatctgagggttttcaaggcaagagaaagtgtcggtgatgtcgattttctcactcgcgagctcttctgattcacaaagagatgacctaataatggcgttgaaggcggtggttattgtatattgtgtggtttctctcgtcagtgttcaattagctgatgctcaacatgaaggactgccagtttcaccaacgttatcaccttcaacttcaccagttatcactgatctgcccctaccagctgaatttccgcggtttcacagaaagtatttcgcaccacaacaagcagaagcacctcagcattctcccccttatagtcgtttggtcgcttctgatcatccccctaccagctcacatttctccaaaccttccatgaaaaggaatgctcagtctcctggagccggcttggctgatattgctccagcacaatctagcaatggtgttcttcctgatgccttaactcagccacctttgtcgccctccatttcaaattgttgcaaatcagatatggtgcttaaacgaagaagtattggttgccactgcgtgtatcctataaaactggacatccttctcttgaatgtttcagaaactcctagttggaacatgttcttgaacgaatttgctacccagcttggtctcctacctcaccaaatcgagctgattaacttctatgtgctaagcttatcaaggatgaacatatcgatggatatcacccctcattctggaattagtttctcagctagtcaggcatccgcaataaactcttcccttatcagccacaagattcaatttagccctactttggtgggagattacaaacttctaaaccttacttggtttgaggcccctgcaccttcgcaagcacctctagtggcttcttcacctcataaagcaccatcacaaggatcctcagcaactacgtcagtaagatctccagggaaaaagaggcatcccaatcttattcttatcttttctatagccgctggtgtgcttatacttgccataatcactgtacttgttatttgttcccgcgcactccgagaagagaaagctccagatcctcacaaagaagctgtaaaaccaaggaacctggacgctggttcatttgggggatctcttcctcacccagcaagtacacggtttctgtcatatgaagaactcaaagaggcaactagcaattttgaatctgctagcattctaggagaaggtgggtttggcaaggtttacagaggcatcttagccgatggtactgctgtagcgattaagaagctcacaagtggtgggccacaaggtgataaagaattccaggtggagattgatatgcttagccgtcttcatcatcgtaatcttgtgaaacttgtgggttactatagtagtcgagattcttctcagcacctactttgttatgagcttgttccaaatggcagcctcgaggcttggctccatgggcctctcgggttgaactgtcctcttgattgggacaccagaatgaagattgcacttgatgctgcaagaggacttgcataccttcatgaagactcgcaaccctccgttatacacagagattttaaagcctctaatatactccttgaaaacaacttcaacgccaaagttgcagattttggcctagccaaacaagctcctgaaggcaggggtaatcacttatctactcgtgttatgggcacatttggatatgttgcgcctgaatatgcaatgacgggacacctactcgtcaagagtgatgtttatagttacggtgtggtccttctcgaattgttaactggtagaaaacctgtggatatgtcacaaccttcaggccaagaaaatctcgtcacttggacaaggccagttttaagagacaaagaccggttagaagaactagtcgattcaagacttgaaggaaaatacccgaaagaagatttcataagagtatgcacaatcgctgcagcttgtgttgcacctgaagctagccagagaccaacgatgggcgaagtggttcagtcacttaaaatggttcaacgggtggttgagtatcaagacccggttttaaacacttcaaataaagctcgtcctaaccggagacaatcatcagctacgttcgagtcagaagtaacctcttctatgttctcttctggtccttattctggtctaagcgcttttgatcatgaaaatattacacgaacaactgttttctcagaagatcttcacgaaggccgatgatagaagccagggttttcttctttttatttgtttttctcccacttacggtgagaaaatttccaccagagaagcttttgagtttgggacattattacagctctttggattttggattctcctttattggaggatagaattttgtatatatttttgcgttaattaattaatatttgccacaaccaaaaaaaaaaaaaaaaaaaaaaagggcggccgc

SEQ ID NO: 320 - DNA, 2425 bp, Arabidopsis thaliana
  Clone ID: ARATH-23APR03-CLUSTER16868_1
gacacgtctgagaaaacaactcattcaaagtttgaaaactcatgggctcgctggagccgacccaggaacggcaaaaatctagaagcgccaagttttcttcaactctttaacgtcgttgttgtcttcgtcaccaagtaaaccctagatccacaatttcaacggaaatttcattcttcttcttcttcctcgcgaatctgttttttttttgatattcgattctactttccctttccatcaaaaaacatttcgtcgacgatttcacgcgatgtccttctccgattctggatcgtcctcttatggcggagattacaagaatttcagacaaatcaccagagaaagattactttgtgaaatgcttaggccagaaagaaatggaagctctaaattaacttggaaggtacttgtaatggacaagttcactgtgaagataatgtcatctgcttgcaaaatgtctgagatcacacaaggaggcatttctttggttgaggttataactaaacataggcaacctatgacagcaatggaagtcatatactttattcaaccgaccgaagagaatgtcactgcgtttttatcagatatgactggaaaatcaccactttacaagaaggcttttgttttctttagttctcctgtttcgagaagcttagttaatgtcattaagaaggacatgagagcaatgaaacgaattgggggattgaaagagatgaacttggagtatattagcatggacatccagggctttgttacaaataatgaaaatgctttagaagagcttttctgtgacgacgaaaaccatcaaagagcagatgcttgcttaaatgtggtagctaaaagaattgctacagttttggcctcactaaaggaatatccctttgttcgctaccgcggagccaaagctcttgatgccacaacaatgacaacttaccgagagttgattcctacaaagcttgctgctagtgtatggaattgtcttgcaagatacaaacagacaatcgaagattttcctcagactgaaacatgcgaactacttatcttggatcgatccatagaccagatcgcacctctcattcatgagtggacatatgatgcgatgtgccacgatttgcttaatatggaaggaaataaatacacacacgaggttccgagtaaaactggtgataaacctgagaagaaagaggttcttctagatgaggaagattccatttgggtggagcttcgtgatgctcatattgcagatgcaagtgaaagattgcatgaaaagatgacaaacttcgtgtcgaagaacaaagctgcgcaattgaaacacagttcaaaagactttggtgacctttcatcaaaagacttgcagaagatggttcacgctttgcctcagtacagtgagcaaattgacaagctttctctacatgttgagatcgctagaacaataaacagaactatcatggaacaaggtctaagagatctcgggcagctcgagcaggaccttgtttttggggatgctggaagaaaggacgttatcaaatttctgagcaccaaccatattataagccacgaaagcaagctgaggttaattatgattgttgctgcaatatatccgaagaagttcgaaggtgaaaagggacgtaagatgatggagctagcaaaattgtcgggcgatgatgtagtagctgtgaacaatatgagattacttggaccagtacatacggagtgcaaaaagagcacaacaggatcttttcctctcaagtttgatgtccttaagacgaagcgagctgctcgaagagaccgagttggtgaaactcaaacatggcaactgtctcgtttttacccgattgttgaggaacttgttgagaaacttagcaaaggtcatttgccaaaacaagattacccttgtatgaatgaaccaaagccaaccttttattctggctctctgtctccatcagcgagtccggtattgcctcattcaagacgaacaccaacatgggcaagacgccatctttctgatgatggatatttcagtgactcggttctaggacgagcatctagtgggttcaagagaaagggacagcggattttcgtgttcatagtaggaggagcaacgagatcagagttaagggtttgccacaaacttacggagaagctcgacagagaagtgatcttaggctcctccagcttccttgatcccctaactttcctcactaaaatgaaacaactaaacgaagaagaggaaatctcacttgatgatattgtcatttgattagcaacttggtatcgaattttgttttggtaataaaatgatgggacggacatatgttccctatgtaaataaatacaatttatttgttcctttggtttgactaactaacggggttgctttatttaattgaatacttcatggttcttactaaagaaaaaaaaaaaaaaaaaa

SEQ ID NO: 321 - DNA, 1514 bp, Arabidopsis thaliana
  Clone ID: ARATH-23APR03-CLUSTER16909_1
ggcggctctgttgttgatcttcttctccggtgactcttactctctgtgtaaaaaagcaaaatgatgcgttccgttgacgtctacgtgaaaactctaggccctcccgtccgttcaattctctactcgatctttacctctcagcaaaaaccttcgtcgctgccttcgcttccatttcacttttcgttgcgttcgtcgtcgaatattcccactcgttgtttctccaatgtcgttgcgaaatccaattctccgatttacgattttcaaggattccgaaatctcttcactgagagggctatctcttcgtctacgacgacccccgtcgcttctgctcagccgcagcagcttcagaatcagaatcagcatccagctgaggttgatgaagagatttctatgggcttagaggacgaagccaagctttctattcctgtgcgagcttatttcttctccactagcgttgatttgagaagcttaatagagcagaacaagcagaacttcatcccacctacttcgcgtatgactaactatgttgttcttaagtttggcaatcattctgatcccactgatactactcgaggacgcataagtgggagtgagtctatttacatggtagtatttcattatggatcgattgtcttgtttaatgtaagggaacatgaggttgatgaatatcttaaagtagtggagaggcatgcctctgggttgcttccagaaatgagaaaagatgaatatgaagtaagagagaatccaaatctggacacatggatggaggtaggacgggattttatcaggttgcagttcttgaatactgatgggatcagaaccataggatgtgttctgggccagagtattgctctggattactatggccggcaggttgatggtatggtagcagaatttactgagataaaccgtcagttggagataacaggaacgtttacaatgaaaaggaaaaagctgttccagttggttggaaaggctaatgtgattctggctgatgtgattctgaagcttggtctttttgagaggtcagatatagcttggaaggatgcgaaatatggtcagatatgggagtttctgagagatgaatttgaactgacacagagttttgcaaaccttgattataagctcaagtttgtagagcacaacgttcgtttccttcaagaaatacttcagaacaggaaatcagctactctggagtggctaatcattatcctgattagtatggagatcgcgatttctttctataatatgtctcgggcatccttgtgatcgagatcatcctctgccatttctaaagcatattcatattctttattatggttaccacttttcttcacaatgcaaagtgataactttataacaaagctcataaataagaatgagtttaggagttaggactacgtttgttacagattctctttgcatttaagagcctgcttcttttcagtccaacaagacttggttatgcatataaaatcatttatttcacaaaaaaaaaaaaaaacaaacaacaa

SEQ ID NO: 322 - DNA, 1458 bp, Arabidopsis thaliana
  Clone ID: ARATH-23APR03-CLUSTER1690_1
aacttacacagattctctagcacaactgccatggcaacttcttctgctcacctctcgtttctcgccggacgtatatcgccgttctcctccgaacggatcggattatttcctctcagaggagaatttcgtccacgaatgacccggttccggtgctcggccggaccgagcggattcttcacgcggctgggtcggttgattaaggagaaggccaaaagcgacgtggagaaagttttctccggattctctaagactagggaaaatctagcagtcatcgacgagctcttactcttctggaatcttgctgaaacagaccgagttcttgatgaattggaagaggcgcttttggtttctgattttggaccgaagattactgttagaattgtggagaggctaagagaggatatcatgtcaggaaaactcaaatcaggaagcgagattaaggatgcattgaaggaaagtgtgttggagatgctggctaagaaaaacagcaagacagagcttcaattgggttttaggaaaccagctgttataatgattgttggagtgaacggaggtgggaagacgacatctcttggaaagctggctcatagattgaaaaatgaaggaactaaggtattaatggcagcaggtgatacatttagagcagcagcaagtgaccaattagagatatgggcagagaggactgggtgtgagattgttgtggctgaaggagacaaggctaaagcagccacggttctctcaaaggctgtgaaaagggggaaggaggaaggttatgatgttgtactgtgcgacacatctggacgtctccatactaattacagtttgatggaggagttgattgcgtgcaaaaaagcagtgggcaagattgtctctggtgcacctaatgagatcctacttgtccttgatggaaacactggtttgaacatgcttccacaagctagagaattcaacgaggttgttggtatcaccggtttgatattgacgaaactagatggctctgctagaggaggctgtgtggtcagtgtggttgaggaattgggcattcccgtaaagtttatcggtgtaggagaagctgtagaagatctccaaccttttgatccggaggcttttgtgaatgctatattctcttaagccataaaacctcgtcttcttcaaaaagctatcatcttcaacgcaggccagagccaagtggaaaattcacagtgaattcgccggagatgcaaatggaagcattccttattttcttggagatcttaggttgacaagctttttctgcaatggatgcaagtttcgatttttaatgatgtgacaaagctcgtttgcacactgatagtgatcacacaagaatgtaacgagtcataggaactgcttgtgtctcgtctcactactattttgtatattgttaatgttgtatttgaaaggaattacaaagattgataaaagaaaaaaaaagggagg

SEQ ID NO: 323 - DNA, 2314 bp, Arabidopsis thaliana
  Clone ID: ARATH-23APR03-CLUSTER16921_1
aaaatttgtcatcttcgtccccactaatcactctcgcaagcatctttcttctttccttaaactcttaaactctcgccatcagatctttttctctgatttcttgggtgagaaaataacaaagctagctagaaatggaacagtatgaagtttcttgtagcaatttggaaaagtattttgtgggacagctcttatagagagatatgaatatgaaaagaaaaaatatgtattgaaaaatctccgtctcggcccagcaacataaaaggagaagaagctcagctcgacaataggtggtgcttttctcgaagattcgtcatccttttgtgggggaaaagaaagctctgttgggagggacatgggttgttatgatgggcattgcctataacgagctagcaaaaagtgcagaggtgggcataagctatcaagaaatcctatggcaagtggcttgttcagcaaaatgatgggccgtgggtactttagatcctgaccatattcttcatcgtgatgtcaagtgttctaacatattcttgaccaaagagcaagatatacgccttggtgattttgggttagccaagattctaacatccgacgatctcacatcctctgttgtcgggactcccagctatatgtgccctgagcttttagctgatataccttatggttccaaatctgacatttggtctttagggtgctgtatatatgaaatggcttatcttaagccggcatttaaagcatttgatatgcaagcactgattaataagataaacaagacgattgtgtctccgctccctgccaaatattctggtccattgtaagttttgttttgcttgtaccttcatatatatctttgtttgtttacagtaatattttctgaatcttgtttttagccgaggtctcgtcaaaagcatgctgcggaaaaacccagaagttcggccatctgcctcagatttacttagacatccacatcttcagccttatgttctggatgtcaagcttaggctcaataatcttagacgcaaaacattaccgcctgagttgccgagttccaagaggattatgaagaaagctcatttttctgaaccagctgtcacttgtccagcctttggagaacgacaacataggtctctctggaatgacagagctctgaatccagaagctgaagaagacactgcatcttctattaaatgtattagtcgcagaatttcagatttatcgattgagagcagcagtaaaggaacattgatatgtaagcaagtttcttcaagtgcatgtaaggtctcaaagtatcctcttgcaaaatcttcagtgacatccagaagaatcatggaaactggacggagatccgaccacttgcatccggtttcaggtggtggtaccaccagcaagataattccatcagctcgccggacttctctaccactcacgaaaagagctacaaaccaagaagttgcagcttacaacccaatagttgggatcttgcagaatgtcaagtctccagaatattccattaatgagccacaagttgataagattgccatttttccattagctccatatgaacaagacatcttctttactcccatgcaaaggaaaacatcgtctaaaagctcctctgtctcagaccgctctataacaaaagacaaatgcacagttcaaactcatacgacgtggcagggaatccaactcaacatggtagataacataagcgacgggtcatcatcatctgatcagaatgcaacagctggtgcatcaagccacaccacatcctctagttcaagaagatgtcggtttgacccatcatcgtatcgtcaacgggctgatgctttggaggggttgcttgagtttagtgccagattgttacaagaagggagatatgatgaactcaatgtattgcttaagccttttggtccaggaaaggtgtctcccagagaaaccgcgatatggatcgcaaagagcttgaaggagaatcgagacaagaccaaaatggtagatctaaatgtttctagagagataccacatgtgggtctcctctgacaggctccacattgtcataacgttcggtttagttcggttttagcaaaaagagagaagagaaagaactgggttatgcttctgggatttgcaggagctagagttggtttaggtttagtttgatggctgacacttttaaaagatgagtaacagtattagtaggttgcgttggatggtctttgctttagtcgaaccggtagctttgcatttgtaatctgtacacttgatagtgttaacaccttttataacttgtattactatagacttcatgaaagtttccaatctc

SEQ ID NO: 324 - DNA, 2869 bp, Arabidopsis thaliana
  Clone ID: ARATH-23APR03-CLUSTER16923_1
aaaagccgttccctcttctctgtactcgaaaccctagtagttgctctatccgattttagggtttaagagtcgaatcattagcatctaccttgattacgctgatctcacttggtttcgctactcgatccttgaatttctttgttttttgtgtgtttcggtttattcgatacgtctttgatccgtaatggtgactgggtccagaactagcggtaatcgtggggtaggactcgatgatgaagcgaaaaagatgattcaatcgattaaggaagttgtggatagtcactccgatgctgatatttacactgccttaaaagaagctaacatggatgctaacgaggctgtggagaagctgattcatcaagatccatttcacgaggtgaagagaaaaagagacaggaaaaaagaggatacagtatttgttgagcctgccaacataaagaaacctcttgaaaatgttaccagtgaagtgaaagttcgtacacagcctgaacataatgttcggagaggaggctacagtaggaatttcttccccaggaacgctgctcaacgaaatgcatctcctagaaatcctgctactggatccaacaaagagtttcgcgttgttagggacaacaggtctaatccaaatgttgatgaagagttgaagcattcttctgcccagtcctctggatcaaatattaacaaagtggttgccactgtgaacaaattgggctcaagaggtggtttgggcaatcgtaactcttctggggctcaagattcaactgacgagtgtaatgctccagcagatgccaggctcagacaggctgaaattcgtcctttgcattgtcctgtcaataaagaactcggtggagttactttgccatcaaccaattcagttcttggtgtatattcgtcttccaaagatccagttcatgtaccttctcctgtttctagatcatcacccgtgggagctattaaacgtgaagtaaggggtggaggtttaggtggaaaaccttctgaaaatgttggtaaagatccatctgtgccctctttttcagggtcctctattagaaaaaatggacctccaaatgcacatcgaccatcttccccaacttcaaagattgatcacagtcgaactactgcacgtgagtctgttatgcccagtggagtggaaaagaataggtcatatttgaacagacagcgtgggaatagaggaagccaatatgctagaacacaacaagttggtggccatacaaagggagcctcacagaacaaggagtggaagcctaaatctaatcagaaacctgttggacataaccctggagtaattggaacacctacaaagtctcaagctcgtcgtcctgctgataattccataaatgtggaaacagaagccgtcaagttgcagaataagctttcacatgttcatataagtgaaagtcagaatgtcatcatcgcagatcatattcgtgtcccggagactgaccgctgtcagctaacttttggtagctttgttcaagagtttaattcctcaaggaattcagaatctgctttcgaagaatcacactcttcagaagaagttagagaatctgatcgtagttcgccagttacttgtcctgaggcttcagcagatggtccgggcgttctgcctatcactattgatgatcatgtcagagtttctagatctgactcacccgtctcggcagtatctgagccacagttacccgaacagaaagaaactcatagatctgacaatttggatgcgtactcggggattgaattactcaataggaatggtccaccttatactcctttggagtttgaacagcagcaagatcctccggagttgcaaaaattttctcaggcttatgacaatcatggtagttatgaatttccgtactttagtcctgcaatggatgaaactgtacgagttcaaggattaccatctccacacgagcagggattaagtgctcacatgttaaataatgccccaccatccactattcccatgttacagcaacaacagcaggcatcaatgcaacagatgtatccgcaggtccatgtttcgcattttcccaatctcatgccttatcgtcaattcctttccccagtctatgttccccaaatgcccatgccaggctactcaggtaacccagcagcatatgcacacccttcaaatggcaatagctatgtgctgatgcctggaggcggttctcatctcggttcaaatggtgtcaagtatggaatccatcagcaatataaaccagttccaactggtggacctgcgggttttgggacttacaacaatcctaatgggtatccaactaatcctcccaatgtagttggaaacgctacgggacttgaagatccatctcgcatgataaataaacatggaaatatttacgttccaaatcctcaggctgagacttctgagatatggatgcaaaatccaagagatctttcaagccttcagtctccatattacaacgtagctggacaatcgcctcatggtgcttatttatcatcccatacagcacaccaatcgttcaacccaactgcgcaatcatctcacatgcagttccagggtctcttccacccgtcacagcctggtacgatggcgaatccgcaccacatgggacctggcctcagtggtaatgttggagtcggtgtcgttccctctcctcctccgtctcaaattggtacctatcagcaatcacaacttggtcatccgaattggccatcaaacttctgaagaaaatctaacctttgtcttcttgtctaatggattatataatagccaaaagcaaatattttgattctccttatgaaacgccaaactctgttttaattaatctttatttattcaatgcataaaatgttcccagctctc

SEQ ID NO: 325 - DNA, 4028 bp, Arabidopsis thaliana
  Clone ID: ARATH-23APR03-CLUSTER16976_1
aaagtgtttattttcagatctcatcgatccatttcttctaaatcttaattcttgtgtgtattgtattgatcaaagatccaaactttcattgctgatccagccgttttagtcttcagtgaggtttggttttggtgttatagaattatgaagagcgggaagcaatcttcgcaacctgaaaagggtacttccaggatcttgtcactgactgtcctgtttatcgcattttgcggtttctccttctacctcggtggtatattttgctctgagagagacaagattgtagccaaggatgtcacaaggacgactacaaaggctgtagcttcccctaaagaacctacagctactcctattcaaatcaaatccgtttctttcccggagtgcgggtcagagttccaagattacaccccgtgcaccgatccaaagaggtggaagaagtatggtgtccatcgcttaagtttcttggagcgtcattgtcctccggtatatgaaaagaatgagtgtttgattccaccaccagacgggtataaaccgcctataagatggcccaagagccgagaacagtgttggtacaggaacgtgccttatgattggatcaataagcaaaagtctaaccagcattggcttaagaaagaaggagataagttccatttccctggtggtggtaccatgttccctcgtggagttagtcactatgttgatttgatgcaagatctgattcctgaaatgaaagacggaacagtcaggaccgccattgatactggctgtggggttgcgagctggggaggcgatcttttggaccgtgggatactatcactctctcttgctccaagagataaccatgaagctcaggttcaatttgctcttgaacgtggaattcctgcgattctcgggatcatctctacgcaacgtctcccttttccttcaaatgcatttgatatggctcattgttcaagatgtcttattccctggacagaatttggtggaatctatttacttgagattcaccgtatagttcgacctggaggtttttgggttctttctggtccacctgtgaactataatagacgatggcgtggatggaacacaaccatggaagatcagaaatctgactacaacaagcttcagtcacttctaacctccatgtgtttcaaaaagtacgctcaaaaagatgacatagccgtgtggcagaaactctcagacaaatcttgctatgacaaaatcgctaagaacatggaagcttaccctcccaaatgtgacgacagtatagatcctgattctgcttggtacactccactccgtccttgcgtggttgccccgacacctaaagtcaagaagtctggtctcggatcaatcccaaaatggcccgagaggttacatgtcgcgcccgagagaatcggtgatgttcacggtgggagtgcgaacagtttgaaacacgatgatggtaaatggaagaacagagttaagcattacaaggaagttttaccagctcttgggacagacaagataaggaatgttatggatatgaacactggttaatggaggtttctctgcggcccccattgaggatcccaatttggggcctgaaccttgtttcaccgtacagcccaaaattcgcttcccgttgtccctgatcccgggctctccggcgcgtgcctccccccccgcggggcgggtttctatttctctctgtctaagtatcacttcccctgtcccaaaaccaaaagacttgagagtgtgtctttagagagagatcttctctcttttatcttacgactctcacttcttatctcaaatctacttcaactctatttccagtctccacattttcccacaaatttcaactcttgttctcttcctccaaagtaaaaaacaaaacactgcaagtgaggtttggttttggtgttatagaattatgaagagcgggaagcaatcttcgcaacctgaaaagggtacttccaggatcttgtcactgactgtcctgtttatcgcattttgcggtttctccttctacctcggtggtatattttgctctgagagagacaagattgtagccaaggatgtcacaaggacgactacaaaggctgtagcttcccctaaagaacctacagctactcctattcaaatcaaatccgtttctttcccggagtgcgggtcagagttccaagattacaccccgtgcaccgatccaaagaggtggaagaagtatggtgtccatcgcttaagtttcttggagcgtcattgtcctccggtatatgaaaagaatgagtgtttgattccaccaccagacgggtataaaccgcctataagatggcccaagagccgagaacagtgttggtacaggaacgtgccttatgattggatcaataagcaaaagtctaaccagcattggcttaagaaagaaggagataagttccatttccctggtggtggtaccatgttccctcgtggagttagtcactatgttgatttgatgcaagatctgattcctgaaatgaaagacggaacagtcaggaccgccattgatactggctgtggggttgcgagctggggaggcgatcttttggaccgtgggatactatcactctctcttgctccaagagataaccatgaagctcaggttcaatttgctcttgaacgtggaattcctgcgattctcgggatcatctctacgcaacgtctcccttttccttcaaatgcatttgatatggctcattgttcaagatgtcttattccctggacagaatttggtggaatctatttacttgagattcaccgtatagttcgacctggaggtttttgggttctttctggtccacctgtgaactataatagacgatggcgtggatggaacacaaccatggaagatcagaaatctgactacaacaagcttcagtcacttctaacctccatgtgtttcaaaaagtacgctcaaaaagatgacatagccgtgtggcagaaactctcagacaaatcttgctatgacaaaatcgctaagaacatggaagcttaccctcccaaatgtgacgacagtatagaacctgattctgcttggtacactccactccgtccttgcgtggttgccccgacacctaaagtcaagaagtctggtctcggatcaatcccaaaatggcccgagaggttacatgtcgcgcccgagagaatcggtgatgttcacggagggagtgcgaacagtttgaaacacgatgatggtaaatggaagaacagagttaagcattacaagaaagttttaccagctcttgggacagacaagataagaaatgttatggatatgaacactgtttatggaggtttctctgcggccctcattgaggatcccatttgggtcatgaacgttgtatcatcgtacagcgcaaattcgcttcctgttgtctttgatcgcggtctcatcgggacttaccacgactggtgcgaagctttctcaacgtatccaagaacatatgatcttcttcacctcgacagtctttttaccttggagagtcacaggtgtgagatgaagtacattttgctagagatggacaggatcttgcggccgagtggatatgttataatccgagaatcgagttatttcatggacgcaatcacaacgttagcgaaagggataaggtggagttgccggagagaggagactgagtatgcagtcaaaagtgagaagattctggtttgccagaaaaagctatggttttcgtcaaaccaaacctcttgatgagaccacctgtatcatagtgtttatcatctcctgtgatgcacactacagagagaaggatctagtcctttgagtccaagatatagctctataaacaatctcctttttttgttctctttaatttcttgggtatttcacggtatagattgatattatatattttttaattatatttttaatatatagatatattagtatgtggtttaaacactattattatcaaggtcttaaagatttgctttgcaagagttaaaaaatgttggagtaaggacctcttgattaataaattgactgacgcagcaaa

SEQ ID NO: 326 - DNA, 1516 bp, Arabidopsis thaliana
  Clone ID: ARATH-23APR03-CLUSTER1698_1
aagactatcgttcgttacgtctctgtaaatcactgagaaaatggaacctccaaaggaacaacaaaacacgccggaaaaatcaatctccgatgctccagccaccatatcctccgcctttcctccttccggatgctgcacaaactgcggcggaccaacgatttcagaagcaccaccaccactagcttcattcccagagatgtcaccaccaccaaactatcgtccgatccgagctccagcaatcaatctcccacacaactctcaagcaataatcctctctcccgttcctcacgccgaacaagtccccgtcgtatctccgccctatcatttccaatctcccgtcaaacgaatccactctcccgacgatatccgccgatttcacgaatccgcttcttgtaagaacttcttaggattcgtagtatctctctcagaatcgatccgtggatttaagatctcagatccttgtcatatctcaccaaccgtcgccgccatagtttcaatccttgaaacattgttacaatggatcgatgagattcctcctgctcaacaatcagctcgatacggtaacgtttcgtttaggtcatggcatgaacggctccgtgagagaggtgaatcgcttatacttgagtttcttcctgaggaatttaaagaatctgtgattgagattgttccttacttcttcgatagctttgggaactcaagtaggattgattacggaacgggacacgaaacaaatttcgcggcgtggttgtattgtttagctaggatggggatagtgaaagaagaggattatcatagtttggttgctagggtttttgttaagtatttggagttgatgaggaaattgcaaatggtttattgtttagaaccagctggatctcatggagtttggggacttgatgattaccatttcttgcctttcatatttgggagttctcagttgattgatcataagtatatgaaaccgaaatcgattcataacgatgatattttggagaatttctctagtgaatacatgtacttgtcttgtattgcatttgtgaagaaggttaagaaaggtttgttcgctgagcattcgccgttgttggatgatataagtggtgtaccgaactggaagaaagtgaatagcggtttgcttaagatgtatagagttgaagtgcttgagaaagttccgattatgcagcatttcctctttggctggctcatcaaatgggaagagtgatttacttcagtgtgccatacatggaagcagggacagcgattttctcttccttgaggttgcttaacataaagtagagacgcttttgcttttgcatgtatctgataggcatggtttatctttgggtttttttttttatcatgccatcttcttcttgtattctctgcgttttacaacttcagattgtcttttttgatgattcgcttctgccttaggtatctaatagagtaaagaaccagataaaggggaaaggaatgttttattcaaaaatccttaaagaccataatttccctcagaaaa

SEQ ID NO: 327 - DNA, 2652 bp, Arabidopsis thaliana
  Clone ID: ARATH-23APR03-CLUSTER169977_1
atgccttggtggagtaaatcaaaagatgaaaaaaagaaaactaataaggagagtatcattgatgcgtttaatcggaaactgggattcgcatctgaggataggtctagtggaagatcaagaaaatcaagacgacgacgtgatgagattgtgtctgaaagaggagctatatctcgattaccatcaagatctccctctccttctactcgggtttcacgctgtcagagttttgcagaaagatctcctgctgtacctcttcctcgtcctattgtccgtcctcatgtaaccagtactgattcaggaatgaatggatcacagagaccaggtttagatgcaaatttgaagccgtcatggttgccacttccaaagccccatggtgctacaagcatacctgataataccggtgctgagcctgattttgccactgcttctgtgtctagtggaagttctgtgggtgacattccatctgattctcttctcagtccattggcgtctgattgtgaaaatgggaaccgaacaccagtaaacatatcttcgagggatcagtcaatgcatagtaacaaaaactcagctgagatgtttaagccagtccctaataaaaataggattctgtctgcatctcctaggcggagacctctgggaactcatgtgaagaatctacaaatcccccaacgagatttagtgctatgcagtgctccagatagtttgttgtctagtccttccaggagtccaatgagatcctttattccagatcaagtctcaaaccatgggttgttgattagtaaaccatattcagatgtttccttgcttggatctggacagtgctcaagccccggttcaggttacaactcaggtaacaattccattggtggagatatggctactcagctgttttggcctcaaagcaggtgtagccctgaatgttcccctgtgcctagtccaagaatgacaagccctggtcctagctctagaatacagagtggtgctgttacacctcttcatcctcgagctggagggtcaactactgggtctcctactagaagacttgatgataacagacagcaaagccatcgtctgcctctcccgccgttattaatctctaatacttgtccgttttcacccacatattcagcagcgacatctccgtctgtcccccgaagtccggcaagggcagaggctacggttagccctggatcgcgatggaaaaaagggagattgctggggatgggaagttttggacatgtgtatcttggctttaacagtgaaagtggggagatgtgtgccatgaaagaggttactctatgctcagatgatcctaagtcaagggagagtgccccacaattgggccaagaaatttcagttctaacccgtttacgacaccgaaatatagtgccctctcacgcccctgaccccgccgaggacatgcgcgacccccacctggcctagggctccggtgcctccatctagaaactgcttcaaggggatggaccacctggtgagaaggcccgtcgtgacgacacccgcccaacggtaccgccgctcccctccccgcacgccaaaaatactgttcatagggacatcaaaggagcaaatatattggtggatcctcatggacgagtaaaagttgctgattttgggatggcaaaacatattactgctcaatctggtcctttatcattcaaggggagcccatattggatggcacctgaggtgataaagaattcaaatggcagtaaccttgcggtcgacatatggagtcttggatgtactgttttagaaatggctacaacgaaacctccatggagccagtatgaaggggttcctgctatgttcaagattggaaacagcaaggagcttccagatatccctgatcatttatctgaagaggggaaggattttgtaagaaaatgcctacaaagaaaccccgcaaatcgtcctacagctgctcagcttttggatcatgcttttgtaagaaatgtgatgccgatggaaaggcctattgtgagtggcgagcctgcagaagccatgaatgtagcttcgagcaccatgagatcactggacattggacatgcaaggagtcttccgtgcttagactcggaagatgcaaccaattaccagcagaaaggattaaaacatggctcgggattcagtatatcccaatctcctaggaacatgtcatgcccgatttcaccagtcggtagtccaatctttcactcgcattcaccacacattagcggaagaagatctccatccccaatatctagtccccacgctctctctggttcatcaacacctttaactgggtgtggtggagccatcccgttccatcaccaaagacaaactacagttaactttttgcatgaaggcataggatcaagcagaagcccgggaagtggcggaaatttctacaccaacagtttctttcaggagcctagtaggcagcaagatcggtcgcggagtagtccaaggactcctcctcatgtattttgggacaacaacggatcgatccagccaggctataattggaacaaggacaaccagccagtcctatctgatcatgtgtcccaacagctcttaagtgagcatctgaaactgaagtccctcgacctgagacccggtttttcaactcccggatcaacaaacagaggaccctaa

SEQ ID NO: 328 - DNA, 1356 bp, Arabidopsis thaliana
  Clone ID: ARATH-23APR03-CLUSTER16998_1
agctttactggagaaaaaattaggttaggtggtcacgtttgttcatctctctcttatatatttgtttaaaggcttcgtctttgttcatttgcttttgttgatctcattacttgttcatcaatggcaagtctttgtttccaatctccttccaaacccatttcctatttccaacccaaatccaatccatcgccgccgttattcgccaaagtctccgtctttcgatgcagagcttccgtacaaaccctcgtcgccgttgagccggagccagttttcgtctccgtcaagacttttgcgccagcaccgtcgctaatttaggaccagggtttgatttcttaggatgcgccgtcgatggtctcggagaccatgtgactctccgtgtagatccctctgtacgagccggtgaggtctcaatctcggagatcaccggaacgacaacaaaactcagcacaaatcctctccggaactgcgccggaatcgctgctattgctacaatgaagatgttagggatcagatcggttggtttatcattagatttgcataaaggtcttcctttaggtagcggtttaggttctagtgcagctagcgccgccgcagctgctgtggcggttaatgagatctttgttagaatcggaaggagtgatcaattggtattagccggtttagaatcggcaggcgatcatgggtggattcgttttgattagaaactacgaaccacttgatttgaaaccattgaggttcccatctgataaagatctcttctttgttctagtaagccctgactttgaagctccaactaagaaaatgagagctgcattgcctacagagattccaatggttcatcatgtttggaacagtagccaagcagctgctttagtcgctgctgtgttagaaggtgacgcagtgatgcttgggaaggcattgtcgtcggataagattgtggagccgactagagcgccgttgattccgggaatggaagctgtgaagaaggcggctttagaagctggagcatttggatgtactattagcggagctggaccaacagcggttgcggtgattgattcggaggagaagggtcaagtcattggagagaagatggtggaagcgttttggaaagttggtcatttgaaatctgttgcttctgtgaagaagcttgataatgttggtgctaggcttgtcaacagcgtctccagatgatctttgtgtgctgtttgattatgttaagattggaactgtttgattatgttaagattggaaccaatcttgctctgtactgtaatttctagatgataataaagttctttgttttctacacccactaataaaggacaatgtttgatgctaaaaaaaaaaaaaaaa

SEQ ID NO: 329 - DNA, 2281 bp, Arabidopsis thaliana
  Clone ID: ARATH-23APR03-CLUSTER17020_1
aacttcttcactctctcttaaaccttcaaaaaccctgaagagtgacgaatgaatcatgcagatttgccaaaccaagctcaatttcactttccctaatcccacaaaccctaatttctgcaaacccaaagctcttcaatggtcaccgcctcgtcgcatatccttgctgccttgtcgtggattcagctccgatgaattcccagtcgacgaaaccttcctcgagaaattcggaccaaaggacaaagacacagaagatgaagctcgacgacgtaactggatcgaacgtggttgggctccatgggaagagattctcacaccagaagctgatttcgctcgtaaatctctcaacgaaggtgaagaagttccgcttcaatcgccggaagcgatcgaagcgtttaagatgctgagaccatcgtataggaagaagaagattaaggagatggggataacagaagacgaatggtatgcaaagcaatttgagattagaggtgataaaccacctcctttagaaacatcttgggctggtccgatggttcttaggcaaattccgccgcgtgattggcctcccagaggttgggaagttgataggaaggagctggagtttattagggaagctcataagttaatggctgaaagagtttggcttgaggatttagataaggatttgagagttggtgaagatgctactgttgataagatgtgtttggagaggtttaaggttttcttgaaacaatataaggaatgggttgaagataataaagataggttggaggaagaatcttacaagctcgatcaggatttttatccgggtaggaggaaaagagggaaggattacgaagatgggatgtatgagcttcccttttactatccagggatggtttgtgaaggcacagttaccactttacatctgtatcagggagcgtttgttgacattggaggtgttcatgaaggatgggtacctataaaaggtaatgactggttttggatccggcatttcataaaagttgggatgcatgttatcgttgaaatcacggcaaaaagagatccataccggtttcggtttcccttggagttgcgcttcgtccatcctaacatagatcacatgatatttaataaatttgacttcccaccaatattccatcgtgatggggatactaatccagatgagatacggcgagattgtggaagacctcctgaacctagaaaagatccaggatcaaagccagaggaggaagggctgctctctgatcacccttatgtcgacaagttgtggcagatacatgtagctgagcaaatgattttgggtgattacgaagctaaccctgcaaaatacgaaggcaaaaagctatcagaattatctgatgatgaagactttgatgaacaaaaggatatcgagtatggcgaagcttattataagaaaaccaaattgccaaaagtgattctgaaaaccagtgtcaaggaacttgacttagaggctgcattgaccgagcgccagcaccacaataaactaatgatggaagctaaagcaagaggagaaggatacaaaattgacaagctcagacgaaatatagagatggacgagtatgatttcttacactggcgccgatctttggaggaaagagaagcattgctcagagatatcagctctcggcaagcacttggtttaccattggaggaaccagggaggtacaagccaggaagcttctttgggaaagaccagtacgatccaacaagtgcattatatcagtatgactactggggagagccaaagaactcagagattagcaagcaagagagaatgaaggatgcacacaacaaatccattgttgggaaaggcaatgtgtggtatgacatgtcttacgatgatgcgattaagcagacaatagagaaaagaaaagaagggtctaccttggcgagtcaagaagaagaaacagagtcagaggaagaagaagaggatgacgatgattttgacgattttgactatagcattctgagtgatgagagcagtatcggttactcggaacagcaacctcttgttaacggtactcaagtcttgacagactgatgttttaaaggaaagtaaaaataagaatttgttgaggttgatttatttgaaattttgtctgttaggtttgatctatttgatagttttcttttttcatttcttcttatcccggagatagtaaaatcagtttcttattaacttagccagacgtttgggatcttgtagtacaccgttgaacgttaggaacgtgacgttttttgtttttaaaaaaaaaaaaaa

SEQ ID NO: 330 - DNA, 1757 bp, Arabidopsis thaliana
  Clone ID: ARATH-23APR03-CLUSTER17056_1
ggagaaagagtctctgttctgatttgtcagtggaaaaagagaaagagaagtgggacccatctccgccatagccaaagacctctttctctcccacctcatacctctctactctctgcccatcattgcccccgacgaaactctctctctctcgctctctctctaaaaagagaaacaaacatttctttagtgtctctctctttcatcatctctttaccttttgcttcttcgaaaaaaaaagagaaataaattctaagaagagaaattgagagcttggtttttctttattggcatgaatttgtaacttaccagagataataaagttagggttcttttttttcgttcttataaatatagtaatctttctatttttaagtgtgtgtgtgagtgttgtttgggaataatgggtaactgttggtgtagatttgagcccttaaaccacagagtttctgcaaacgctaaatcagagtcaccaaaagaacagagtccaacagtagaagataaacatattaaggaagttcaaaagctgccgtcaaatccaaaagaagtagaagatctaagacgtgactcagcagcgaatcctcttatagctttcacatacgaagagcttaagaacattacaagtaattttagacaagacagagttcttggtggtggtggatttggaagtgtctacaaagggtttataaaagaggatttgggtgatcaagaagttcctgaaccacttcctgttgccgttaaagttcatgatggtgataatagctttcagggtcacagagaatggctggcagaggtgatattcttggggcagctttcacatccaaacttagtgaaattgatcggttattgctgtgaggataatcaccgagtgctaatctatgagtacatggctcgtggtagcgtggagaacaatcttttctcaagagtgttgcttcctctttcatgggcaataagaatgaagattgctttcggagctgcgaaaggacttgcctttcttcatgaagcaaagaaacccgtcatttatcgcgatttcaaaacttcgaacattcttctagatatggattacaacgccaaattatctgattttggacttgctaaagacggtcctgtaggagataaatcccatgtttccactcgtataatgggaacttatggctatgcagctcctgaatacatcatgacagggcatttgacaccggggagtgatgtgtatagtttcggtgtagttctgttagagcttcttacgggaagaaaatcattagacaaatcacggccaacacgtgagcaaaacctcatagattgggctcttccattgttgaaggagaagaagaaagtcttgaacattgtagacccaaaaatgaactgtgagtatccggttaaagcggttcaaaaggctgcaatgttagcttaccattgcctgaaccgtaacccgaaggctcggcctttaatgcgtgacattgttgattctttggagcctcttcaggccacagaagaggaggctttactagtccctcctgttcagaaagcagtaattactattatcgacgaaatgcctaagaatggattgaagaaagttgaagaattgaagaaggttgaagaagtgaagaaggttattgaagatgcatgctaattcacattgtaattgatcacttttttttttttttttaatcttcttaatatacagtttgaaaaagtgataactagattgtgttattttgtattttgaaatacagattaagaaacagatacaaaggtttgtg

SEQ ID NO: 331 - DNA, 2364 bp, Arabidopsis thaliana
  Clone ID: ARATH-23APR03-CLUSTER17067_1
ggtctttcttaagggtttttgtttttgtggcgtttcacagagagagaaagaaataggagattgtttttgcttgtggtgagagaagatcgcatcgtgtgggtagcgtttcaaacaagtaaaataataaaaagaataaaaagtttccgtcactttctcgaggaagaaggggttttggtgtgagtcctttctttgcgtttgtcttttcattttccgatctcgtaattgtcgtgttattcgccggaaaagttaaagattcagatttaaaggttgggaattacattcacagaatttcgttgattggtgtgataataagccattgatcaacaatcttcttttgtggcaatcacataatcgtgttatgcattctgagaaatggtgtcgcataagtgtgtagaagaatttggatacgcaagctacctggtaccttccaatgcaagagcacccagatccgcccggaagaggcgcagtatcgagaagaggataagtaaagaagatgataatatgtgtgcaattgatctattggccaccgtagctggacacttgtcatttgagagtgggagttctctcatgtctattgacaaactgattgaagatcatcgtgtaaaggaggaattcccggaggaagaaaaacctctaatgccagtagctttatccccttatcggggatctttgagtccctgcggattcagttctgtgataaatggcaaagtagagaatgaggtagatggttttagttactctggtggtagtgatgcttgtcaagtcgggaacttcagtcaagatgtaaaaccggatatcgatggtgatgcagtagttctggatgcgagacctaatgttgtagttagtttaggtagtagtagtagaaccgaagtgccatcaattgggaactgtgtttcccatggcgttcgggatgatgtaaatttgtttagtagagatgatgatgaaaacttttccaagtacattcacccgcgtgttacaaaacattcacctaggactgtacctcgtattggggacagaagaatcaggaagatattggcttctagacattggaaaggaggttcaaggcattcagatacgaaaccgtggagaaattattacttgcaccagcagaggagctatcctatcaagaaaaggaaaaactttgaccacatatctgattccgttactgatgattaccgtatgcgtactaagatgcatagaggtagtagaaaaggtcaaggggcatcctttgtggcaagcgactcccatgtgaaactacggatcaagtcgttcagggtgcctgagcttttcatagagattccagaaactgctactgttggctcattgaagagaatggtgatggaagcagtgagcactttactgagtgatggacaccgagttggtctgatggttcaggggaagaaagtccgtgacgataacaaaacccttcatcagactggtatctctcaggataactcccacctggactctcttgattttagccttgaacccagctcagaaatgcctcaactgttaactagtcacccgttgggacatgcttgtgaggagctgctacctgtgtgccaagctactaaaatagacaatgtgttggaatctgaccatcatgactcagcattattcccatctgactcattaggcaacaataatgtgacagaagattctaaagctatgatttctgtggcgctcaacgaattgtcttctcaatcacaaccaccttcccggaaatctagaagaagtgaacagcagcagcagcaggctgcacaacgcagaattcgtcgacctttctcagttgctgaagtagaagcacttgttcaagcagttgagaaactcggtactggaaggtggagagatgttaagctttgtgctttcgaggatgctgaccaccgcacttacgtagatctcaaggataaatggaaaacgctggtccacacggctaagatatctccacaacagaggagaggagagccagtgccgcaggaacttctaaaccgagtcttgaacgcccatggctactggacgcagcaacagatgcagcagctgcagcagaatgtgaacaagctggagcaggagacacagtctcaaacgacagagggtctgttacttctctaaatgaatctgctgcagccttggaggtcgtctctcctttgtgtattactactactattgatgattatgtaagattctgacatagatgcaaagatttggtcttttactttggtttgatttttttaacttttctcaatgtaaagtttttaactggaataaggtttctctgaccagtttagggcttttagaggatctgttgtacatcttttgtgacattctcattctctttacatatttcttatctagactttttaaaaa

SEQ ID NO: 332 - DNA, 1234 bp, Arabidopsis thaliana
  Clone ID: ARATH-23APR03-CLUSTER17076_1
aaaagacgaaacaattaaaatcttaaatcaatttcgccgttcacttgtgaaacctctcctccttcactctctctaatggcgcttccaagcactgtctcatctccttccttcaaatcaactccaccttatctctccgccttcaaccctaaacctctacatcttccagctacttaccggagcatcaaccgtcgaagctgtaaactcctctccttccgttgctcatcctcttccttctccgagaaacaccacaacaacgcgaatccacccaaatcagatgacttagtcgagcttcctctatttccactacctctcgttctcttcccaggcgcaacaatcccgcttcagatcttcgagtttcgttaccgagtcatgatgcaaacgcttctccaatccgatctcagattcggcgttgtctactccgacgctgtttcaggctccgcagctggaatcggatgcgtcggagaaatcgtgaaacacgagcgtctagtcgacgatcgattcttcttaatctgtaaaggtcaggaacgattccgagtcaccgatctcgtccgtacgaaaccttacctcgtcgcgaaagtgacgtggcttgaagatcgaccgtccggtgaagagaatctggacgaattggcgaatgaagttgaggttctgatgaaagaagtgattcgattgtcgaatagattgaatgggaaaccagataaggaatctcaggatctgaggaagaatcagtttccgactccgttctcgttcttcgtcggaagcacgtttgaaggagctccgatggagcagcaagcgttactggagcttgaagatacggcggctaggttaaagagagagagggagacgctgaggaatacactcaattatttgacggcagcttctgctgtgaaagatgtgttcccatcgcagccatagtttaatcggtatttagatatttcttctggtctccgtttcggtgttttcagttattattggatacattatatttgatcaatgtgtaaagtttcagaaacttaggtaatagatagtggagatgtgtttcataggatcgtttggattgatcaagaaatgggtttttacttgattgcctctatgataaaagattactctagtgattcaagtgttgttcttaatacgaagcggctcgagttggcatttacattgaaagcctctcaagatgctatcttttgcttattcggatcaatgccagactctggattgcctcaaaaaaaaaaaa

SEQ ID NO: 333 - DNA, 2845 bp, Arabidopsis thaliana
  Clone ID: ARATH-23APR03-CLUSTER17086_1
aatcttcttcttgactctatatcgaaaaaagcttccaacttgatctcgttaaccgaaactccggcgacaaagcttctacctttatgttctaaaatcgaaactccggcgataaagcttctattttaatttgtaaattgaacttccggctgaattttaaccggagtatgtagattccggcacacaggctttgaagaaatgaataagcaacgaagaagaaacgttcaggctcatggatgtttggctcggatggtgaatctgtttgattttggaactgttggtaatggaaagaaactgctcactgagaaaccccattttgatcatgggtctatcaaggggaatcaatttgatcagatagaagataaagttgatgtgaggaatggtggagtcaatggaacaccaatgaagatgcttttagaacaggaaatgtcgaaagaaatggaagttaagctaagttcgacaaatttggttgctaagttgatgggtcttgattcgtttcctcagacacaatctgctcctaggagttatagttcaaagcctcgtctaaagaggtcgttaagtcacggggaatataaaaatgtctatgagatatggcagaaagagggggaactaagtagtaatggtgtggagggattaagcaagaagaagatggacattgtccgtgaaaagttcttggaagcgaagcgtttggttacagacgatgaacttcgacattctaaggagtttcaagaagctatggaagttttgagttcgaataaggagttgttcctcgagtttttgcaggagtcgaataacttcttctctcatcatctccacagtttccagtccacagatccaccaacctcagagaagtctaagcggatcactattttgaagccttcaaagaccgttgctgatgaaaagtttggaaatgaaccagccattgaatcttcgagagacggaagtaagagtggcaagggtcttgattttttcaaatggccggttgaagaagaatatccgacaaagcaatcaactcgaatagttgttctgaaacctaacggtcaagtcacaaaggcttcatcatgtccaacctctccaagaggttttgaggggagagagtcaagagatgtggctaggagagtgaagagccagatacttaaggaagaaactttacaatcttctgtcttttccaacggctatatatgcgatgatagttctcttaacgactacgcagattctgaaatcatgtcaccggtttctaggcattcatgggattatataaacaagtatgatagccctttttcttcttcgccttttagcagagcctcgggttctccagagtcatcatctgtctgcagagaggccaagaaacggctttctgaaagatgggcattgatggcagcagccaatgagaatttgcaggaggccaaagttattgaaaagaaaggctctaatatttccttaggtgatatgcttgcacttccagatttaagagaagatcttataactgaagaagaagaaacaagcaatggtaatgaacaggagggtcctaaagtatctgcatcttgctttgatggtaatttcagtagagaagaaggaaagttaaagcctcctaaaggccttacacgatcaaaatctctccctgaatcatcgacaagtcttggtcacaaatccctagatagttccaacaagagtaaatcatccagagttccagaggagctgacaaagtcaaagagcttgaaatggtctctgaaaggtaaagtctcaaactttcttttctcaaggagcaagaaagccagtaaggagagatcttatgaggaatcccctgaaatcttggattctcggtgtaacaatgaatatgatgcatcagtgtctgccagaatcatgacttctcgggagggaggcttatcaattacaaagccgaccattttcggaaactctagcgagtggcgcgatgagcctagtcccatttcagtcctggaaacttcttttgatgaggaggatggaatcttttttaattcctctatcttgaatagatcatcatcttctcttgaacgggagatgaaatccaacttattaggaaaatcacctcccatagggtctattggtcggaccttatcattcgatgactcaacagtagctcggtgttactcatctaaacgctctactacttccgcaagagacgaggaagaagacttgcgcctccttatcaacacactcttatcagcagctgatctcgatgcaatctcggacaatcttttgtctaaatggcattcctcagagagcccactagacccatctctgagaaacagctacgcagactcaacggaacagaaaagactcggatcaaacgtgaagaatctagtgtttgacctcgtcaacacgctgctcttggagctaacaccgagctatcttggacctcgtagtagtcccatgatcctctctggtaagccattgggggtttatgtgataaacagaatgcaagagtgtttaacgggtaacggaagagtggaagatcggtggtgggatgaagacggagacttgagcagtttggcggtgaataaagtggtgaggattgaagtagctgagattggttcacaggagagtttgagattggaaatggattccatgggagaggaattagaattgaagttgctggaggagttagtggaggaggctttgatggatttgtcagaacaatccaaattattcattccaagtatttgttaatcatatgtatattatatggttttattgtgtgtataatatgaatctcgttctctattttggttttcttttgggggtgactgatagtggaaagtagtgtttcatatagcctcaatgtttatatactaatgtctcaagaatc

SEQ ID NO: 334 - DNA, 2528 bp, Arabidopsis thaliana
  Clone ID: ARATH-23APR03-CLUSTER17092_1
ctccaaaattttttctttttgtttaaatttaaaagttaatcagtttgaaacaaccatcgtcatccgaatatacagtatataggccagtgagtacaacaaaacaaaaagctttcctcaagcaaataatcaaatgtatagtttttgcctttttgtcctgtgaaagaaggacttcacaatccttgttcagctttactccgttcttcagccattctcttcttgatctcatgtgctgcattgaaaatccccattgttggttggttacacacaaagcatttcttgttcttcgtgtgatgctttaaagcacaatgctcacagaagtaatgcttgcatttggtgacaactggatcaagaaaaggatccctgcaaatgaagcaagcaaagggcaatgcattttcgtcttcgtcgctatccttgtcagcctcatcatcgtcatcctcaactcccatagctttatttctcttcctaactttctctgcctcttcccactctttctctatctgccatcccggcttgtaatccccacggtcatgcaagaacttacacgaatctccatatccacagtatccggtttccttgtaatccttgcaaatgtctggctggtaatcgaatctagccgatactctgatgtgagcagaagctcttaaaggcccgtgtgagcctccagctttctcgctcgagattgtttgttctcttctaaacccagctttgtgatctgtatatccatgaattcctttgtacagcttctcatctgaagcctttttcttattccccttcaatgcatggtctgcttttttaagaactctttcacggatagctcgagcgtcttgattgaagtcggtttcagtttcaagggtcgctgttgctccactgtcgttctgaacctggatttccttggatgaatcgtagtgaaaaacgggtctctcaggagctccactcgttctagtagatggtccagaagaaaagtacaagttgctatcgggttttgcaactttctttagattttgtaaaatagagctttcgcttttcgaatctccgtcttcttcatcagcgtcaatggttcttttccttatgtttttacttttcgttggcttcttgaagaaagtgcaaacttgttgagactcctgattgttggagttgtcgttaccaaactccgccatgttcatcaccgtatcgttaccaccgatgctactagagttagaagcgttaatcgcagaaccatcagctgactcagtgtgatcgatccgtcgcttcttcatcggcgaagaagcggatgcgacgatgttctccttaacaacgaatggttccatgtagagtaactggaagagagaatatgtatcaaataagcaggagaagcttcgaataacaaacaaagacaagaaatgatttccgatgacaaggttcctaaaccctaatcgataatatctggttttggtcttgtaacactaaaccaatttactcggtctggttcgattagggacaagtagtagtagtaatcgatacacgacgatctctccagagccaaaacctctcctgatcccgtaatgaagaaaacgaagacgatggtggcttccatctccacccttattagacggacctatccttcaactaaccagtgtaattcactcgcgacgattcaatcacaaacccaattgcctcgcgaatctctgcaacatcattcttcagctgagggacgactccgattctccgggagagttttctgctcggaatctggcgccggatgctggaactgtggcgagaaagctgcctttttgttctgtaactcatgccgtagcattcaacctgttgatgactccgtcgactattttcagatttttggcctggagaagaagtatgagatagatcctggaagccttgaaggcaagtacaaagattggcaaaagaagctacatcctgatttagttcataacaaatctaagaaagaacgagactacgcagccgagcagtctgcaaaggtgactgaagcgtgccggacattaacaaagcggctgtcgagagcaatgtatatcatgaagctgaatggtgtaaatgtcaatgaagaagaaacaataacagacccaacattgttaatggagattatggaactcagagaggccatatcagaagcagatgattcaacatcgttaaaccagatccgatcccaggtacaagagaaactaaagcaatggtctgactctttcgtcgaagcgtttgaaagccagaagtttgatgatgctgtaaaatgtatacagagaatgacttattacgagcgagcctgcgaagaaattttgaagaagctatgaggcaattagtcctcccttaaaaacgaacacgtttttttttatgtttgccttatagctttacgggtcacatttgaaaggaacagatcatggctcataactgaaagtatcttagctacatgttttagtttagttatatagaacagaggactctgtatttgtaataagaggatttacagatttcgtatctgttcatgggctcgatttatgggtttcacttatgggctgttt

SEQ ID NO: 335 - DNA, 1573 bp, Arabidopsis thaliana
  Clone ID: ARATH-23APR03-CLUSTER1713_1
gccactcctctataaaaggttccgtaaaatgcttaaacagacacatctctttgaatctgtattttgaaaccactcatggctgcatctacttcttcttcttcttcatcatcatcttcttctttatcttctccttcaccttgcacatggagatacatgactttcacgagcttccatggaccagatgtccgcaacacatttcttagtcatttgaggaaacagtttaacaccaatggaattacgatgtttgatgatcaaaggatggagagaagccaaacccttgcccctactctcacgcaggcgattagagaatcgaagatctacatcgtcttgctctcgaagaactatgcttcatcgagctggtgtcttgatgagctattggagattttaaactgcaaagaaaaaagaggacagagagtgatgacaatcttctacggcgtaaatccatctgatgtgcggaaacaaaccggagaatttggaatcgctttcaacgaaacttgtgctcgtaaaacagaggaggagaggagaaaatggagccacgctttgacctgtgtgggcaacataaccggagtacacgtccaagacagggacgatgaggcaaacatgatcgagaaaattgcaactgatgtctcagaaaaactgaatgctacagagtcaaaggattttgatgaaatggtgggaattaaagctcatttgacgaaaattgagtctttgctatctttagattatgataaagttaagatcgttgggatctccggtcctgcaggcattggtaagagtaccattgccagagccttacataacctactctctagcagttttcatcttagttgttttatggaaaaccttattagccaaagcaacccccatagttctctagagtatagttcgaaattgagtttacaagagcaacttctctcacaagttttgaacgaaaaggacattaggatacgccatttaggtgcgatacaagaaaggctacacgaccagagggttcttatcattcttgatgacgtgacgagtctagagcaactagaggttttggctaatatcaagtggtatggtcctggaagtaggatcatagtaatcactaaaaagaaagatattttggtgcaacatggtatctgtgatatataccatgtgggttttccaacagatgcagatgctctaaagatcttttgtctatctgcttatagacaaacctctccacctgatggatctatgaaaattcatgagtgtgaaatgtttataaaaatttgtggcaatcttccattgcatctacatgttttggggtcggcgcttcggggaaggagttatggcagagtgcagagtttgtgtaatctagtgtctctggctgattttgtataaagcaagactctattttatgtactacttattgcaatgctctctttttgataattttttcatacacccttctatattcttttcgttgtttgtagtgttgtaatttgtaaactttctttattatgaacataaacatctatgtaaaaagactacaatttagaacttgtctattatgaataaattgtgtttagtgcaaaaaaaaaaaaaaaaa

SEQ ID NO: 336 - DNA, 1459 bp, Arabidopsis thaliana
  Clone ID: ARATH-23APR03-CLUSTER172184_1
tttttttttttttttttgcgacttgaaacaggtctatctattatacaggcttagtagtgaaaattgcaatcactgtatcttgtttttgatcgagcttttattaaatatgttgtatgtaagaatctgagtttccttgctacacaatgcaagaattgtttacttagatttatatagtccaagcaactgatacctcttcttttgggcaccaaagatgctcctatcttagtcatgttcttgtgatgcctactccgcgaagatatctcaatatccaaaaagttccttgcggatctctagctagaatttttcaatgatgcttcaatctgcttgagttctttagctacttggatcatctttggtctgtcttcatctctctccttacagcatctcaaagccagcaccacacatgcttccacttgcaacctttgaccacttgtgatatctttcatcaacctcggatctatcacttcatcaagcttcccattctcacataactctctcactaagctaagaataccttggagatctccatcagaaatagtcatgatagccggtttaccagtaataataaccagcaaacagattccaaagctgtagacatctgtatattcagtcacaaaacacgtcttatgatataatggatcgatgtacccaaatgttcctagaacccattcagcttctattctcgattttccctcaggtagagatattgagaaggataaatcagacaactttgcggtccaattcttgtccaagaaaacatgcatcggtttaacatctctatgtatgatgatcttagggaatgccgtgtgaagataagtcaccgcattagcaatctctttcccaatcttcaaccgtacactccacggcaataaagattcttcaccattaactataacacctcctcgctgattcatagctccatgttctgcaaattcaaacacaagaaccggaaaaggaaactcgagacaacatcctaaaagttgaagaaagttactgtgattactcatccgagcagacaagacaatgtcgttgtaaacctctttaactctatgtcgttttcctgtaatctcatcctctgagaatctcttgatcatgtaagatctatcttcaatttcacctctataccatttatagtatacatcttgcgagacaaaacagctagaatcgaaattgttggtggctttcaatatctgctcaggagaaaaactgcgaataggaatggatttaccgttacaatcagctacaagttctcttaagaagatgcttccgttatccaagaaccacctcttcgccttgtccttttccttccttgtcccagatccagatttcagatactgcttcttcattagttcctttaccaaagtatcaaccttttgttggcgagatgaataaagaggacacctttcttacctaaaagcttctgaagtgtcaaaagccatttcttttctgatcccaaaac

SEQ ID NO: 337 - DNA, 3370 bp, Arabidopsis thaliana
  Clone ID: ARATH-23APR03-CLUSTER172367_1
ttttttttttttttttttttagactaaactattatcgtattagtgtaacaccagtgaacgaggacaaaagtaattgtttgcttgtacataagaacataagaaatatgaaaccaagcttcgaaggcttcaaatacccatctgctatggtctttgtacacaaaatctaaaccctgaagactaatgtttcccactcttaagatctataaacttcgaaatctgttgcagagggactacaaggcctgagtaccaagatttctcctcgtcttattcaaatctcaattcctctttgtttgtttggcttcgccttaagacatgaaaacatgagtctttacctcttctctgtttcatgagaatgctgttgttctgtatcatggccaatgccgaatgtcccattcgtagtctcgtccttttgaatggatggcttcccattcacagctactgtgccatcggatgtttcatccacagcagaaagttctgtttttttatcatcttcagcgacaatggctgtatcagatttttcatcttgttcatgtgctttgtctgtattttgattagatagagctgcttcagctttctgcctctcttctttttctcgacgtctctttgcttcttgctctttcagcagcctttcaccaggtttggggcattctggggtcaccttttcaccacccttctctcttggtattttcagttctgaaacagacttctgaactagtggttctgaaaaagaattctcaatttgttgtgttttatcttccttagtgaccaaattagtgaatttctccactggattcttagcaccaccatatttttgaagccatacttgctgtgccgtgctcaaaatgttgttggtcagccaataaagacttaaaccagaaggaactgataatgcaaaatagccaatcatcagtggaagaagcttagtcactgcttgtgagctcttcatggctggatcattactctgcgaggactgcataatttgaatggagaggtattgagagaagacgagcaatagaggtaagacaagatatgctaatgtgtctggccatccgagaggtgggtgtccctcaatgaaagggaacagccatgagattccactgccattctgtcttgcagcaacagtcgttggaccagcaagagaaggtatccagaaaaaaccttccgttaagagcccctcatctgcaacatttgagagggctctatatagcccaatccagacaggtatcgtggctagtgtggggaggcagcctgcaaggggatttattccagcaagcttatacaatctagcagtttcaagctgaattttctcctgatcaccagcataccgttcctgaatagcctttatttgaggcgtcaaagatttcatagccatggcagattcaacctgttttttcgtcaatgggaacgtagcagccttaacaagcacagtcaatagaatgatagcgaaaccataggaataaggaacatgtacagttgataacccatctttcaaaaccttgagaatagtttccatgtaattagcaataccagagaaccaatcattgctctgggtcgttttggtagtagtgccggcgacagattcaaaggtttcagaggacgaaacggcggcatcagcgatcgtgtacagcagattctcggcatggtccttgatgaaatcaaaagaatctggtctgaacccgagttgagctacgagagtccgataacgagacgacgacgacgacggtgtgtggctgaaacgggagcggcggaattggaggactttgcctgtattgaaaggtgatgagtgaaggtggatccgcatgtagtagatgtaagtcgtcgtcattgcccagcattcactactgttgcgtttcccatattcacttgtaaacttatattctgtttgagtggcagaacattctgattccgggtggcgcctaggtttgatgaaatatttccagacgccccaaccaccagctccaagacttaacaaagtcggtaatgaaattccaagaggtaaagctaagttgctgctgcttttctcctctcctgatttaccggatttgcctccaccaccgcccttgcttgggctgccaccaccaccgcctgtgctaggggggctgccactaccaccgccagtgctaggggggctgccactaccaccaccaggactagggctgccaccaccgctcgtgcttgttgaattcgtcccgtttccacttccaccactattactaatgacatagagctcgagagcgttgatgagtgggtccaaagtcgagtctggtgtagcttcaaaagtcagataggcaagctcagtcttcaccacatccctcaaagaagcttgagtcactgccccgaaaggtggcacaattagatctgaacccacttgcttgtcctcatagtaaacattgaaagaccgcttttggtcagaaccaaggcttagtggttcggagaaataaatgacaatgtaaaatgtcactccagaaaaaggtagctttatatcatagaaagccatgtccttctgcgaccaagaagtccgaaggataatctctggtggtcgattgtcagctcctgttgtgtcgatagaagtggcagaacttgttagatgtgaggcaaaaaccgatgctggcatccatattctatcataaggatcatatgggaaccaaatgctagttggttgttccttgactttggatctacgtacggttagttttccaaatatagttaactccggtttaattcttccatgaacaacatggtataaagcaaactggtaatcgcttactaattcctgcgcaccgtaggcgatcctttgctggaggatgaaaccttccttagggccaagatcggtgtacatagagtcgtccaaccttcgtacttcaatggtagacacaaaaggggttttgctagaaagcgtacggaaaaagcaaacactgatattcccgttttcaggaataaatatcgcttccgattcagtaacggtttcaaatgtcgttgtgacgaccgaatatcgatgtttaccatcatacactacatcgaatgtcggatacgtggattcttcatcataatcaccatagaggaatctcgtcctaactaagactttcccacctttttccaccggaatgttggtgtaacagttggtctctcccgtaggaaaataccggagtgtggttagttcagcagggaatttgctaaacggtacaaatttagaagtcaaaccggtggcaacaaagtctgtgtctcccacccatgttctgttgtccgcgtcaatgtgcgaacttgatgatccacagtcgatgcttatgtcggctgcgttagaaagcattatgatggaaaaacttaggaggaggcaaataagagaagcttgagccatgcttgattcttccat

SEQ ID NO: 338 - DNA, 2197 bp, Arabidopsis thaliana
  Clone ID: ARATH-23APR03-CLUSTER172675_1
agattaacaaattctctcaaatggctctctccgtatttgcctttccttcttacataaataggaatccttcactaaaatatcttaaaccttcttctatgtcttctacaaaatattcaaaagtaagagcaacaacattttcagagaaaggtgaatattattcaaacagaccaccaactcctttattggacacaatcaaccatccaatgcacatgaaaaatctctccatcaaagaactcaaagttctttcggacgagttgagatctgatgttatttttaatgtttcgaaaactggaggacacttgggttcgaatcttggtgttgttgagctcactgtggcccttcattacatcttcaatactcctcatgataagatcctttgggatgttggtcatcagtcttatcctcacaagattctaacgggaagaagaggaaagatgaagacaataaggcagaccaatggcctctccggctacaccaagcgaagagagagtgagcatgactcttttggcaccgggcacagttcgaccacactatctgcaggcttagggatggctgtagggagggatttgaaggggatgaacaacagcgtggtttcggttataggcgatggtgctatgacagctggacaagcttatgaagcaatgaacaatgctggctacttacactccaacatgattgtgattctcaacgacaacaaacaagtatctttgcctactgctaacttggatggaccaactcaacctgttggagctctgagctgtgctcttagtaggctgcaatctaatcgtggaatgattagagagactagttcaacactgtttgaagaacttggttttcactatgttggtccagttgatggacacaacatagatgatctggtctccattcttgaaacattaaagagcaccaaaaccataggaccggttcttatccatgtcgtgactgagaaaggtcgtggatatccttacgcagagagagctgatgacaagtatcatggagttttaaaatttgatccagaaacaggtaaacagttcaaaaatatttccaagactcagtcttacacttcctgttttgtggaggccttgattgcagaagcagaggcagacaaagatattgttgccattcatgcagccatgggaggtggaaccatgttgaatctcttcgaaagccgctttcctacaaggtgtttcgatgtcggcatagcagaacaacatgcagttaccttcgctgctggtcttgcttgcgaaggacttaagcccttttgtacaatctactcatctttcatgcaacgggcatatgatcaagttgtacatgatgttgatctacagaaactgcctgtgagatttgcaatagatagagcaggacttatgggagcagatggtccaacacattgtggagcatttgatgtgacgtttatggcatgtctaccaaacatgatagtaatggctccatctgatgaagcagagctttttaacatggttgcaaccgctgcagctattgatgaccgtccttcttgctttcgatatcatagaggaaatggtattggtgtttcacttcctcctggtaacaaaggtgtccctcttcagattgggagaggtaggatactaagggatggcgagagggttgcgcttttgggctatggatcagcggtgcaaagatgtttagaggctgcatctatgctaagcgaacgcggattaaagataacagtagcggatgcaagattctgtaagccgttagatgttgctctcattcgtagcttagctaaatcacacgaggttttgatcacggttgaagaaggttccattggaggatttggatcgcatgtggtacaatttcttgcacttgatggccttcttgatggaaagctcaaggtatatcgaacatggatcacgaatggatcaactagctgaagctggcctcacagcgtctcacattgcagccactgcacttaacttaatgggaacacctagagaagcattgttttgggagtaacgggatctccatgagagtgctctttccacaaaaaacctatatcgagagaacccgcttagaagaaggatatattatagttatctaacatcttgaataaattcattcacattcaagaatgattttgtgtgtattgcttatatctcgtttcaactaggctaagaaatagaacaaatggctttgacgttttcaaaaaaaaaaaaaaaaa

SEQ ID NO: 339 - DNA, 2053 bp, Arabidopsis thaliana
  Clone ID: ARATH-23APR03-CLUSTER17373_1
actgtatcgaatgaaattgtctccgaaatattccttttcgcgtccagtgattatcgtttttgaggaaaatctcgtagcaaatatttttttgccattgctgcgaacttctagtgtagatgctgcttctctgatttgagagtagtaacttgagaggtttttagtagatttcgattctgcgattatttttgtttcctggacagatctcatttttttgccacttccgatgatgaagatccagccgattaacaacgatttgccggtgaatagagtgaaatcatcaaccagaccagtgcttaagtctcgtctcacgcgtttattagatcgaccgttcacgagaatctcacactcaaagaaattactcatctctggagatgcgcctgtcgctgtagtccgaattcccggtcgcccaggcgtccgtctcgtttccaccccatacgagaagaagaaacaaaaatcgaaattctcatcaatagcaaaaaaaaaattactcttagattttcctcaaaaaccttaatcaatcgccgggaaaatgaatattccggtgactatttcctccattactgtttctaataacgctgtttccgacaatcgtcgtcatgtttcccgtgaaaatcgtcagcgttaagaaaaccgtcacttatatttttttttcttttcttcttcgtttttgtgaagatgatgatccactgatttgagagtagtagcttgagaggtttttagtagatttcgattttgcgattatttttgtttcctggagagatctcatttttttgccacttccgatgatgaagatccagccgattaacaacgatttgccggcgaatagagtggaatcatcaaccaaaccagtgcttaagtctcgtctcaagcgtttattagatcgaccgttcacgagaatctcaaactcagagaaattactcatctctggagatggagtcgtcgctggaacagagttcgagccaagcttagcgaaaatggttcaaaactatatggaagaaaacaacgacaagcaaacaaagaatggtcgcaatactcatcgttgcaattgttttaacgggaacaatgatatctccgacgatgaactcgatttcttcgattatgacaatttcaagagtttgattcaatgcggaagcttcgttgagaagagtcttttagtggaagctacgaagattatagagaagaacaaatcagttaaaagaaaagacgaattgagaaagattgttgttgatgaactctcatctcttggttacgactcttcaatttgtaaatcgaaatgggataaaactcgttctataccggccggtgagtatgagtatatagatgtgattgtgaacggagagaggttgataatcgacattgattttagatcggagtttgagatcgcaaggcagacgagtggttacaaggagttgcttcaatctctaccgttgattttcgtcggaaaatctgataggattcgtcagattgtttctatagtttcggaagcgtcaaaacagagcttgaagaagaaaggtatgcatttcccgccgtggagaaaagctgattacatgcgcgctaagtggctatcttcctacactcgaaactccggcgaaaaaaagccgacggttacttctgccgcgaaagtcgtagctgaaccggagctagattcttcggagattgagctgattttcgaggagaaggtcttgttgccgccattgaagtctccgattacgtctgttggtagagatgatgatgacgtggcagagtcagtgaagaaagaagcaaaggtcgtcacgggattagctttactgttcaaagaaaatcactaaacaaaaaaattctaatttttctattttcgggttaaaaagttaaaacattaaatatttttcttcttttctgacctctttactttttttttaacccaattttcaagaggttattattagtttactaatgtttgctagtccatgtaaaacagtaaaagtaacagagaaatgttattactggatatcaaaaattatcttggcaaaaaaaaaaaaaaaaaaaactcgagggggggcccggtacccaatcg

SEQ ID NO: 340 - DNA, 1517 bp, Arabidopsis thaliana
  Clone ID: ARATH-23APR03-CLUSTER173921_1
atatatgattaattaatattaagcccaccgggggggaggggcccggtccataacattacacgggactcatttgctaacactcttgtttaatgaaatggtacagcagccaaccttccccccatcttcttctctatctatcttgcatccacgtctccctaatggctcttcaccttttttccttttttttggttaatcttctcttccactggttagctgttttgaatgggtttagatcccaacgcgacacgttgttggtccgctgctgccctgtgttatccccatcattgataacctcggcatttggcacttcaaggacttgagaggctctttcaatgtacctgtactagactcatcctgatcaaaagatggcgacgacaagcctgaaccctttgtttctgcagctaccccacactcgagaaaatggtgtttcggtgatacaattgggctatccaccagcctatcatcctccaagctctctggaagtttgattgtatcctcatcattctcttttgtgcacactctctgattgtttgaaactagtcgtggagaaacaagtagtgtttggtcgaaattgagttgaaactgtttctcgacgtcgagaagctgcagattcatcagccttgtgctctgcagctcaagagctcgttcttcaaacctccttttccacagcagatcaagctggaaatccataatgtccctggatggcttagtcctgtacttgtctgggactttgcctttctccttgtaaggcttaacaagaaccctggaatgacacacaaagtgagggttccctttggccagaatgctcttcacagtctctgggtacatgaaggtcacgaacccaaacatcctcttctgctggtaaggtatcctcacgtcctgaactggcccaaacgtactgaagtagtcggaaacatcttcttccctgaagatactgtcagccgggaaagtcagatagatctgtctagacgccgggcaggccgtggccgagaggtcgatcctctctggcctccatattcccaatttgtgcaagtcatcgcccatcatcaaagcagcagctctttgggcttcactctgttgcaagttgacacctttgggggagaatggataaccggtgaactgattggcaagtctcggcggaacagagttggacctaagcacctctttgcggtgaccccatccgaaccctaaatcggactcaaaatcttcggcggttctcggagtcaagaaagaaagccgctcttcgaggtcctttttggccttggctatgacagaatgaaggagattctgaggcccgaaagctaaccttatcatctccttctcaccgtgatcctgaaggaggagaagacctatgatcttggaagcattagctgggtctaagttctggattctagagagcacgatcctagttgcttcgtacacatccatggaaacacactctttgctcgatgagaccctgtctctctctctctcgcttaatctttctttggcaggaaaaagaaacactgctattgttg

SEQ ID NO: 341 - DNA, 1906 bp, Arabidopsis thaliana
  unsure (1)..(1906): unsure at all n locations
  Clone ID: ARATH-23APR03-CLUSTER174037_1
aagacaagaaagatggcttcagagaagggaagagacacaaagaattctcaacatcatccagaactagtagccaaaagctcacaaagacatcataatagagtgcaacaaaatgagaaatccaagtacaatttaagtaatcagctgggaatgctagattgctagtcttaatctgatcacagccccacctaaaacctttcaagccgtcaacaaactacgattcgacatgtgctagatcctctgggcaatgcaaggagatcctttaaaatgtaaaatccatcttcatgcgtggaacacctcaaatgcagaacaagtttttggagaactccagagttttctaaaaagtaccttgctacttccattttagcaggccttccgttgaatttttttatctctacagactcgagtgacgaaaccaaacaccgaggtacggatgagaatattattggctcatcctcctcctgcagataaaattccaacaccatgacgagtgatttcagattgggacagctctcaagaatggttggcagaatttccagaaagtataaagaaatctcggcttttaaacgggaaaggttgcaaaactgtggcagtgggtcgaagtccttgtaataatagagaaactccacaaaatgctgagagatcttcatatcgctaactcccgagatactggttaagaaattacggaccatatttcgtcttggtatgtcaacaacatcagcacaatcattctcattgaagacataaacaacattgaccttggctaaggagcccgaattggttatgattttactccccgatagatcatcttggaatttcaaatacttgagtcgaggtgcatcaatcaaaacccctgagacttttttatcaaaaccatcaacgaagtcatcaccctccccaaaattaaaatctatattaagactggttagtgtcagagagtgcactcgtaggacctttacgttatcttcaaacattctaagaatgatcaaatctttgagaactgggcaaggcgagataagtgacgctagaaccacctcattggcggatacattttcttctaaacgcatagtctttaaacaaggtaaagacacagcctcaaacttacccaacaatacccgatggagtcttagatttaccagtgtgtcacaaacataaagacttaaaggcatctcctctaaaaacttacgattcacaagacactcaacatcaagatgtttaagtttacgcctaaccacaaagtctatccaccgcgtgacacaaggcagatcattcacagtcttccgactacttagcttaagcttgtccaagcatattttttcttccccagagaaatctatgaacttgttcataaaacccacaaaggcattgtaatcttggaactcttcagagtccaaatccaaccgaggaatcaaaagccagagacttttccacctactggacaaagaactagtcctaacaatatcctttattgggagatacaagagtatctgagttatcagagaatcaggtaatttgcttatcagatcctctccagccatgaagtaagttccctgcgaccgttcgccgtatttcgctttcatatattttaaatagccttcgtaaagcatatttgctcacaaaattgaaccgaagattccacagagacaacctcgaatactaagtatacaacaaggacgcaattcgcacgaattcagacacaaatcatcacattccagtgttaaggcttctaaaatcggagagtagcgaagtagatgaagtcacctgacgggtttttgtgtttcgacgggggaggaagacgcagtcgccgtcaagttctccagaggtaaagcgagagggaggaccggaggaggtctatcgggggggggggggggactagtgagctctnctactctctnctnctncctggtgc

SEQ ID NO: 342 - DNA, 2029 bp, Arabidopsis thaliana
  Clone ID: ARATH-23APR03-CLUSTER1747_1
ctagtctgccatttttctttctcgtcctgtttccattctctctccgatcaaaaccagcccaattcgatcggagacatcacagaatggaaccagatcttcatgaccagcaacaacaacaacgagtccacagcgtagtcataatcactctcccaccatctgatgatccttcacaaggcaaaacaatctctgctttcactctcactgaccacgattacccactcgaaatcccacccgaggataacccaaacccgagttttcaacccgacccacttcaccgaaaccaacaatctcgcctcttgttctcggatctctcaatgaattcgccgagattagttctgggtcttctcggaatctcgcttctcgcggttgctttctacgcctctgtttttcccaactctgttcaaatgtttagggtttctcctgatgagaggaaccgtgacgacgacgataatctccgtgaaacggcgtcgtttgttttccctgtatatcacaaattgagagctcgagagttccacgagcggatcttagaggaagatttaggtttagagaatgaaaactttgtggaatcaatggatttagagctggtcaaccctgtaaaagtcaacgatgttttatctacaagtgccggttctattgactcctccactacgatttttcccgtcggtggtaatgtgtatccagatgggctgtattatacacgcattcttgttggaaagcctgaagatggacaatactatcatcttgatattgatacgggaagtgaattgacttggatccaatgtgatgctccttgtactagttgtgctaagggagcaaatcaactatataagcctagaaaagataacttagtgagatcttcagaggccttttgtgtagaagtccaaaggaatcaactgacagaacattgtgaaaattgtcatcaatgtgactacgagattgaatatgctgatcatagctactccatgggagttctcaccaaagataagtttcatctcaaactccataacggatcactagccgagtcagatatagttttcgggtgcgggtatgatcagcaaggactactgttgaatactctgctaaagacagacgggattctcggtctaagcagagctaaaattagcttaccttctcaacttgcaagcagaggtattatcagcaatgtggttggccattgccttgcctctgatttaaacggtgaaggatatatcttcatgggaagtgatttggttccatcacacggaatgacatgggttcctatgcttcacgattcccgcttggatgcttatcagatgcaagttacaaagatgagctacgggcagggtatgcttagcttagatggggaaaacggaagagtagggaaagtcttatttgacacaggaagttcctatacatacttccctaaccaggcttactcccaattggtcacatcacttcaagaagtttctggtttagaactaacacgcgatgattcagacgaaacactgcctatctgctggcgagccaaaactaacttcccgtttagttccttgtcggatgttaagaagttcttcagaccaataactctgcaaatagggagcaaatggttgatcatatcaagaaaacttttgattcaacccgaggattacttgatcatcagcaacaaaggaaatgtctgtcttgggatattagatggaagcagtgttcatgatggttccactattattcttggagatatctcgatgcgtggacacttgatcgtgtacgacaatgtgaaacggagaatcggatggatgaaatcagattgcgtccggcctcgtgagattgatcacaatgtacctttctttcaaggctgaaggagccataattcttacatatgtgatatgtgtataattaacctgacacatacacgcttgtataatagtactcgtgattacatattgtgtaacataaattgtaaaagactaatcaagttttgatctgtaacatatcaatgcaatcatattaataataagaccaaaaaaaaaaaaaaaggccgctttaaaggatc

SEQ ID NO: 343 - DNA, 2039 bp, Arabidopsis thaliana
  Clone ID: ARATH-23APR03-CLUSTER1751_1
aagctggagctccaccgcggtggggggcgttctttctcaaaaggatcccccgggctgcaggtttccggcacgaggagagctcactagtccccccccccccccccccaaaaaattctcacacaaaccgacccgacccgaatctggccggtgagaaaatggaggtccaaagcagcagcaacaatggtggtcactcttctttctccagtctccgcgtctacctcaactctctttccgcgacgccttctcgcttatcccgccgcgctatttccgtctccacctcttccgacgagatgagtcgcgtccgcgccgtctccggcgaacagatgcgccgtactctccggtggtacgatctcattggactcggaatcgggggaatggtcggcgccggtgtctttgtcaccaccggccgtgctagtcgtctcgacgccggtccttcaattgtcgtctcttacgccatcgccgggctctgcgctctcctctccgctttctgttacaccgaattcgccgtccatctcccggtcgccggcggtgccttcagctacatccgtatcacattcggtgaatttccagcatttttcaccggagcaaatcttgtaatggattacgtaatgtcaaacgcggccgtttcgagaagcttcaccgcttatttaggaacagctttcgggatctcaacttccaagtggcgattcgtcgtctccggtttaccgaaaggattcaacgagattgatccagtcgcagttctcgtcgtcctcgtaatcacagtcatcatctgttgcagtacaagagagagttccaaagtgaacatgataatgactgcatttcacatcgcattcatattcttcgtgatcgtgatgggattcataaaaggagattcaaagaatctatcctcaccggcgaatccagagcacccctcgggattttttccgttcggcgcggcgggagttttcaacggagctgccatggtttacttaagctacataggatacgacgccgtttcaaccatggcggaagaagttgaaaatccggtcaaagatatccccgtcggtgtttccggctccgtcgcaatcgtcaccgttctttactgtctcatggcagtctctatgtcaatgcttctgccatacgatctgatagatccggaggcgccgttttccgcggcgttcagaggatcgaacggctgggaatgggtgacgaaagtggtggggataggagcaagctttgggatattaacatcacttttggtggcaatgttaggtcaggctcgctacatgtgtgtcatcggacggtccagagtggtccccttttggttcgctaagattcatcccaaaacatctacgccagtcaacgcctccacttttcttggcattttcacggcggctcttgcgcttttcaccgacctaaacgtcctcctaaacctcgtatccattggaacactatttgtcttctacatggtcgcaaacgctctcatcttcagacgttacgtcccggttggacccaccaagccgtggcccacactctgcttcctcacactattctccataacctctctcgtcttcaccctcatctggaaacttgtgccggaaggtaagcctaaagctttcatgctcggtgccagtgcggtggtggctatagccatcgtgctgagctttcagtgcgtggttccccaggctaggaaacctgagttgtggggagtcccgttcatgccgtggaccccgtgcgtgtcgatattcttgaacatttttttgcttggttcgttggacgcaccctcttacgtccggtttggattcttctccggtttgatcgtgctcgtgtatttgttttatggcgttcatgcgagttctgatgctgaagcgaatggatcttttggtgtgaaagatggacaagtcatgaaagagctaattgaagtgtgaaaagtatttatttagtttagttttctaaagcatcatgaaccaaaatgtaattaaactctctaattttttttctacatgagggggtttgaaatattaatgagaaaatattaaaaaaaaaaaaaaaaaaaaaaa

SEQ ID NO: 344 - DNA, 3789 bp, Arabidopsis thaliana
  Clone ID: ARATH-23APR03-CLUSTER17733_1
tcgtctcttttaaatctccgagttttcttcctccttctctaaaagaacatggcgtttcttaccgcattgttcctgtttctcttcttctctttttcgagttccgccattgttgatcttagctcggaaacaacttctctcatctccttcaagcgctcactagaaaacccatctctcctttcttcatggaacgtttcgtcttccgcgtctcactgcgattgggttggcgttacgtgtctgcttggacgagtcaactcgctctccttaccgtctttgtctctgagaggccagattccgaaggaaatttcgagtttgaagaaccttagagagctttgtcttgccggaaatcaattctccgggaagattccgcctgagatttggaatctaaaacatctccaaacccttgacctctcaggaaattctctcaccggacttctcccgaggcgactcagtgagttacctcagcttctctacctcgaccttagtgacaaccacttctccggttcacttcctccatcgttcttcatcagcttacctgcactgtcttctcttgacgtctccaacaactctctctccggcgaaatccctcctgaaatcgggaaactgagtaacctctccaatctttacatgggactcaactcattttccggtcaaattccgtcggagattggtaacatctcgttgctgaagaactttgctgcaccttcttgcttcttcaatggaccgttaccaaaggagatttcgaaactgaaacacttagcaaagctcgacctttcttataacccactcaagtgttccattcccaaatcgtttggagagttgcataatctgagtatactaaatcttgtctccgcagagcttattggattgatcccaccagagcttggtaattgtaaaagcctcaagtcactgatgctgtctttcaattctctctctggacctttgccattggagctttcagagattcctctgttgacgttttctgctgaaaggaatcagctttcgggttcattgccttcatggatggggaaatggaaggtactggactcacttctgttagctaacaatcggttttcaggtgaaatccctcatgagattgaggattgtccaatgttgaaacatctcagtctagctagcaacttgttaagtggttcgattcctagggagctctgtggttcaggttcgttggaggcgattgatctctctgggaatttgctttctggaacaattgaggaggtctttgatggatgttcctctcttggagagttgttacttactaataatcagatcaatggctctattcctgaggatctttggaagcttccattgatggcacttgacttggattccaacaacttcacaggagaaatcccaaagagtctctggaaatcaacgaacttgatggagtttacagcttcttataatcgtctagaaggttatttgcctgcagagattggtaatgcagcttcactgaagcggttggttctcagtgataatcagttaacaggtgaaatcccaagagagattggaaaactcacatctttgtctgtcttgaatctgaatgcaaacatgtttcaagggaagataccagttgagctcggtgattgtacttctttgactacattggatctaggcagcaacaatcttcaaggacagattccagacaaaatcactgctctcgctcagcttcagtgcctggttctctcttacaacaatctctccgggtcaattccatcaaaaccctctgcttatttccatcagattgagatgcctgatctcagctttcttcagcaccatgggatatttgatctctcctacaatagattgtctggccctataccagaagaacttggcgagtgtttggtattggtagagatttcactgagcaacaaccatctctctggagagattccagcttcactctctcgtttgaccaacctcacaatcctggatctatctggaaatgcactgactggatctattccaaaggagatgggcaactctcttaagttgcagggattaaacttggcgaataatcagctcaatggccatattccagaaagctttggcttgttaggtagcttggtgaagctaaacttgactaagaacaagcttgatggaccggttcctgcttctcttgggaacttgaaagagcttacacacatggacttgagctttaacaacctaagtggcgagctttcatcagaactgtctacaatggaaaaacttgtcggcctctacattgagcagaataagttcaccggggaaataccttcagaacttggtaatcttacgcagctggagtaccttgatgtttctgagaacttgttatctggagagataccaacaaagatctgtggattgcccaatctggagttcttgaatctagccaagaacaatctgcgaggagaggtgccgagtgatggtgtttgtcaggatccttccaaggcattgctttcagggaacaaagagttgtgtggcagagtggttggatcagattgcaagatcgagggaactaagttgaggagtgcttgggggattgcaggactcatgcttggctttacgatcatcgtttttgtgtttgttttctctctgcgcagatgggctatgacaaagagagtgaagcaaagagatgatccagagcgaatggaggaaagcagattgaaagggtttgttgatcagaacctgtatttcttaagtggaagcagatcaagggagcctttaagcatcaatatagcaatgttcgagcagccgcttctgaaggtgcgtttaggagatattgtcgaggctacagatcatttctctaagaagaacattataggagacggtggttttgggacggtttacaaagcttgtttaccaggtgagaaaacagtagcggtgaagaagctaagtgaagccaaaacgcagggaaaccgagaattcatggcagagatggagactctagggaaagtgaagcatccgaatcttgtgtctttgcttggatattgctctttcagtgaagagaagcttctggtatatgagtatatggtaaatggaagcttagatcactggttaaggaaccaaactgggatgctagaggttctggactggtcaaaacgcctcaaaatcgcagttggagctgcaagaggtctagctttcctacatcacggtttcatccctcacattatacacagggacatcaaagcgagcaacattctgttagatggtgattttgaaccaaaggtggcggattttgggctagcaagactaattagtgcctgtgaatcccatgttagtacagtcatagcagggactttcgggtatatcccaccggagtatggtcagagtgcccgagccacaaccaaaggagatgtctatagctttggcgtgatactattggagcttgtcacagggaaagagccaaccggtccagactttaaggagagtgaaggagggaacttggttggttgggcgattcagaagatcaaccaagggaaagctgtggatgttattgatccactgctcgtatctgtggctttgaagaactctcagcttcgtctgcttcagatagctatgctttgtcttgctgaaacgccagctaagcgccctaacatgcttgatgtgttgaaggctcttaaggagatatgagccatataaccttaaatgttgtagttgtttcttgttgtttaagtaaactgctagtactaaccaaacaagggagtggtagggtttgtatttgtaatgttaatgtaagtgttcttcagtttcttctaaatgtcgaacaaagaaaaataggtattccaatttcca

SEQ ID NO: 345 - DNA, 1735 bp, Arabidopsis thaliana
  Clone ID: ARATH-23APR03-CLUSTER1773_1
agcttgttcggtttatgtgtaaacctaaccgaaccgtagttctctaatcccttgctcactgtcttcgtctctcttcgagatgagctttcgcgcgggtcgtcctccttcccttctatcaacctcagtatatccgtagcaaacttgtgctatcttccaaattctaaatttcaaagcttcgttatccgtttataatggtgattggcagtggcgtatttttgacccgtacctgttacttgagacttcaaccgccaagccttgtactgcgccggagattctgcgcagccaccacggcctgctctgttcctctgaacgggaacaagaagaaaaagtctgaaaaggagaaggtgattgtgatttctgggcccaccggcgcaggaaagagcagacttgccatggagctcgctaagcgactcaatggcgaaatcatcagtgctgactccgttcaggtgtataaaggccttgatgttggatcagccaagccatcagatagcgatagaaaggtggtgcctcatcatcttatcgacattttgcatccgtctcaagactactctgtggggcaattttatgatgatggaaggcaagctaccaaagatattcttaatagagggcgtgttcccattgttacgggtggaactggattgtatctgcgatggtttatgtatgggaagccggatgtgcctaaaccttctccagaagttatcgctgaggcccatgatatgctagttggttttcaaaccgaatataactgggacgcagctgtggagttggtggtcaatgctggtgatccaaaagcttcttctttacctcgtaatgattggtacagactacgccgtagcctcgagatactcaagtcaactggatcgcctccgtcttcctttcgcattccttatgattcctttcgagtaaatttagttgctcctgatgctgatgacttccttgaggacggttcatctgccgatatctctatccaaaacatagagacagatttggactatgactttctttgttttttcttgtcaagcccacgggttgctctctacagatctattgatttcagatgtgaagacatgctttcaggacccaatggagttttgtcagaagctagatggcttcttgatcttggtcttcttccaaactcaaatcctgcaactcgtgccattgggtacagacaggccatggaatatctattacaatgtcgtcgatatgagggcgaaagttcccctagagaattttatgctttcttgaacaaatttcagacagcatccagaaactttgcaaaaaggcaaatgacatggttccggtgtgagcctatgtaccactggctcaatgcttccaaacctctggattcaatacttcaatgcatatacgatgcttatgagagcgaagcagagatggtggagataccggagtctctaagaatgagcaaagacgtaagagattctcgagaagcttctgaactaaaggggtatcgctccaaaaacaggcatttcgtaagacgagaggactgttcttcggtgttagaatggatcaggagtgaaggatgtaagagtgaagcttcatgcgtggaaagcgcaatagcataaacactgcttcattttatccggaaaagccaaaaccaaaaccaaaacaaaagtgtgttttgcttataaactttttacgagtagacaagattttggatcatgttcttgagtacacgtatgaagaaaatattgcacaccaaaaaaaaaaaaaaaaa

SEQ ID NO: 346 - DNA, 1579 bp, Arabidopsis thaliana
  unsure (1)..(1579): unsure at all n locations
  Clone ID: ARATH-23APR03-CLUSTER17780_1
ggcaagggagcgcacgccaacaaaagggagggaggcccaccccngagggccgccccggggcaacccccaaaaggagcggggcgggaagggggggggaaanggagcgggaaaacaaaanccccccaggaaacaaccaaggccgagatttccccccccccaaaattttcccccccctcccccactccaaacccgcccccccccccccccaacccgccccccccccccgggggggccccccggggttctggccccccgccccccttttttgttactagtccccccccccccccccccccatcttcacttcttcaaccttttccactcttacgattccttaagaatctccttctagcttatcttgtattaattttgagttttgtagggtttaggttgtttgattaagttagcaagttagggattagttacgtgacgagatttctctccaaggaatctattactaaaaagatggagcaatctgaaattgtgattgcataatccactagtaaacgtcacaaagcaattgggcatgcctatggacgttgatggagctctagggcttctccgttttgggtatcttgctattggctctcatattccattgccttgcggagcggcgtcgctgcttttaccgtttgggaccggccatgagatctatattcccctgtattttggttttcagttttatctagttaggattgtatttagccaatgaggacatcagattataaaagaacaccatctttcgggactgattaacattgatgatacttctgcaattctgaggctatttttttgatgagttttgtttttgattagtatagaaaaggcagtgatgaacgagaatgtcatgcaccactctgatattagtgctgataaccatctctaacccatattttctctgagcctttattatttctgaaatttttttttgtaagtttataagattgaaaagggttttaatagccagatgatggtcattataatgacttgaccttgatgcggactgtatttctttgatgataacttttggttgctgatggttatattattacccttttacagttttacattttgactgatttggttttgtgtttacatatttgtaacgagggacacaaattgtgtattggttatgtggttggctttgttttacagattcagttaattgatgtgatcttcgacgggtttgtcctaactgtagctgtgggtgatgatagttctgaaaatctagtctggatgttattgatgaaggtgtttggctcattccattatgtctagccgcttgagacgtttccgcagtttatgacctttagtttatgttcgttttgttatgttcccgaagctggtaataaaagtgtatttctgaaactactacgccttgtattcaatagataatattcatattctacaaaaaaaaaaaaaaaaaaaactcgagggggggcccggtacccaatccgccctaaggggggccgaattacattcccgggccggcgttttaaaccgccggggtgggaaaacccggggggtaacccaaatttaaccccttggaaaaatcccccttttccgcggtgggggaaaa

SEQ ID NO: 347 - DNA, 1866 bp, Arabidopsis thaliana
  Clone ID: ARATH-23APR03-CLUSTER17790_1
atccaacaaacttatatgtgtatcggacacagaagcgattatcagtttctggatttcgctactacagatttgtcccgtcttgagttacgaaatcatgatacattttgtgcttctagttagccggcaaggaaaggtaaggctcaccaaatggtattctccttatgcacagaaggaaagatctaaggttatacgtgaactcagtggagtgattctgaatcgaggtccaaagctctgcaattttgttgaatggagaggatacaaagttgtttacaaaagatatgcaagtctctacttctgcatgtgcattgatcaggaggataacgagttagaggtccttgagatcattcatcactatgttgagattctcgatcgctactttggaagtgtgtgtgaactcgatttgatttttaacttccacaaggcatattacatattggatgagctcttgattgctggggagcttcaagagtcaagcaagaaaacagtagccaggattatatccgctcaggatcaactggtggaggttgcaaaagaggaggccagttcgataagtaatataatcgctcaggctactaatcgataagtagtcttattcatcatctatgcattcttatgcagttaaagtatgttccctgtctctggcttcagtaattgttttgagaaatctttatccatttgatttttcttgcggagggattttcgttttaaagcgtaacttggagagaagaaatatgttatgatttggttcataaacaagtaaagattatatcgtttgtaatctttgatttcatgttttccaatcccattctttcattgtgaatccacatgactactatttcagaccaatcttatttgcacatattctctagtccaagagttatggaagaacagtagataaatagccttgctcgactaatgaggcaatgcagtcatcgaacatctcttcaagggacttgaacttgagcccgagactctgtatcttcgaggtgtcaaagtcgtaatgcaacctatttagtttctcaaacctcttggggatagggagtgatgggtaacgagcagataggaatgaaacgagttcctctagactgataacgttagagctacaaatgtatctgccttgagctgcttcgtgttcgaaaacgactatgtgggttcgtgcaacgtcatcgatatgaacataccccatttgtccatgccattggaacttctctgtttctcctttcagtaatccgaggacatcggaagctgtagaacataaatcaggaggcagactgggtccaacgaggaaggatggtagaacagtgacgaggtcaataccattttcttcagagaatttccatgcagcttgttccgctaatgtctttgataaggcataccagacctggaagcgcttgcagagttccacagacgtccaaattgattcgtcaagagggattttgggatcaaaatcatctctgatcctgactgttgaagaggatgaggtgagaaccacgcgcttcagggaaggattcttcctgcatgatcgcagtacattcagggttccttctatagctggtctcagaatctcctcctctggattagaggtaggtttaagcaccggagaagcagtatggaacactccttggcatcccattatggcgttatcaaaacttccttcttccattaaatcagccttcaccaaccgtagtctctcctttgccccttccaacttccataggtgcgcaagtttcttctcatttcctggatctctgactgttccgataacttcatatccttcaagtagaagcctctttacaagccaagaagccaagaagcctgaagcaccagtaacacagacttttccctttgcttgatccattttcggtt

SEQ ID NO: 348 - DNA, 1396 bp, Arabidopsis thaliana
  Clone ID: ARATH-23APR03-CLUSTER17871_1
aaaaagtcctcttcttccccagttttcctaatttggtaacccttgttgcaggcggctgttgctgatcgggtctctcttctccattttccgattagattaactaggaagtcatgtggttcagaataggcaattcacgtgcaatgacagagataaagtaaaaaaagaaaagtatagaggtacccgtgacctctttcttacacgaacgtgacacgtgagcatgattgtacattagagacgaagctgccctctttcctccttccattacagtgttcttaagtttacgagtgaatggctacttttcataccgttagagatgcggtgaagctctttgacgctggtatttctggaggaaaacatctcaacaaaggacaagaagagggagtgttggtggaggagacaaatctctgtctctggaataaagaggttaacaagttgaaagaaaagataaagaatgctgtgaagaccaagattgaggctttgttagaactggaggaagctaagaaaacggttgagcaactcagtcaggagttgggaattaagcggaacatgattaatgatgagaaagatttagatttgagtagtagtgtaagagttgtgacttcagagctaggtgttgctaaggaatcgattcatagagtagctgaagaggagagtgagctgtgtatgttaatggagtctcttaagctcgagcttcaaaacgtggagaaagcacattcagagcttaaagagattgagcaaagagagagggatcatcaagccattgaagatctgaagaaggaaacaaaagatgcaaaaacccaactctcgttgttagaagaagagctcaagattgctgtttttgaagctcaagaagcaaaagatgcagaggaacacgccagggaacggctaaatgttgcagttttagaatctgatttcagatcattagctgtggtgaaagaaagtgctgctgaagaattaactgagacagaagctttaagagcttgcagagatgaaacactcaagacattagagatgagtgagagagaaattgaagatataaaagctgcaacacaagatgctttgaagaaagctgagatggctcaagaagctacaattgtggtggatgttgagctgaaacgacggcgtaaagcagcgagtaggatcttggcagaatccaaaatgtgtgccaaatctaccaaggaagtgctcaagtcaaaaccaagatcatcgtcaaaagaaggttgcctggtcaagtgttagaagaatcttggtcagagttgtaattgtgaaaatctgtagaacttcaataactagaagaagtgtcactttgttggttgtgttcaaagttggaagatttaataagattgtagtgcgaccatttgtggttttgaatgtatatgtaaacacattcactatc

SEQ ID NO: 349 - DNA, 1540 bp, Arabidopsis thaliana
  unsure (1)..(1540): unsure at all n locations
  Clone ID: ARATH-23APR03-CLUSTER17873_1
gnnaccaaaaaaaattcaaagccgcagcatcaatctcatctcggtgatggcggtgatctcatcgttattattccctccggtgttaacccgacgaacaatcacgatctgctccaactcatcgaaatcaatggcggctaaaaaacaaatcggtgaagaaacctcgaagcgggtctttgtatgcggcggtggagtaatcggcgtctgtactgcttatttcctcgccaagaaaggaatcgccgtcactctcgtcgagaaatcagccgtcgcgtgcgctgcttccggtaaagccggtggatttctcgctttcgattggtgcgatggaagtcctgttgcgcatttagcacgcgcgagctttaaactccatcgatcgctcgctgaggagctaaacggtgtcgaatcgtacggatacagagcactcacgactcttagcgtcaccgtgacggaatcaaaacccggttccggcggtttgggattaccggattgggtcaacggcccagctaaaagcacatcaacgattggtacaactcaaacaacagcacaagtgcatcctcaactttttactcggaagcttttatcgacggcgagagagaagtacggtgttgaggttgtgatcgggaaattagaagaggtgagagtggaatcaggtagagttaactctgtagtgcttgaaggtgggagagttatagacactgacgtggtggttctggcgatgggtccatggtcgagtaaatttgagctgttgtcttcgatttttagggtttattgtactaaagctcatagcattgtcttggaaccgaaggaaccaaatgctataacacctcatgccctgttcttaacttatcgtcctgctcatggtggtgaagctttggaccctgaagtataccctcgtcccacaggtgaagtgtacatatgtggaatgtcatcacaagaagaggtacctgatgatgctgatcaggtcacaagcaatcctgaatcgatccaggttctcaagagagttgcgaaaacagtctcgagctatctaaacgaagaaaacgctctagtgaaagcagagcaagcttgtttcttgcccagcacagaagatggagttcctgtgatcggagagattccaggaatcaagggatgttatgtaggcacagggcatagttgttgggggattcttaatggtccagccactggtgctgctttggctgagcttattgtagacggtgtagccacaagtgttgatcttagccggtttagtccttcccggtttagcaaacgaagatgaagagtatagtaatatagagtgttcgttgagatatcacataaaagctactctgttctttgaagtctaagcaaacagaattgtgaacgaggaatcttaaaatgtgataatgtgatacgtgattgtattttgtaatcgttgagcattttagtagtactggttagatctaaaggcaaactctaactcaaaatgctaatgacgaaacacacgaaatggttaacgaatggtatgtatttcgctgctttgctatattaaaatgtatttctcaccagtttt

SEQ ID NO: 350 - DNA, 3266 bp, Arabidopsis thaliana
  Clone ID: ARATH-23APR03-CLUSTER17876_1
ggtaatccagtttgcttggagaaatgttgcttccactgtttcaccagcaaccattgatacttgccaaaacctttcccgatcgaattttcccgccattccttgttcccaacaccctagtttcgcgacgcaatgtcagtcgagcgaactccggcatcttctgtagttctgcttccggtcgaaagactcttccccaatcggctatccagagaatcgctgagaagcttcgtagccttggattcgtggaagagaagcatgattcaccgactaggagaatcacgggagaagaatctggtaagaattccccaggagagatattcgttccgttgcctaagcagcttccgattcaccgggtcgggcacacgattgacacaagctggagcacgcctagttacccggttccgaagcccgggtcgggtactgccatttcaaggtaccatgagttgaagagagtgtggaagaaggaaacggagatggagaggaagaaggaggagaaggttccgtcgttggcggaattgacattgccgccggcggagctgaggcggttgaggacggtggggattaggttgacgaagaagctgaagattggcaaggctgggattacggaagggattgtgaatgggattcacgagagatggaggacgacggaggttgtgaagattttctgcgaagatatttccagaatgaacatgaaacggacccatgacgtcttggagacaaaaactggaggcttagtcatttggaggtctggaagcaaaatattgttgtatagaggggtaaattatcagtacccttattttgtatctgatcgggatttggcacatgaagctgcttcaggagcatcatctatggatcaaggagtggttgatagtagagagaaacagagtattgcagaatcttctgccccgagtattactaataaaatggttaaaccgatgttgacgcaaggcgttggttctccggataaggttaggtttcaattacccggggaagtacagcttgtagaagaagcagaccgtttgttggaaggattgggtccaagatttactgactggtgggcatatgatccccttcccgtagatggtgatcttctgccagccgtagtacctgactacaggagaccatttcgccttcttccatatggcgtcagtccaaaactaactgatgatgaaatgaccacaataaggagacttggtagaccactcccttgtcattttgctttaggtaggaatagaaatttgcagggactagctgttgcaattgtcaagctttgggagaaatgtgagcttgccaagatagcagtgaagagaggagttcagaacactaatagtgagctgatggccgaagagttaaagtggttgactggagggactctgatatctcgggataaagatttcattgtcctgtacagaggaaaggatttcctcccatctgcagtttcttctgcaatagaagagaggagaaggcaaacaatgataatggagaattctagtgtgcatggtaataagctgactgaaaacgaagaggaaataaaacctcgggctgttaaagaggatattgaactagaagctaaggatcagaaggaccatatacaaacccatcagatgaaatcaagacagcgaaattctcctgaggcaatccttgaaaaaactagtatgaagttgtccatggcgttggaaaagaaagcaaatgcagaaaaagtcctggcggatctggagaatagagagagtcctcaactttctgatattgacaaggagggtattactaatgatgaaaagtacatgctccggaaaattggcttgaaaatgaagcctttccttttactaggtagaagaggcgtctttgatggaacaatagagaacatgcatcttcactggaagtatagggaacttgtgaagatcatttgtaatgaatatagcattgaagctgctcacaaagtagcagaaatcttggaagcagaaagtggtggcatactagttgctgtggagatggttagtaagggctatgcaatcattgtgtatcgtggaaagaattatgagcggcctcaatgtctacgacctcaaacacttctcagtaagagagaggcgctgaagcggtctgtggaggcacaacgtcgaaagtcattgaagctacatgtgctgaaactttccaacaatatcgaagaattgaaccgtcaattggtcgaggacagcgcaaccaatgaaacttggtcagatggggaatcaagtaacatgatggtcgaagaagaaacagaaaatcagcatactgaacctgagaaagcaagagaaaaaattgaacttggctattcatctgacttatcagttccttcctctggtgaagaaaactgggaggatgacagcgaaggtgaagtagacccattaactacgagcagtcaggagtatcaagaagatgaatctgaatctgcctcgtctcagagacacgagggtaactctctcgattcaactgcaaatctgtctgtgtttgcggaaaccggttccgccaatgcttcttcatttcatgatagatcactgccgcacaacagcttcctgaatgccaatcgaaagttaccaggatcatcaactggaagtggctcacaaatctcagctctgagagagaggaaaagcgaaaatgatgggttggtcacagatctgtccaatagagaaaggctcattctgagaaaacaagcccttaagatgaaaaagcgaccaccctttgcagtaggaagaagcaacgttgttacaggtttagcaagaacactgaagatgcattttcagaaaaaccctctagcaatcgtaaacgtcaaaggaagagcaaatggaacatctgtgcaagaagtcatcgcaaagctaaaggaagaaacaggagctcttctggtgtcacaggagccaagtaaagtcatactttaccgcggatggggagcggaagaagaaatgaaaagcttctacccaaataacaatgtcaaaagctctataaatctaccctctacgagaagctttgttgatgatcctcctcatgtgtctcctgcactcatcgaagccataagacttgaatgtggtttgtaaaaatgtttaatttattagatgtaaataatttaacatttgctaaagggcaccagagaagttggatatgcggaaaacgatatgttcccagtcacggacgtgtgggtccattaaaaggacagaaaatccccatgtatcggtgaaggttcccccaagaaaaacaagttgtaatgtgataatactcttttgaaacgaccaaggagtgatagt

SEQ ID NO: 351 - DNA, 1827 bp, Arabidopsis thaliana
  Clone ID: ARATH-23APR03-CLUSTER17878_1
aaaaacttcactttttgccttctcctcagaccaaatcttcttcttccttctctgttctcgacgaccttctcaaattcgatctcaactcaaatccattaatcggatccaatattatgacaagggtcaaatgcattggtcggcattcgattttcgggaatcttgatcgacagatttcattacagagagatggtgatccttcagtatcggcagatgtggaatttgcttcaagtagatttccgaaatttataatagaagctaagtatcaaataattgttattagatgtgaacctaaagtgatgtcgatgaaagaagttgttacgtgtgggacagggcaaaatatttgccagtagaaacgttcgtctattcatgtcctcgctcataaatttgaggcgggttaggctgcagctgataagctatctgaggaggtatatctcaaagtagcatcgttgatagatatacatggtcttttaaagaaacttcgagactatttggagtctctatgaggacatttggcatttgttaaggtgtaatagatagaagaagccattgccatggttgaagctctttcttttcagttgaatcagcgagaaggagagctattcatagaaaaagcggaagtgaaaaagctagcgtcttttttaaagcaggcctcagaggatgctaagaaacttgtcgacgaggaaagagcgtttgcacgtgctgagattgaaagtgcaagagcagctgtacaaagagttgaagaagccctgcgagaacatgaacagatgtctcgtgcctctgggaaacaagacatggaagatctaatgaaggaagttcaagaagctaggcggattaaaatgctgcatcaaccaagcagggtaatggatatggaatatgagcttcgagcactaagaaatcagcttgcagagaaatcaaaacattttcttcaactacaaaagaagctcgcaatgtgcagaaagagcgaggaaaatatatcccttgtatatgaaatagatggcactgaagctctaggatcttgtttgcgagttagaccttgctccaatgatgcacctgatctttccaagtgtacgatacaatggtaccgttcatcttcagatggctccaagaaggagcttatatcaggtgccacaaaatcagtttacgctcccgagccttttgacgttggacgagtcttgcatgcagatatcatctacgatggccattcgctttcgttatccacagtgggaaagattgatccagctgctggattgggtagctatgtcgaggcattagtacggaaacacgatgttgatttcaatgtagttgtgacccaaatgagtggggaagaccatacatcagaatctatccacttgtttcatgttggtaaaatgaggataaaactttgcaagggaaagacagtgattgcaaaagagtactactctagtgcaatgcagctatgtggagtgagaggaggtggaaatgctgcagctcaggcattgtattggcaggcgaagaaaggagtgtcatttgtgatagcttttgagtctgagagagaaagaaacgctgcgatcatgcttgcacgaagatttgcttgtgattgtaatgtgacacttgctggtccagaagacagaacagagacgggtcaaagcccttgaagaacggctcttacctaagttgtgatttttagtatccgtaagagcttatttgttttgtagtttatataggttttaggcatttgtttgaattgtacttgtattgtgtgtaaaaatatcgagcagtgaagtaagaggtgatggtgaatctatatgtaacgggtggcttgtgtttattcatttgttttgatcttaa

SEQ ID NO: 352 - DNA, 3444 bp, Arabidopsis thaliana
  Clone ID: ARATH-23APR03-CLUSTER1787_1
gaaaaagcaaacccaaaaaaaaaaaaaaaacagaaaccaaaaaaaagcaaagaaccgtttcttctccatcatcatcatcatcttcttcgcttcttcttcttcttccgtgaagaaggtcaaaaaacacaccaccttaaccccaattaccaaaaaatggcaaagcttcaaaatttctcaaattaaacaatctctttacttattcttcttcttcgaaatcgccgccggcttatgctgtttccgatcgttgtctcttctccggtgtatctccggtggtatcttccacgaagaattcataattactatgaagagtaactccaaggtcaacatcaacaacaacggagataatcataatcaaacgaagaataatggtactaatggctttttgcccaattcgttaaaattcatctctacttgcatcagaactgcttcctccggtgttcgctcagctagcgcctccgtcgctgcttccctctcttctgattctcacgagcttaaagatcaggtgttgtggtcttcatttgatagattgcacacaagtgaatcatctttcaagaacgttctattactaggttatacaaacgggtttcaagttcttgatatcgatgattcaaatgatgttaccgaattcgtgtcgaggcgggatgatccggttacatttttacagatgcagccattacctgctaaatgtgatggagttgaagggtttagatcatcacatcctatacttttagctgttgctgatgaagctaaaggttcaggtcctattgttactagtagagatggatctgttagaaatggttatgaggatcctcttgcactctctcccacggttgtgcgattttattcgcttagatcgcataactatgttcatgttttgaggtttagatctactgtttatatggttagatgcagtcctcggattgtcgctgttggcctcggttcgcagatatattgttttgatgcgctaactcttgaaaacaaattcagtgtcctctcgtatcctgtacctcagcttggaaaccaagggatatctggggttaatgttggatatggtccaatggctgtcggggctagatggttagcgtatgcttccaatagtcccttgtcttctagtataggtcgtctgagccctcagaatgttactcctcctggtgtcagtccatctacctcgccaaataatggtaatctggtggcaagatacgctatggaatctagtaagcatttggcagctgggttactcaatttgggtgacaagggttacaaaactatatctaaatactgtcaagatctcaagcatgacggtcctggtccttctctttcgtccagccctggccggaaagttggtcgggtcggttctcattcagctgagtcagatgttgttggaacggtaattgtcaaagattttgagtcccgagctattatagcacaattcagggctcacactagtccaatctctgctctctgtttcgaccctagtggcactttactagtaacagcctcaatccacggtaacaatattaacgttttccggattatgccgacacctacaaagaatggaccgggtgctcaaagctatgattggagctcttcccatgtgcctctttacaaactacatcgtggcatgacatcagctgtgatacaagatatttgctttagtagctacagtcagtggattgcaattgtttcatctaagagcacctgccatatttatgttttatccccgttcgggggagaaaatgttcttgaaatacgaaactctcaattcgatggaccgacgcttgctccaacattatccctgccatggtggtcaagtccgtcgtttatgaccacccatttttcatatccaccaccagcgtcagttactctttctgtggttagccgaatcaaatgcaacaatttcttccatgctgcaagttccgttgtaggaaaacccaccttcccctctggctgtcttgctgctgttttccatcaatctgtgccacaagaatcgcagtcgtcatctcctgccttggactacttactggtttacactccatcaggtcatgtagttcaatacaaactcattccatctcttggaggagaccaggctgagagcaatacgcgaaatggagcaacttctgggctgacctctgaagaggaactgagagtgaaagttgaaccagttcagtgttgggatgtctgtcgaagagcggattggccagagagggaggagaacatatgcgggcttacttatggtggacgaaaaaatgctgagttaactgttgatacttctgatagtgaagatcaaacaaagcctctggagaaacaccatgtttatcttgccaatgcagaggtgctgataaactccggaagaaaaccaatctggcaaaattcagagatatctttctatccgatgtatccaccagactctgatggcaagaacctgaattcgcatcaaggtggtggggagacagaaatcgggaaagtatctgcgaacgaggttgacattaggcgaaaggatcttctgccggtatatgataattttcacagtgtgtataccagtatgcgcaacagaggattttctggggaaagagattcagattcttcttcttcttctgaccctggacaagttaaagaaatgcatccattcaatggtatggtttaccccgaagatgaggaaagaagagggagtgcccattttgcactaactccaaaccaaaatcctcataccggaattgtaacatttaaacagcctgtagtttccatttcttctgctgtgaaagacactgattatatagacgacgacgctcatgtcttgccaaagaacgcctccctgcccgctgaaacaaaaattgaaaacagcagtgggataagtggagattcaaatgtaagttctaaccgttctgatatgagcatgaatgcagcagacgagggtgaaggacccattgacggctccccaaacttcgagcagtttttcgaggaggtggtctccaatgaaactgttacagaaactgagcataaggatgctccatctgatggaaaactcgatgatgatgaggacgatgacatgcttggtggtgttttcgctttctccgaagaaggttgagtttagttaaactatggccaaagaaagctctaatggagaaggggtcacatactaatcccgtttgctgcaacttttactcactgatgatctttaataccctgaaaaaataacatttaaaatcaatttcttttatcatctgtttctgtaaatgcttgtaaatgtaatgttcattatcaacagtctctcgatttccatggactgtttctttgtaatctttttttttcgtgtaactctctctattcattcatcaaaaaaaaaagagaaaaaaaggaaaaaagcaggcaaaaaatagaaataaagatttatttcgtttgggtttttactaaaaaaaaaaaaaaaaaaaaaaagggcggccgctg

SEQ ID NO: 353 - DNA, 2233 bp, Arabidopsis thaliana
  Clone ID: ARATH-23APR03-CLUSTER17880_1
gcacgaggtctccgtctctctctgtttcttcgatctgtttttttttgaccaaagaaactttttttttttttggtcttccttattctttcttcaatgtcgttgaacatatctgacgatacttgaatctcactctttcttctcttctattctctgtttttagtcacaatttcatctatatctcctctcacttttgtttttgagaattttcgatcccaagcttttctcagagaattttgactggaaatttcgtaattagggtttttgatttgaggcattattctacgatgaaagcttcgattgagaagttaaggagattaacatcgcattcacataaggttgatgtgaaagagaaaggagatgtcatggctacaacacaaatcgacgaactcgatcgagccgggaaggatatgcaagatatgagagaatgttacgatagactactcgctgcagctgctgccacggcaaatagcgcatatgagttctctgagtcgttgggagaaatgggttcttgtttggagcaaatcgcgcctcataacgacgaagagagcagtagaatcttgtttatgttgggtaaagtacagagtgagcttcaaagacttcttgacacatatcgtagtcatatattcgaaactattacatccccgtccgaggcgcttctcaaggacctcagatatgttgaggatatgaagcaacaatgcgacgggaagaggaatgtgtatgagatgtcgctagtgaaagagaaaggaaggcctaaaagcagtaaaggagagagacatattcctcctgagtctcgacctgcttacagtgagtttcatgatgaagccacaatgtgcatttttcgattgaaatcgcttaaagaaggacaagctcgtagtctcctaatacaagcagtccgtcaccacactgctcagatgcgtttgtttcacactggactgaaatcgctcgaggcagttgagcgtcatgtaaaagttgctgtagagaaacaacacattgactgtgatctatctgttcatgggaacgagatggaagctagcgaggatgatgatgatgatggccgatacatgaatagagaaggagaactcagttttgattacagaacaaatgagcagaaggtagaagcttcttctctctctacaccatgggccacaaagatggatgatacagacctctcgtttcctcgcccttctacaacaagaccagcagcggtaaatgctgatcatagagaagaatatccagtttcaacccgcgataagtatttgagcagccattcagctccgttgttcccagaaaagaaacctgatgtatcagagaggttgagacaggcgaatccatcttttaatgcctacgtattaccaacaccaaatgattcaaggtactcaaaaccggtttcccaagcattaaatccgaggccaacaaaccacagtgccggaaacatatggcattcatctccgttagagccgataaaaagcgggaaagatgggaaagacgccgaaagcaacagcttctacggccgcctccctcggccttctacaacagacacgcatcatcatcagcagcaagcagcaggaagacatgcattttctggacctctcagaccgtcctcaacaaaacccatcaccatggctgacagttattcaggcgctttttgtcctctgccgactcctccagtactccaatctcaccctcattcatcatcttctccaagagtctcccctaccgcttcacctcctcctgcttcttccccaaggctcaacgagcttcacgagcttccaagacccccaggccactttgcaccacctccaagacgagccaagtcccctggtctggttggtcactcagcgcctctaaccgcatggaaccaagaaagaagcactgtcactgttgctgttccgtccgccaccaacattgtggcctcgccgcttccggttcctccgttggttgtccctagaagctactctataccttcaagaaaccagagagttgtttctcaacggctggtcgaaaggagagatgatatagtagcatccccaccgttaacaccaatgagcctgtctaggccacttcctcaagccacaggagttgctcagaccagtcaaatcagaggttattaatcatgcaggagtaggaaagctgatcgaacgatgaggcttccgcgtctgcgtcacgtttgaccaaaacgctgattgtacaaattcagagatcttcacaagtgaatatagaagtcagtatatgt

SEQ ID NO: 354 - DNA, 2447 bp, Arabidopsis thaliana
  Clone ID: ARATH-23APR03-CLUSTER1788_1
atattagccacgaataagagaatagtctactaaatcaatggcaactttacgtataagttcagctcttatttaccaaaataccctcacccaccattttcgtcttcgacgtcctcaccgtttcgtatgcaaatccatgaccaaaacgacgccggatactaatcctgttgaactccgtcgacgctccggaaactatcaaccttcatcgtgggaccattgttatctcctctccatcgagaataaatatgtgagtgaaaaagaagtgataactagagatgtgttgaagaaaaaagtgaagagcatgcttgaggatgagaagaagagccgtctcgagcaattagagctcatcgatgatctgcaaaaacttggggtttcgtatcattttgagatagaaataaatgatattttgacagatcttcatcttaaaatgggaagaaatagctggaaatgtgacaaggaagaagatttacatgcaacctcactcgaattccgacttcttagacaacatggttttggatgtctcagaaaatatatttgatgtgatcatcgaccaaatagaaagtaatacgttcaagaccaacaatataaacggtatcatttctttgtacgaagcgtcgtatctttccacgaaatcggatactaaattgcataaagtcatcagaccttttgcaacagaacaaataagaaaatttgttgatgatgaagatactaaaaacattgaggtacgagagaaggcgtatcatgccttagaaatgccgtaccattggagaatgagaaggctagacacgagatggtacatagatgcatatgagaagaaacatgacatgaatcttgtcttgatcgagtttgcaaaaattgatttcaatatcgtacaagctgctcatcaagaagatctcaaatacgtttcaagatggtggaaggatacatgtttgactaaccaacttccctttgtaagagatagaatagtcgagaactatttttggaccgttggattaatatacgaaccacaatttggatatatccgacggatcatgactatagttaatgcccttgttacaaccattgacgacatctacgatatctatggcactcttgaagaactagaactattcacttccatggttgaaaagttaagaaatattctacctttttttggtcaatcaattggttattttgcagctgtaccatggtctaccactagaccattattacagaaatcttctacttaagcttcttcattttcttggtatattattataaaataataactgatcacacacacacacatatatatatatatatatatcaaataattttttgcttttcgtattattgcggttgttaatgtaaagatttttgatatattctaccttttatatcttaagtgttccttacaaactacagagacaataatcttgtttttgctaaggatgtagacatttctttacaaatgaaaaatttatgatttacagaaagtgaatcctatgttaataataattataagaattttgatcacatattttcatgattcgttttaatgtatatattaacaatacatagtattgtctaagcaaatttgtttatgtattttcagttgggatgtaaatcgtcttggtgagcttcccgagtatatgaggttgtgttttcttattttatacaatgaaatcaatggcattggatgtgatatactcaaatataaaaagattgacgtcattccttacctcaagaaatcgatttatgtagaacatatctagtggaagcaaagtggtacaaaagaggatacaaaccaagcttggaagaatatatgcaaaatgcttggatttcaatttctgccccaacaatattgatccacttttactgcgttttctctgaccaaatctcagttcaaaacttagagactttgtctcaacaccgacaacacatcgtccgatgctcagccaccgttcttcgtttagctaacgaccttggaacttcgccaactgaattggcgagaggagacgttctcaaatcggtccaatgttacatgcatgagaccggagcttcagaggaaagggcacgtgatcacgtgcatcagatgattagcgacatgtgggacgacatgaactccgaaacaaaaacggcatgcaattcttcgtcacgttctagaggttttaaggaagctgcaatgaatctggcacgcatgtcgcaatgcatgtatcaatatggtgatggtcatggatgccctgaaaaagccaagaccattgatcgtgtccaatccttactcgttgatccaattccattagatgtaaatcgtcttggttgaagtgtaaggactctactacataaaatcatttgtacaatgaaatcctcaaccataaaaaatgttgacgtcagcccctttctcaagaaatcattaagttaaatttaaaaaaaaaaaaaaaagggcggccgctctataggatcaaagctta

SEQ ID NO: 355 - DNA, 4092 bp, Arabidopsis thaliana
  Clone ID: ARATH-23APR03-CLUSTER17904_1
cgtatcgaaaatcttcttcgggtcagacgatctgaagccgatcgctgtagaatcagtttcgtgctccgcagtttctcgagtttcctctcacttcagatcttcataagagaattcacttacggagagggactttttcgtagacgattctcactggatatctatcacccggtaagatcgtcttgctcgaaaagaattgaaaagtttttaagtaattgaataaggaactgtgaatcggagaggcttacttttttgaaaagatctaaaccatcgtagaagatcgtcctcaaatatctcacagaagttaccaattttgaaagatcactagagatagctacggattttgagaggcggatctgtccaggtcggcactgtgaaagagaactacactggttttttccagatgatatgaagcttccgtgaacgaatctgattctaaggtactcatcgaagagaatctgggattgtattgatctggtcccttagcttccagtttggctataactctgacaactgttgtaagtgataagttgtgatcaataatgggtacggagaatcagggctatccaaattttccagctaggcctgcttcctctccatttgcatctgctccgccaccagggattcctcctcaatcaggtggaccacccactggatcagaggcggttggctttagaccttttacaccatctgcatcccaacctacaagacctttcactgcctctggtcctcctccggctccaccagtgggtacgatgaggcctggccagccgtctccttttgtttctcagattcctgggagtagacctccaccgccatcatcaaattcgtttccttcaccagcatatggtcctcctggtggtgccccttttcagcgttttccatccccgccattcccgactacacaaaaccctcctcagggcccaccaccacctcaaactcttgcaggtcacttatctcctcctatgtctcttcgcccacagcaaccgatggcacctgtagcaatggggcctccgccacaaagtacgacttctgggctacctggagcaaatgcttatccccctgctacagattatcatatgcctgccaggcctggttttcaacagtcaatgcctccagttactccgtcttatcctggcgtgggcggttcgcagccatcttttcctggttatcctagcaagcaggtcttacaggctccgacgccattccagacatctcaaggtcccccaggaccccctccagtctcatcatatcctcctcacacaggaggttttgctcagcgaccaaatatggcagcacagcagaatctgcatccaaactatgcacctcctcccagtaacgttcaaggcttgactgaagattttaactcgctatctctttcatctattcctggatcgctggaaccaggacttgatcataaatcattcccaaggccattggatggtgacgtggagccaaattcatttgctgaaatgtacccaatgaattgccattctagatatctacgactgacgactagtgctataccaaattcccagtctctggcttcaaggtggcatttacctctaggagctgtggtttgtccacttgctgagactcctgaaggggaggaggtaccacttattgattttggctcaactggcatcatccgctgcagaagatgccgtacctatgtgaatccttttgtgacttttacagattctggaagaaagtggcggtgtaatatatgttcgatgcttaatgatgtgcctggtgaatacttctcacatttggatgctactggccgaagaatggatatggatcaacgacctgagctgactaaaggcagtgttgaaatcatagctccaactgaatacatggttcggcctccgatgccacctatctacttcttcctcattgatgtttcgatttcggctactaaaagtggaatgcttgaggttgttgctcaaacgattaagtcttgtttggataacctgcctggttatccaagaactcaaattggatttattacttatgacagcacgttacatttttacaacatgaagtcatctttgagccagccgcagatgatggttgtatcagatctagatgatatctttgtcccattgccagacgatctgcttgtaaatctatctgaatctagaactgtggtggacgcctttttggacagtctacctttgatgtttcaagataatttcaatgtggaatcagcttttggcccagccctcagagcggcgtttatggttatgaaccaacttgggggcaagttactaattttccagaactcattaccttctcttggtgctgggaggttaaagttgcggggagatgatcctcgtgtctatggaactgacaaagaatatgcattaagggtagctgaagatcccttctataaacaaatggctgctgattgtaccaagttccagataggaattaatgtttatgcattcagtgataagtacactgatattgcctcattagggactctggcaaaatacactggaggacaggtgtactattatccaggtttccaatcatctgttcatggagataagttaagacacgagcttgctagagaccttacaagggaaactgcgtgggaggcggttatgcgaataagatgtggaaaaggaattcgtttctcgtcctaccatgggaacttcatgctaaggtctactgacctgcttgctcttcctgctgttgactgtgacaaagcgtatgcaatgcagctatctcttgaggagactttgctaacatcccagactgtgtatttccaagtggctttgctatataccgcctcttgtggagagagacgtataagggtacacacatctgttgcaccagtggttacagatcttggggagatgtatagacaagcagacactggttccattgtgtctttatatgctagattagcaattgagaaatctttgtccgcaaaattggatgatgcacggaatgcaatacagcaaaagattgttaaagccctcaaagaatatcgtaatcttcacgcggtgcagcatcgcttggggtccagattagtatacccagagtctctgaagttcttgccattgtacggattggcaattactaagtccactcctcttctaggtggacctgctgatacttctcttgatgagcgctgtgctgcaggcttcaccatgatggctctgcctgtcaaaaagctattgaagcttttgtatcccaatttattccgtgttgacgaatggctcttaaagccatcagcagcccacgatgactttaaagacgtattaaggagattgccgctggctgcagagagtttggattctagaggcctttacatatatgatgatggttttcgattagttttgtggtttggccggatgctttcacctgacattgctaaaaatcttcttggggttgactttgcagcagacctctcaagggttacctttcaagagcaagagaatgggatgtcaaagaagctaatgaggttggtaaagaaactgagggagagtgatccttcatatcaccccatgtgttttctagtgagacaaggagaacaaccccgagaaggcttccttctcctcagaaatctcattgaggaccagatgggcggttcgagtggttatgtcgattggattctacaacttcaccgccaagttcaacaaaactaagatagctcacaatgacaactcgggtgctaggatgccacctctttgtaaccattgaagaactcttgagctcaaaaatcttctacttaagcaggatcatggcggccttcttccttgggccataatgtgttgttttggataaagaagtgctactttttgatttttcttcatttgtttttctatatagaccttttttctcaagattaggcttttatttgcctaaccagaatggttatctccgtaagattagtcgttttttaaatcttttgttgcctttttttttttgtcctcattcgattttttgttgatgtgcgtctgttctagatttattttgggagttgcagttcatgaatctgtcctaattagggttattaacaagaagatgctactgttaaaattttaaaatatttttatgaataaataatgttgtgaaaacctt

SEQ ID NO: 356 - DNA, 963 bp, Arabidopsis thaliana
  Clone ID: ARATH-23APR03-CLUSTER17907_1
atcaatttttctttattttattcactaataataattttgagtctctcttctctctctcttatatctcaaaatccgagaaaacgaggttcaaagatccgtggttgaattcgtgattctgaaatttcgtttcttcaggtctctgatcgtcctggttctcctctgatctgttatttgcttcgaaatagaagtttgtttctcgtttgacgatggagactgcgactggagaaatcaccatcgtctgcaaccactgtgacagagacattccatcactgaatatcgatctgcatcgtgtacattgtgctcggaatttagaaaaatgtaagatttgtggtgatatggtacccaaaaagcatgctgaggaacactacttgaacacacatgctccgatagcatgctcgatgtgcaaagagaccatagaacgtgagattttcgatagtcataaaggagaaatttgccccaagaggattgtaacatgcgagttctgtgagtttccattgcctgcggttgatcttgccgagcatcaggaagtatgtggcaacaggacagaactctgttatcaatgcaacagctatgttagattgagagaaagatataaccatgaaaccaaatgccctggcactgttgaatcatccagaaggatcccgagagcagcagaaggagatggaaacgggagaagacgaagagatgggaacggtgtttcgaacaaaaggcttttcttcacgatagcaataacgggaatagctgtgataataggatccttgttcttccagaggaagcctgagtagaggaggcgtagcttatctgtaattctgtaaatttgcctcaaatccttcagacagattctaaggaagggtttatacattttaaagcttacccagacaagagaaaccccaaaagattgtttgagctgatcaccatgagacttgcttttatatttgatttcaataaaagagatttcagatt

SEQ ID NO: 357 - DNA, 2365 bp, Arabidopsis thaliana
  Clone ID: ARATH-23APR03-CLUSTER17940_1
gcaccaggagagagagctcactagtccccccccccccccccgaagcttttcttcaatttcggttaaaccattttcgttctttcttcttttaacaagaaaccaccgctctgtacaaaacaaagtctccgtcgtttcttctccgttctccggtcaattcgaattcctcagagagaaatttgtgctcgcgagttccgcgtgaaatacatggaaatgttggcggcgttggactcgcgttcttctctccatcttcatcgttccatgtctcgcgttgacctttttgccggtgttcgtatgaaaccatctcctacaagtcctgttccgaatacgcctcgaatatgtggaagtaaactctgttgattcgactcttcctcttccctttagtagttcctccgtttgtttttcctttgcatctgaatttccagatccaatcgaagctgtgattacctgtagcgtcttgtgtagtcttattttaggtaagtgatcttttctggtgaagaatttagaagattgtgtttgtactctgaaacttcttaggattgtggaattgggggttttcttttagggtttgttgagtcgtgaagttgtttgtgtctgttggatctctgaatggctgagaagaaagaattagggttaccaaagcctagtattaatttgaaagagcaattagcaagaactactctgaagaatctgaggttacaagggcatacttacattgagctacgtgaggatgggaaacgttttgtattcttctgcactttgtgtcttgctccttgctacagcgacacaatcttgcttgggcacttgaatggaaaccttcacaaggagagattggcatgtgctaggatcacacttcttggaacgaatccttggcctttcagtgatggtgtacttttctttgatagttcaactggagaagaagaagagaaatctccagtttctggtggtgaaggggttcctgatacgttggagcattgtagtgatgatgaaagatttgctattgtcaagtatgataacaacaaaacaaatggagataatgtgcctgctgcagttactgatgatgaacctagtcacgctgcagatgatctgctaatttctggtgtgctgatcaaggagagaactcttgatgttgaagcaaagttcattggttttggccgaatagctgccaggttgtttgaaacgaaaggacgcacaacttggattgataaactatggtgcgagtggttaggagacgagggtccttcagatgaggagaaggctacgatcccggagcatgactttgccattgtcacattctcctacttctacaatttgggtaggctgggtttgcttgatgatccgggccgtcttctcacatctagtcagtcagaatcagggaatggtgaggacagtggcaggaagagaaagaagtctttctcggatccagaggacaccagtgaatctctgtgtaatcagtatgactcttctgaggaggtttcttcaggtcataattcaaactcgtcaagagatctaatagctgattatgatgatagtctcatgagcaaaagagtcgtgaagaacagaacggtaagacgggagctgaggaggcaacaacgaatattttctgaaagaatatgcgaagtctgtaaacaaaagatgcttccagggaaagatgcggcagcaatactaaacatgaagacgggaaatcttgcttgtggcagcagaaacctcctgggggcgtttcatctatttcatgtgtcgtgtgtcgtacactggtttctcttctgtgagagtgaaatacttgggaacaagatggtgagtggaaaaggaaaaaagagatgcacaaagcatagtggtcagactggtgtaaagtggaatgagttggcaaacgatgtgagctggcaaatattttcggtgttctgtccagaatgccaaggcactggcataaatatcgaaggagctgtgattgagagagacacgtttccactttctcagacatggaggttccaggtgaaagtgagtgaaggtagaaaagcatgggttaaaaatccggagagattgaagaattgctcaaccggatttcattttccgcagcaggctgaggagacggaacagattccggttcaggaggagagagtgcagatgatgaaactggttcgcttctaccgagtggagttgtaatgtaggaaacatactcatttcctcttgtgtaaataagggcttcgtctctcattttacagttcactgtaaatttacatttactttcttactatctgatgattactttgaagcccaatttattcttttgtctcaacttgttttcctgtctagggatttatgacttaaaactgtatagataccaacaaggaaattcgaactttttaaaacc

SEQ ID NO: 358 - DNA, 3463 bp, Arabidopsis thaliana
  Clone ID: ARATH-23APR03-CLUSTER17941_1
aaaaaaaaatcgagcactacacattgactctcttctacaaagagtctggtcacactcatggccatcctccatttctctcttcctcttatcgtctctttccttcgtcctcacgcctctcctcgcttcttcctcctccctcgctctctttctcagtcccctttcctctcccgccgccgttttcaccgtacctccgccgtttcctccgccgctgttcatcaccaatcctatcgtaatcccgacgatgatgttacccgcgcggtgtctgttcctacattccaacaagcgattcaacgcctccaggaatattgggcttccgttggatgtgccgttatgcaaccaagtaacactgaggtcggagctggcaccatgaatccttgtacctttttgagggttcttggtcctgaaccatggaatgttgcttatgttgagccaagcatacgtcctgacgactctcgctatggagagaatcccaataggcttcaaagacacactcaatttcaagtcatattgaaacctgaccctggaaactctcaacagctctttatcaacagtctttctgctctaggtattgatgtgactgcacacgatatacggtttgtagaagacaactgggagagcccggtgcttggtgcttgggggttgggctgggagatttggatggatggtatggaaatcacacaatttacttacttccagcaggctggaagtcttccgttgtctccagtatctgttgaaataacttatgggcttgagcgcatcatcatgttacttcaggaagttgaccatttcaaaaagatcttatatgctgatggaatcacctatggggagcttttcttggaaaatgagaaggaaatgagctcatattatttagagcatgctagtgtggatcgccttcaaaagcatttcgattattttgatgaagaagcacgttccttgcttgccttaggacttccaatccctgcgtatgaccagcttctgaagacatctcacgcttttaacattttagacgctagaggtttcattggcgtaactgaacgtgctcgttatttcggtcgaatgcgtagcttggctcgccaatgtgcccaactgtggttagcgacacgtgagtctcttggacatcctcttggtgttgcctccgaaccagttcctcccgtttgtcacagagctgctctggaaaaagtggctgaaaaggtttctgaagatccaagatcgtttattattgagatagggactgaagagatgccacctcaagatgttatcaatgctagtgaacaactcagggtcttagtgctagaattactagagaaccaaagattgcggcatggtgctgtgaaagcatttggcacacctcgcaggctagtggttttagttgatgctatgtcctcgaagcagctggaagaggaggttgaagttcgaggaccccctgcttctaaagcttttgatgatgaaggaaatcctacaaaggctgctgagggttttagccgcagatatggcgttccattggaaaaattgtacagaaaagtttctgggaagacagaatatgtacatgcacgagttacagagccagctcgacttgctttggaggttctgtcagaagatttacctggtatactggctaaaatatcgttcccaaagtcaatgcggtggaactcttcagtaatgtttagcaggccgattcgctgggttatggccttacatggtgatctggttgtgccattctcctttgctggcatctcaagtggaaatgtatcttgtggacttcgcaatactgcttcagcatcactgttggtacagaatgcagaatcctatgaagatactatgaggaattctggaatcaatattgagattgaggaaaggaagaaaatcattcttgagaagtcaaatgcactagcaaagagtgtgagtgggcgccttgttgttccgcagaacttacttaatgaagttgcaaatctcgtcgaagctcctgtgcccttaattggaaagttcaaggaatcattcttagaacttccagaggagctattaactattgttatgcagaagcaccagaagtatttttccattattgatgagagtggacagctattgccttactttattgctgttgccaatggtgcaataaatgaggatgtggtgaagaaaggaaatgaagcagttctcagggcacgttatgaagatgcaaagttcttctatgaggtggacacaaggaaaagattttctgaattccgagatcagctacagggaattcttttccatgaaaagctggggacgatgctggataagatgaaccgcctcaaaaagatggtatctaaactttgtttggccctcaaaattgatgaagatctgcttccggttgtagaggatgctgcctcacttgctatgtcagatcttgcaactgctgtagttacagaatttactgcgctgtcaggaataatggctcgtcattatgctctcagagatggctattcagagcagatagcagaagctttgctggaaattacacttcctagattttctggagacgtcatcccaaaaacagatgcaggaatggttttggcaataggtgatagattggatagccttgttggtttatttgctgctggttgccagccaagttcaacaaatgacccttttggccttagaagaatatcatatggcttagttcagattttggtcgagaaggataaaaatgtcaacttcaaacgtgttctagaacttgcagccagtgtacaaccgacgaaggttgaggcaaacactgtagaagatgtgtatcaatttgttactcgaagactggaacagctattggttgacaacggagtaagccctgaagtagttaggtctgtcctagcagagcgtggaaacaatccttgtctggcagcacggactgcatacaagacggaaaagctaagcaaaggtgagatgtttccgaagatagtggaagcatattctcgtcccacacgcattgtccgtgggaaagatgttggtgttggagttgaggtggatgagaatgcatttgagactccccaagagagaacgttgtggagtacttacacctctatcaaagatcgaattcacactggcattgaaatcgaggacttcaccgagatatccatgcaattggtggagccactcgaggatttcttcaacaatgtatttgtaatggtggaggaagaaagagtgaggaagaacagactcgctctgcttaataacattgccaatcttcccaaaggagtcattgacctctcatttttgcccggattttgatctttacttgtttcataatcccactccggaatcatcaattcattgacctctcattttttctttgtttcataacctcatatagttgtgttcactgagcaaaaattcaaactaaaacttgtgcaatggaatactttaaaaacagtttcataacctcaataaaaagatttcaaaagatttttagataaaaaaaaaaaaaaaaaaa

SEQ ID NO: 359 - DNA, 1514 bp, Arabidopsis thaliana
  Clone ID: ARATH-23APR03-CLUSTER1794_1
agtccccccccccccccccccgaatcgatggagttgggatccagacgaatctacacgacgatgccgtcgaagctccgatcttcttcttcacttcttccacgtattctgctcctttctctcttattactccttttctattccttaattctccgccgtccgattacttcaaacattgcctctcctccgccgtgcgatctcttctccggcagatgggttttcaatccagaaactccgaaaccgttgtacgacgagacttgtcctttccacagaaacgcttggaattgcttacggaacaagcgagataatatggatgttatcaattcatggagatgggagcccaatggatgtggattgagtcgaattgacccgacccggtttctagggatgatgaggaacaagaatgttgggtttgttggggattctctgaatgagaatttcttggtttcgttcttgtgtatacttagagtggctgatccaagtgctattaagtggaagaagaaaaaagcttggcgtggagcttacttccctaagttcaatgtcactgttgcttatcacagagctgttcttctcgctaaatatcagtggcaggcgagatcttctgctgaagctaatcaagacggagtgaaaggaacttatcgagttgatgttgatgttcctgcaaatgagtggatcaacgtcactagcttctatgatgttctcatatttaactctggccattggtggggttacgataagtttcctaaagagacacctcttgtcttctaccgaaagggaaagccgataaatcctcctcttgatatattaccaggatttgaactagttcttcaaaatatggtttcttatatccaaagagaagtccctgcgaagacccttaagttctggcgtttgcaatcaccaaggcatttctatggtggtgattggaaccagaatggaagttgtttgctcgataagccactcgaagaaaaccagcttgacttgtggtttgatcccaggaacaatggagtgaacaaagaagcaagaaagattaaccaaatcatcaagaatgagttgcaaacgacaaagatcaagttacttgatctgacccatctaagcgaattcagagcagatgcccacccagcgatctggttagggaagcaggacgcggtggcaatatggggacaagactgtatgcattggtgcctacccggtgttcctgacacatgggtcgatatattagcggaactcattctcactaacttaaaaacagagtgaagacgctatcaggagtcgagaacagagacttgcttgagcatatggaagctcaaatgtcggaaaggttccatcttttggttttaactgtaaatgattcatatctggatgaaattttgttcctttaccaagacatcttctcaaaacacaaacatttaacttgtattgtgtctcttgcttgtaactactgtttccatgaagttaatgtttttgcaattggggaaaaaaaaatagaaagatgctctaaagtaaaaaaaaaaaaaaaa

SEQ ID NO: 360 - DNA, 1899 bp, Arabidopsis thaliana
  Clone ID: ARATH-23APR03-CLUSTER17986_1
gccgacgaaaagattactgtatctctaatcgtcttccagaatgctgacgaaaaccaacgacagccgtttgattgaccggagctccggcttcgatcaacggacaggaatctatcacagtcttcgtccctctctttctctacctcctatagatcaacctctctccgccgccgaattcgcgctttctctcctactcaaatcctcaccacctgccaccgccgggaaaaacattgaagccttaacctacctagttaactcgagctctggtgataacctcacttatggagagcttcttcgtagagttcgttctcttgctgtatctctccgggagcgatttccttctcttgcctccagaaatgtcgcttttatcctctctccttcttcgttggacataccagtgctttacttagctttgatgtcgatcggtgttgttgtttcaccggcgaacccaatcggatctgaatcggaggtgagtcatcaagtcgaagtcagtgaaccagtaattgcgttcgcgacatcgcagacggttaagaagcttcaatcctcttctttgcctctcggaactgttctgatggactcgactgagtttctctcctggttaaatcgatcggattcttcatcggttaatccatttcaggttcaggtcaaccaatcggaccctgccgctatcctcttttcctctggaacaaccgggcgggtcaaaggcgttttgctcactcaccgtaacctaatcgcctcgaccgccgtatctcaccaacggactctccaagatccggttaattacgatcgcgttggactgttctcgcttccgctcttccacgtgtttggtttcatgatgatgattcgagccatctcgcttggagagacattggtgcttttagggagatttgaactcgaggcgatgtttaaggcggtggagaaatataaggttactggtatgcctgtctctcctccgttgattgtagcgttggtcaaatcggagctcacgaagaagtacgatctccggtcgttgcgttcccttggctgcggaggagctccactcggcaaagacatcgcagagaggtttaagcagaaattcccagatgtagatattgtacagggctatggcttgacagagagctcgggaccagctgcctcaacgtttggacctgaagagatggtaaaatatggctcagttggtcgtatctctgagaatatggaagccaaaattgttgatccatccaccggagaatccttgccaccgggaaaaactggtgaactctggctccgaggaccagtcatcatgaaaggttatgtgggaaacgagaaagcgagtgcggagacagtagacaaagaagggtggttaaagactggtgatctctgttattttgattcggaagattttctatatattgttgatcggctaaaggagctaatcaaatacaaggcttatcaggttccaccggtagagttggagcagattcttcactcgaatccagatgtgattgatgctgcagttgttccgttccctgacgaggatgcaggagagattccaatggctttcatagtgagaaaaccaggaagcaatctcaacgaagcgcaaatcattgatttcgtagctaaacaagttactccgtacaagaaggtaagacgagttgcttttataaatgcaatcccaaaaaatcctgctggcaagattctgcgtcgggagcttactaaaatcgctgtggatggcaatgcatcaaaactttgagataaccggctggttcatatattattgtgtcggttttcagtgaaaatgggatctaattaccggttcagacgaaatgtagcttacattcttactacacaagatttaatgtaatattgaccgttcgattaacaacgtgagtattattatttatagcatcgtcattcgtcacc

SEQ ID NO: 361 - DNA, 2871 bp, Arabidopsis thaliana
  Clone ID: ARATH-23APR03-CLUSTER17998_1
aacactccgatccaaaaaaagaagaaaagaaaaacctttgcatacagctaaaaacgatgtcgtctctctctcgctttctccttcgtggcaacttcagcttcagcacccccacgaatcgccgcttcttctccgccgttaccgctgctgcagccacaccctcgccacccaaaccgtccctcatcaccctcgtaaatgacgaacgcgaccccaaattcatcacggagaagttcaagaaagcctgccaagcagagtggttccggaagaatatagccgtctatgagagaaccgttcgccgtctcgctgcagccaagaaatttgagtgggtcgaggagatcctggaggagcagaataagtatccaaacatgtcaaaggaaggattcgtagcgaggattatcaatctctatggacgagtcggtatgtttgagaatgcacagaaagtgttcgacgaaatgcctgagagaaactgcaagagaacagtgttgtctttcaacgcattactgaatgcctgtgtgaactccaagaagtttgatttggttgaaggtatcttcgaggagttgccaggtaagctctcgattgaaccagatgttgcatcttacaatactttgatcaagggattgtgtggaaagggttccttcactgaagctgttgcgttgattgatgagattgagaacaagggtttgaaacctgatcatatcaccttcaataaggagaacagatatgggctagaatggtagagaagaatgttaagcgagacatccgtagttacaatgctcggttgttaggactagccatggagaataaatcagaagagatggttagtctctttgacaaacttaagggtaatgagctcaaacctgatgttttcacattcactgccatgattaaaggatttgtcagtgaaggaaaattagatgaagccataacgtggtacaaggaaatcgagaagaatggttgtcgcccgttgaaatttgtctttaactcattgcttcctgcaatatgtaaggcgggcgatttagagtctgcttatgagctctgcaaggaaatatttgctaagcgtctgctagtcgatgaggctgtcctgcaggaggtagttgatgcattggtgaaagggtccaagcaagacgaagctgaagagattgtcgagctagcaaagacgaatgactatttgcagtgcaagcttcgtctctttcccaaagagtagttaattggcaaggcttattgactagtttttaatttagtctgtgtttccctctttttaatgtcttgttgcaaactgcgagtgcggtgattgaataattgaactatctctatctgtagtgtgaaaaaaaaaaaaaaaaacactaatgactaatgagtaataagtttgaaattttgaataatacaaaagtaatttagggttcatttgctttatattgttaccaaacctaatttgaagtattaaagccgttcccctgactaaaaacctttgaacactccgatccaaaaaaagaagaagagaaaaacctttgcatacagctaaaaacgatgtcgtctctctctcgctttctccttcgtggcaacttcagcttcagcacccacacgaatcgccgcttcttctccgccgttaccgctgctgcagccacaccctcgccacccaaaccgtccctcatcaccctcgtaaatgacgaacgcgaccccaaattcatcacggagaagttcaagaaagcctgccaagcagagtggttccggaagaatatagccgtctatgagagaaccgttcgccgtctcgctgcagccaagaaatttgagtgggtcgaggagatcctggaggagcagaataagtatccaaacatgtcaaaggaaggattcgtagcgaggattatcaatctctatggacgagtcggtatgtttgagaatgcacagaaagtgttcgacgaaatgcctgagagaaactgcaagagaacagcgttgtctttcaacgcattactgaatgcctgtgtgaactccaagaagtttgatttggttgaaggtatcttcaaggagttgccaggtaagctctcgattgaaccagatgttgcatcttacaatactttgatcaagggattgtgtggaaagggttccttcactgaagctgttgcgttgattgatgagattgagaacaagggtttgaaacctgatcatatcaccttcaatatacttttacatgagtcgtatacaaaagggaagtttgaggaaggagaacagatatgggctagaatggtagagaagaatgttaagcgagacatccgtagttacaatgctcggttgttaggactagccatggagaataaatcagaagagatggttagtctctttgacaaacttaagggtaatgagctcaaacctgatgttttcacattcactgccatgattaaaggatttgtcagtgaaggaaaattagatgaagccataacgtggtacaaggaaatcgagaagaatggttgtcgcccgttgaaatttgtctttaactcattgcttcctgcaatatgtaaggcgggcgatttagagtctgcttatgagctctgcaaggaaatatttgctaagcgtctgctagtcgatgaggctgtcctgcaggaggtagttgatgcattggtgaaagggtccaagcaagacgaagctgaagagattgtcgagctagcaaagacgaatgactatttgcagtgcaagcttcgtctctttcccaaagagtagttaattggcaaggcttattgactagtttttaatttagtctgtgtttccctctttttaatgtcttgttgcaaactgcgagtgcggtgatttaataattgaactatctctatctgtagtgtgtttgtgttgctttcaattctcaaagtcaaaagaaattttctt

SEQ ID NO: 362 - DNA, 3542 bp, Arabidopsis thaliana
  Clone ID: ARATH-23APR03-CLUSTER18040_1
cggcggccatgatgccaccggagctacagccgcggctgttccggccccatataaccgcctccaccagtgaacctactcaatcttcctcctcttactcacctcacatgagccctgcatcaaccagaaacttcatcgatcgagctactcctacttcgagatccaacaactctcgattctctccatcttccttcgcctacaatggacggatcgcaattgctcttgtcccttgcgccgccttcctcctcgacctcggcggcactccggttgtcgctacactcacaatcggcctcctcatatcttacatcgtcgattctctcaatgtcaaattcggaggcttcctcggtatatggatgtcactgctcgctgctcagatctctttcttcttctcatcttctctcttttcctccttcaattccgttcctctcggcttgctcgcggcttttctctgcgctcagactactttcctcatcggctgctggacttcgctccaattcaaatggcttcagctggagaatccttccattgttgtcgctttggagcgtctcttgttcgcatgtgtccctttcactgcctcttcttttttcgcatgggcaactatctctgccgttgggatgaacaactcttcttactatttcctcttgttcgcctgcgtcttctactggattttcgctattcctagagtttcttctttcaagaccaagcaggaagttaagtaccatggaggagagatccctgatgatagctttatccttggacagctggagagctgtttcctttcactgaatttgatgtttatgccgcttctctttcacgtggcgtcacattactctgtgatattctcatctgctgcttcagtttgtgatttgctgctcctgttctttatccctttcctgttccagctctatgcttcgacaagaggtggtctatggtgggttaccaaggattcacatcagctgcagagcattcggattgtgaatggggctattgccatggtcattattgtgatctgtttggagattagagttgttttccgctcttttggaaagtatattcaagtgccgcctccattgaactaccttctggtgactacaacattgcttggaggtgctgctggtgctggtgcttctgttcttggaatgatctcgagtgctctgagctcagcctttttcacagctttgtctgtgattgtgagttctgctggagctatcgttgtaggatttccagttctgtttactccgcttcctgcagttgctgggctttattttgctcggttttttacaaagaaaagtgtgccctcttactttgcatttgtagctcttggaagcttaatggttatatggtttgtaatgcataattactgggatttaaacatatggttagccggcatgttcctcaaatcattctgtaagcttatagtggccaacattattatagccatggtgatcccgggtcttgttcttctcccttcaaaatttcacttcctgactgaagctggtatggtgacccacgcattattactgtgttacatcgaggaccgctttttcaattactcaagcatatactattatggaatggaagacgatgtgatgtaccctagctacatggttatcttgacgtcgctaataggattggctgtggtgagaagactgtttgctgaccaccgaattggacaaaaggcagtctggatcttgacctgtctgtattcagcaaagttggctatgctcttcctatcatcgaaatcaattgtatgggtgtctgcagctctattactggctgtttcccctcccttacttctatacaaaatgtgcagggagaagtcgaaatctgcctctaaaatgaagccatggcaaggttatgctcatgccgtagtggttgctgtctctgtctggttttgccgggaaacaatatttgatgctctacagtggtggcatggaagacctccgtctgatggtttgcttcttggttcctgcatcgttttaattggtctggcctgtataccaattgttgccttccacttttcgcatgtcctgtcagctaagagaagcttggtattagtagtggcaactggatgcatgtttattctgatgcagccaccgatgcctatgacgtggagttaccattcagatatgatcaaggccgctcgccagtcagctgatgacatttccatctatggattcatggcatccaaaccgacttggccgtcttggttgcttattgtgtcactcctcttgattcttgctgctgccacatctcttatcccaatcaaatacgtagtagaactgagagcattttactccattgccatgggtttagctctcggtgtttatatatcagcagagttctttctacaagctgctgttctacatgccctgatcgttgtaacactggtgtgtgcctcagtttttgtcatcttcacccattttccatctgcctcaagcacaaagctgcttccctgggtgtttgctcttctcgtggctctatttcctgtgacatatttgttagaagggcaagtcagaattaaaaacgatctcaacgaaaatgttacctggggttgggacacaagggaggaggataagaaagtcacaaccatgttggccattgaaggtgcaagaacatctcttctaggtctctatgcagcgatatttatgcttatagctctcctgattaaatttgagctcacttcgcttttgcgtgagaaattctctgagaggagtggtcagtcaaaaacccaaggaggcgcaagagggattttcccgacacgaatgaggttgatgcagcaacgccgagccacctcgatccaaagctttgcagtagagaaaatgtcagaagagggagcagcatggatgccttctgttggtaatgtcgccaccatcatgtgctttgccatatgcttaatcctcaacatccacctctcaggcggctcaagccaagcgatattcttcctggctccaatcttacttctcctgaaccaagactctgatctcttatccgggtttggtgataaacagagatacttcccggttacagtagccatatcaacatatttggcattatcctcgctctacactgtatgggaagaagtttggtttggtggaaacacaggttggggagtcgaaattggaggccgtgaatggttttttgcggtgaagaacctggctctcctaatactcacagcaccaggtcacatcatattcaacaggtacgtttggagttacaccaccaaacacacagacgcgtcgccgatgctgaccgtgccacttagctttgcagccgtaataataacagacgtgtttcaagttagggttctgggagttttaggcattgtttactctgcggctcagtatgtgatatctaggcaacaatatatgaaagggctgaggtatatttagacagtcgtaggattgattagtaatgttttcgaccctttttgtaacagaatttgtgaaacagtgttttcatttcccagctttgtttctcagtggatgcattggaaattgccaatatacgacgtttgaacaacttaattttattggtcttcttac

SEQ ID NO: 363 - DNA, 2387 bp, Arabidopsis thaliana
  Clone ID: ARATH-23APR03-CLUSTER18048_1
aaaaaactctcttcctttttatctctttgatacatctcaattttgttcttttgccttctctttgatcttatctcttacgattgtgcagatctcaatctctatatccttggttgtgtcagattctcttagggtttattttctctcccaattttgtttgattccttgtccaaagtttcttcctttccttttgacttttttttgtggtacattgaatcagaggtgtaagagtaatagtttcataactcaaatccccaagtgtacaaattttcctcttttggttctgggtttggttgattccttgttagaaatgtaaatttagggcttttgtatctgaaaccgatcttcagacttgtgtaatcttcttgatcttcatgcaagattgataattctacaagaagaagaagaagagaaaatggctactttgactgagccatcatcatctttgagtttcacatcttctcatttctcttatggttctattgggtccaatcacttctcatcaagctcagcttctaatcctgaagttgttagtctaaccaaactcagctccaatcttgagcagcttcttagtaattcagattgtgattacagtgatgcagagatcattgttgatggtgttccagttggtgttcatagatgcattttagctgcaagaagtaagtttttccaagatttgtttaagaaagaaaagaaaatttcgaaaactgagaaaccaaagtatcagttgagagagatgttaccttatggagctgttgctcatgaagctttcttgtatttcttgagttatatatatactgggagattaaagccttttccattggaggtttcgacttgtgttgatccagtttgttctcatgattgttgtcgacctgccattgattttgttgttcaattgatgtatgcttcctctgttctccaagtgcctgagctagtttcatcttttcagcggcggctttgtaactttgtggagaagacccttgttgagaatgttcttcccattcttatggttgctttcaattgtaagttgactcagcttcttgatcagtgtattgagagagtggcgaggtcagatctttacaggttctgtattgaaaaggaagttcctcccgaagtagcagagaagattaaacagcttcgacttatatccccgcaagacgaagaaaccagtcccaagatttcggagaaattgcttgaaagaatcggtaaaattctcaaggccttggattcagatgatgttgagcttgtgaagcttcttttgactgagtcagatatcactctagatcaagccaatggtctgcattattctgttgtgtatagtgatccgaaagttgttgccgagattcttgctctggatatgggtgatgtgaactacaggaattcccggggttacacggttcttcattttgctgcgatgcgtagagagccatcgatcattatatcgcttatcgataaaggcgccaatgcatctgagtttacatctgacggacgtagcgcagttaatatattaagaagactgacaaatccaaaggattatcataccaaaacagctaaagggcgtgaatctagtaaagccaggttatgcatcgatatcttggaaagagaaatcaggaagaaccccatggttctagatacaccaatgtgttccatttctatgcctgaagatctccagatgagactgttgtacctagaaaagagagtggggcttgctcagttgttctttccaacggaagctaaagttgctatggacattggtaacgtagaaggtacaagtgagttcacgggtttgtcacctccttcgagtgggttaaccggaaacttgagtcaggttgatttaaacgaaactcctcatatgcaaacccaaagacttcttactcgtatggtggctctaatgaaaacagttgagactggtcgaaggttttttccatatggttcagaggttctagataagtacatggctgagtatatagacgacgacatcctcgacgatttccattttgagaagggatctacacatgaaagaagattgaaaagaatgagatatagagagcttaaggatgatgtccaaaaggcatatagcaaagacaaagagtctaagattgcgcggtcttgtctttctgcttcatcttctccttcttcttcttccataagagatgacctgcacaacacaacatgaaactgcaccataagtcaaatgtaattagatatctttgttaaaagggttttttctttatggatgttactcagattttatacagatgctttaggttcagtttcaataaagagagatggatagatagatgtacaagattaggagtgctgattaacccaaaacgttctaactatacgcaatcttttgtttccaatacaaaaatctaatatttaggtta

SEQ ID NO: 364 - DNA, 3364 bp, Arabidopsis thaliana
  unsure (1)..(3364): unsure at all n locations
  Clone ID: ARATH-23APR03-CLUSTER18064_1
cggancccagggccgagggagtcccacgcgtcctctcctatagttttgtttaatctttnncgcggcggtgaaatncatgagactagagaagaaaaaccaaaaaccctaaaaaaagaaaaagagagagattgttttcacattttcgcggttttcttcttctccttgtatttatctctgaagtcgtgcttttgatgtgaaaggagaagaagcttgaagacagacaactttaaagttgacgaaaccaatgcttctggtgaagttttgagcttttgagcgatcttttgggtcttgctcttgctcttgaggcagagaacccatagacagttgttttgtctgtttgttggtgtcagatccaaaatcaagaggctgttatagctttgacttggaagtgatttgacacaatgaaggaagaagattcaaaaaaaataagagggtaggaatctatttggtcgcttttgcttcctcctattctggggagaatttgggatcttggagttgaatccgttgtgagaagaaggatctttttgagcttgtgtactgtgtcctctcagttgattcatcgcagagagaagaggtcctgtcatgtctatgagttttgtattcatctgaaaggtcttactggaatgacttatcaaaggggagagtctttggttcctgtcttgatttccaacttggtgggggcataggccaaataatgcaaacctaaaatccttgtttcttccagaatcttgtgagctttttaatctctccaacaaagtacaatttctctgaggattgtgttattacacagagaaaacaaaaagagggtccaagaaaatctcttgcattctcttctcctctctctggtattggtatcttcaaatgagtcgactacagaagcgagggaaacaggaaaagcctgttgtatctgatggagctcaaagggttattgttgctgttaaagcatctagggagattccaaagactgccttgatttgggctttgactcatgttgttcagcctggggattgcattacccttattgttgttgtcccttctcacaactccggacgaaaactttggggtttcactaagagtttccctatgtttgctggggattgtgcaagtggtcatcggaaatcacattctgaagcactaccggagattaaaagtgatctcactgacacttgttcccaaatgattctccagcttcatgatgtctatgacccgaataagataaatgtcaagattaagattgtttctggatcaccctgtggagcagttgctgctgagtcgaagaaagcgcaagcgaactgggtagtaatggacaaacacctcaagcaggaagagaaacggtgtatggatgaattgcaatgcaacattgtggtgatgaagcgttcgcaggcaaaagttctacgcttaaaccttgttggatctcctaagaaagatgctggaaaagagtgtcccttaccatctggaccagaagcagcatctgagaaacactcaaagaacactaaaggattgttagatgctgatagaggactacctgtcactcctactagcagccctgagctggggacaccgttcacaagtacagaagccgggacttcatctgtgtcgagctccgacctgggaacttcacctttcttcacattgggaatgaacggatacatgaagaaggatggagcattggtgatcaaggagaatgatggtcttgatgattctggctctgaaacagagagtgaaaaccaatcattagcgtcaacgagtatgagattccagccatggatatcagaatatattggcacccatcgccactcatcccaggaggccgaagaaagcttattatggaaaaatgatgacagggcacaaatatccactacaaaggctttgcttgaaaagttctctaaacttgatgttgaagttgggttgtcgtctagtcgaaggatggatttagagtttagtggaaacgtaagagatgcaatatcactctctcgaagtgctcctcctggtccacctcctctctgttcaatttgccagcacaaggcgccagtatttgggaaacccccaaggctgtttacatacgctgaattagagcttgcaacgggtgggttttcacaggctaacttcttggctgagggtggttatggatctgttcatcggggtgtgctaccagaaggccaggtagttgcagtaaagcaacacaaattggccagttctcaaggagatgtagagttttgctccgaagtggaagttctcagctgtgctcagcacagaaacgtcgttatgctaattggtttctgcattgaagacagcagacggctcttggtctatgaatacatttgcaatggttcacttgactctcatctatacggtcgtcaaaaggaaactctggaatggccagcacggcaaaagattgctgttggagctgcaagaggtcttcggtatcttcacgaagagtgcagagttggctgtattgtccacagagacatgcgtcctaacaacatcctcatcactcatgataatgagccactggttggagattttggtctagcaagatggcagcctgatggggaaatgggtgtagatacacgagtgataggaaccttcggctatctagctcccgaatatgctcaaagcgggcaaatcacagaaaaagctgatgtctactcgttcggggttgttctagttgagctagtcactggccgcaaagccattgatatcaccaggccgaaaggccagcaatgcctgactgaatgggcacgtcctctactggaagaatatgcgatagatgaacttatcgatccgaggcttgggaaccgttttgtagaaagtgaggtcatttgtatgcttcatgcagcttcgttgtgcatacgtagagatccacatttgaggccacgcatgtctcaggtgttgcgtatactggaaggagatatgataatggatggaaactacgcatcaactccaggttcagaggcaggcaaccgaagcgggaggttctgggcggatcattacagcggtcagctaacgaatgatggctcggataggttcagtgaaaggctgtctgttgaaacgccaagactagctttgagggagagggaaagaagccagaggtttgaactaaaccataacaagcaatactaatcacactactttgctttatgataagtttagttgatagggtatttagtaaagtcctctgttttaagtgatgtggtccaaagctggcaacacagctttttttgtttgtatagtggggtaagatgcaaaaacagttgctaaatatgttatcaaggaatttaaaattgtttttggtaaaggagtattaaaagaacaaaacaacaagagaggctttttctccttttcgagggggggcccggtaccc

SEQ ID NO: 365 - DNA, 2697 bp, Arabidopsis thaliana
  unsure (1)..(2697): unsure at all n locations
  Clone ID: ARATH-23APR03-CLUSTER1807_1
gatttctgttaaatccgttgggttcttccatggatcctcatcgtcatcgcctccatctccgtctttcttcttcttcttctgctcgattctaattccgtaagagagaaataataaaggattcatgttcacatcttctacctgatgagcataccatgattctctcgctatgcgttggcttccgcaaatctcgttctcgtctccttcttcttctccatcttcttctctaaaacccgtggcttcttactctgaatctccggatccagatcgtaatcaggatcgggatcggtttcatcgccgcttgtttcgttttaaccgtggcaggctcacccgtcagcggaagcttcgtcacttgacggatgacgatgttttgttgggagaacgtcgtgcttctacctcttcctccaccttcgattccggtttaactcgctctcccagcgctttcaccgccgttcctcgctctccttctgccgttcccttacccttacctctccccttaccggaggtcgccgggattcgaaatgccgcaaacgctagaggattggatgacagagatcgagatcccgagagacttatttctgatcgcacctcttctggtcctcctctcaccagcgtcaatggcggctttgcccgtgactcgaggaaagctacggagaattcgtcatatcaagattttagtccgagaaacagaaatggttattgggtgaatattccaaccatgagtgcaccaacgagtccatacatgagtcctgtgcctagtccacaaaggaagagtactggccacgatttgccttttttttatttgcctcctaaaagcaatcaagcttggtctgctccagatatgccacttgatacctctggtcttcctcctcctgcattttatgatattactgcctttagtaccgataattctcccatccatagtccacaacctcggagtccacggaaacagatcagaagcccacaacctagcagaccatcttcaccgttgcattcggttgatagctcagctccaccgcgagatagtgtttcctcacctttgcatccgaggttgtctactgatgttacgaatgggcgacgtgattgctgcaatgttcatcctttgcctctccctcctggagctacttgttcctcttcatcagctgcttctgttccgtccccgcaggctcctctcaaactggattcattcccaatgaattcccagtggaagaaagggaagctaataggtcgtggtacttttggaagtgtttacgttgcaagcaacagcgaaactggagcattgtgtgcgatgaaagaagttgagctatttcctgatgaccccaaatccgcagagtgtataaagcaattagagcaggagatcaaacttctaagtaaccttcaacatccaaacattgtgcagtattttggtagcgagacagtagaagatcgtttctttatatacctggaatatgttcacccgggttcaataaacaaatatatccgtgatcattgcggcaccatgacagaatctgttgttcgcaattttactcgtcacattttgtctgggctggcttatttgcacaataaaaagactgtacatagggatatcaaaggtgctaatctccttgttgatgcttctggggttgtcaagcttgctgatttcggcatggctaaacaccttactggacaaagagctgatctctcgttaaagggaagcccgtactggatggcaccagagctcatgcaagctgtgatgcaaaaagatagcaacccagatctggcttttgctgttgatatatggagtttaggatgtacaatcattgagatgttcactgggaagcctccttggagtgagtttgaaggggctgcagctatgttcaaggtcatgagagatagcccaccgatacctgaatcaatgtcacctgagggtaaagacttcctgagattatgcttccagagaaacccagctgagcgaccaaccgcatctatgttgctagaacaccggttcctaaagaactctttgcaaccaacctcaccaagcaacagtgatgtctctcaattatttaatgggatgaacataacggaaccaagcagtagaagggagaagccaaatttcaaactagaccaggtcccgcgagctagaaacatgacatcctcagagagtgaaagtgggcaacagcagcagcaacaacagtaccggtctcccgatctaacaggaaccgtgaaccgtctgtctcctcgttccactctggaggctatcccaagcccgtgtccttcccaacgacctaagcccagcagcagtgacaggagaagaacgggcgtcacttcagatcacctttgatttgcagctcgagaggttaaccaatagaagctacttctatacgtattcttgtacacgtaagtgtatgtcaatgtacgtatttagagtttggggtcgcgtgggggaatacgattgggatgaaatgaaaatcctgtgggtggtagatgaagaatattgtgtctgtaaaattataattcaatgttgaatcgatagaagaagcttttttccttcttaaaaaaaaaaattttttttttgcttgagagagttgtgtataaattattttaacgacgtcttgtgtacctttggtttcgggtctgtatccacttttagatttagatccatttaaaacaaaattaatctctgaaaaaaaaaaaaaaaaaagaggggcggccacactnnnc

SEQ ID NO: 366 - DNA, 2965 bp, Arabidopsis thaliana
  unsure (1)..(2965): unsure at all n locations
  Clone ID: ARATH-23APR03-CLUSTER18091_1
gcaccagntcactagagncccccccacctcactagtcccccctcagccgggtagtgttagatatctctgtttcaatcattgtgaaattctctgtttccaagtttggttttttgcttcaatggcggtgatgatgcttatgcgacaggatattcataacctggattaaagtttttggtgctttgtttaaacaatggctgcgtggtcaccatcagttgggataggatcttgttgtctcaataatggcatcactagaacatggaagtttccttctgcaaggctttttactggtaggaagaacaagattaaacttggatccgagacactaatgtttacacgaaaacgtttcatgggtgatttggttacaagcgcgttgcaaagttatcagtttagtaagatatgtgcttcaaagacttccatcgagctgagagaggcattgtctagtagaagagctgaggctgatgacctgaagaaggtaacatcatattcattcaggacaaaagcaggtgctctggttaaagtcaaagttgaaaagaagagagaaaagtacagcattttggtttatgtctcatctttggaacttagtggtgatgacaagagtaggctggtgatggtttggggtgtctacaggtctgattcttcgtgttttttgcctctggatttcgaaaactcttcccaagactcacaaacccacacaacagaaactacatttgtgaaaagctccttgtctgagttaatgctagggctagaatttgatgggaaagaatctcctttctacttatcatttcacctgaagttagtgtcaggtagagatccggacggtcgagaaatgctgactcacagggacactgacttctgtatcccggttggttttactgctggtcatccattgccgctaggcctttcttccgggccagatgatgattcttggaatttttcgttcttttcaagaagctcaacgaacgtggttttatgcttgtatgatgatagcacaacagataaacctgctttagaacttgatcttgatccttatgtcaaccgaacaggtgatgtttggcatgcttcagttgacaatacatgggattttgtgagatatggctaccgttgcaaggagacagctcactctaaagaagatgtcgatgttgaaggtgagccaattgtcttggatccatatgccacagtcgttggtaaatctgtctctcagaaatatcttggaagtttatctaagagtccttcttttgattggggagaagatgtgtctccgaacatacctctggagaaacttcttgtttaccggttgaatgtgaagggttttacacaacacagatccagcaagttgcctagtaacgtagcagggacattttctggtgtagctgagaaagttagccatttgaaaacccttggaaccaacgctgttcttttggagccaatattctcattctccgagcaaaaaggtccttattttccatttcatttcttttcaccaatggacatatatggaccttccaatagccttgaatccgcagttaactcaatgaaagtgatggtgaagaaattgcacagtgagggaatagaggtacttttggaagtagtttttacacatactgctgattctggagctcttcgtggaattgatgacagttcctattactacaagggaagagccaatgatctagattctaaaagttacttgaactgtaactatcctgttgttcagcagttggtattggagagcttgcgttattgggtaaccgagtttcatgtagatggattttgttttataaatgcttcatctctcttgagaggcgttcacggtgaacagctctctcgtcctcctttggttgaagcaatagcttttgatccacttcttgcggagaccaaactaatagctgattgctgggatccacttgaaatgatgccaaaagaagtacggttcccacattggaagcgatgggcagaactcaacacaagatattgtcgaaatgtaagaaattttttaaggggaagaggcgttcttagtgatctggctacaagaatttgtggaagtggtgacgtatttaccgatggaagaggtccggccttctccttcaactacatttcaagaaactcaggactctcgcttgttgacatagtcagtttcagtggccctgagctagcttcagagctaagttggaattgtggggaagaaggagcaacgaataaatcagctgttcttcaaagaaggctaaaacaaatccgcaatttcttgtttatacagtacatatcacttggagttccagtgcttaatatgggagatgaatgtggaatctcgacaaggggctcgcctttgttggaatcacggaaaccttttgattggaacttgctagcttcggctttcggtacacagatcacgcaatttatctccttcatgacttcagtaagagcaagaagaagtgatgtgtttcaaaggagagactttttgaaacctgaaaatattgtttggtatgcaaatgaccaaacaactccaaagtgggaagatcctgcttctaagtttttggcattggagatcaaatcagagtcagaggaagaggaaactgcgtcattggctgagccaaatgagccaaagagcaatgatctgttcatcggattcaatgcgagtgatcatcctgagagtgtagtcttaccttcacttcccgatggaagcaaatggagaagattggtcgacacagctcttcctttcccggggtttttctctgtcgaaggagaaaccgttgtagcagaagaaccgttgcagcaactggttgtgtatgagatgaagccgtacagttgtaccctttttgaaaccatcaatactaccgcttagaactcaagttatgatctttgtatatgttactgttttgttacatttccagtaagaatatattcagttaaatcaatgatttccacaaaaaaaaaaaaaaaaaaaaagggcggccgcccttttgcttgt

SEQ ID NO: 367 - DNA, 2152 bp, Arabidopsis thaliana
  Clone ID: ARATH-23APR03-CLUSTER18101_1
aaaaaatctgggccaggggggtcggtctctccgccgggagcctccctggtggggtgcacgcggcgctttggcgttgccctccgcccctctcctaggctgctccgccttcctctcttcttcttctttcttctttcatctctttcttttattaatcccctttcttttctaactttctcgattcatcagagccatgggtgtctgtttctccgccattagagtcactggtgctagcagcagtagacgaagcagtcagaccaaatccaaggctgctcctactcccatcgataccaaggcctctaccaaacgccgaaccggctccatcccctgcggcaagcgtaccgattttggctactccaaagacttccacgatcactacaccatcggcaagttgctcggccatggtcaattcggctacacctacgtcgccatccacagacccaatggagatcgcgtcgccgtcaaaagactcgataagtctaagatggttcttcctattgctgttgaggatgtcaagcgtgaggttcagattcttattgctctctctggccacgagaatgttgttcagtttcacaatgcctttgaggatgacgattacgtctatattgttatggagttgtgcgaaggaggcgaattgctggataggatattatccaagaaaggtaatcggtactccgagaaagatgcagccgttgtcgttaggcagatgctcaaagttgcaggagaatgtcatctacacggtcttgtacatagagatatgaaaccagagaactttttgttcaaatcagctcaactagattcgcctctaaaggctacggattttggtttatcggattttatcaaaccagggaaaaggttccatgacattgttggtagcgcctattatgtggctcctgaggtattaaagcgcagatcagggcctgaatcagatgtatggagcattggtgtgattacgtatatattactttgtgggaggcggcctttttgggatagaactgaagatggtatatttaaagaggttttaagaaataaacctgacttcagccgtaaaccttgggcaactataagtgacagcgccaaagattttgtgaaaaagttacttgtaaaagacccacgagcacggctaactgctgcacaagcactatcacatgcgtgggttagagaaggcgggaatgctactgatatccctgtcgacatttcagttctgaacaacttaagacaatttgtgagatacagccgtctaaagcaatttgctttaagggcgcttgctagcacacttgacgaggcagagatctctgacctcagagatcaatttgatgcgattgatgtggataaaaatggcgtcattagtcttgaagagatgagacaggcacttgccaaagatcttccttggaaactgaaagactcacgagttgctgagatccttgaagcgattgatagcaacactgatgggttagtggacttcacagagtttgtagcagcagctctacatgttcatcaactagaagaacatgattcagagaaatggcagctaaggtcaagagcagcttttgagaaattcgacctagacaaagacgggtacataacgcctgaggaacttcgaatgcacacggggttaagaggatcaatagatccactgctggatgaagcagacatagacagagatgggaaaataagcctgcatgagttcaggagacttctaagaacagcgagcataagttcacagagagcaccaagccctgcaggtcacaggaatcttcgatagtatatactagaagaggagtaagtaaaggatacagaatgtaatttgttgggatgtgatatgtcttatcttcttatatgtaatgttggttgtaagataagtggggtattttggcgtttgtagtgataagtaagtaatactttggttgtttaaggcgcagcaaaacaaagagagaaagtggagtgagaatcccattgatgaaatatgagagagctcttaaggtgcactagatgcaagaggacacgtggcattccctgaatgggggacaaatccaattttaaatttttaatggttgggcaccaaaagaaacatagagagccagctgtaatttcgattctatcatatattttgtctgtttccatttttcttataatattcgttttgagagcaccg

SEQ ID NO: 368 - DNA, 1596 bp, Arabidopsis thaliana
  Clone ID: ARATH-23APR03-CLUSTER1811_1
aatcgtcatttcctcggtatctcctcctcgaaagaagaatgcctggaattagaggtccttcggaatactcgcaggaaccacctcgtcacccttctctcaaggtcaacgccaaggaactcaatcgtcatttcctcggtatctcctcctcgaaagaagaatgcctggaattagaggtccttcggaatactcgcaggaaccacctcgtcacccttctctcaaggtcaacgccaaggaacctttcaacgccgagcctccccgctcggccttagtctcatcttatgtcactcccgtcgaccttttctacaagcgaaatcatggtcccatccccattgttgatcaccttcaaagctactccgtcacccttactggattgatccagaacccgagaaagctctttatcaaagacatcaggtccctcccaaagtacaatgttactgctactcttcagtgtgccggtaacagaaggactgccatgagcaaagttaggaatgttagaggtgttggatgggatgtttctgctattggcaacgctgtctggggtggggcgaaactggccgatgttcttgagcttgtggggataccaaagctgactgcttctaccaatttaggagccagacatgttgaggttcgttagtgttgacacgctgtaaggaggaaacttgggggcccattataaggcgtcaatctgtctaagttcaagccataaatcctgaaacggaggttctcctcgcatatgtggtgaatggggcgactctgaacagggaacacggatttccgttaagggtggttgtccctggtgtgattggtgctcgttcggtcaaatggcttgattccatacaatgtcatcgctgaagaaagccagggattcttcatgcaaaaagattacaaaatgtttccaccctctgtcaattgggataatatcaactggtcctctaggagaccgcaaatggatttccctgttcagagtgcaatctgctctgtggaggatgtgcaaatggtgaagcctggaaaggtaagtatcaaaggatatgcggtttcaggaggtggacgcgggatagaaagagtggacatatccctggatggaggcaaaaactgggtggaagcttctagaacgcaggaaccaggaaagcagtacatctcagaacacagctccagtgacaaatgggcatgggtgttgtttgaagccaccattgatgtttcacagactacagaggtcatcgccaaagcggttgattcggcggcgaatgttcaaccggaaaatgtggagtcggtgtggaacctaagaggggttctcaacacttcgtggcaccgtgtccttctccggcttggccactctaacttgtagaccaagttaccactatgcgtctggtctctctttatcttttctttaagaactaaaacatccttgaatatgcttgtccttgtggatctgtgagagcaaaatactgtttatagttaaataaaatgggaaaacccatctgttgtcatgtggtggattataaattatttatttatatgatagaactgttattcactattatatattaatgaaatcatatggttgagcaaaaaaaaaaaaaaaaaaagggcggccgc

SEQ ID NO: 369 - DNA, 1105 bp, Arabidopsis thaliana
  unsure (1)..(1105): unsure at all n locations
  Clone ID: ARATH-23APR03-CLUSTER18135_1
gcacaatggcggccaacctgatttctcccccggtggcttgcccgtgcgtaaaagcctttttagttctattgacaatggcgacgaagctgatttctccgccgttgtcttgtccgtgggttacttcaagagaggtgataatcaaagggcttccacggcggagaagagaatggatggtcacgaagagaaacagagtctctgctgtcacggccatgattgtggagccactttctgttgtttcttcttcagcaattcagattcatcaatggtgggaacaaaaccctaattcgttactgttaatgacggaggctactggtggttattcgttggctagctattatacgtctttgggtttgtttgttatctctgttcctggtctttggtctctaatcaaacgctctgttaaatcaaagatagtgagaaagacgtttgttgttaatgacgtcaagaaggagccaaagcaagtagctggagagattctatctttcttcacaaggaagaatttcaatatcactgatcgtggagaaacaatcacatttgaaggaaagatggttccaagtagaggacaagctgctctgcttacgttttgtacatgtataagcttagcaagtgttggtcttgtcttaaccattacagttcctgattttggaaacaattggttcttcatcattctccttagtccactcgcaggagtgtattactggaaaaaggcgtcgaggaaagaggagataaaagtgaagatgatggtgggatcaaaagggagattggatgagattgtggttcaaggagatgatgttcaggtcgaagaaatgaggaaagagcttcagcttaatgagaaaggcatggtttatgtcaaaggtctctttgagagatcatcataatgataacattttagcctcccatttttgccttttggggaatgtgtctatacttgttttattaaggttgagattaatgactttttaactcatttcccatacttcatactaaacgaatcgatttgaataaaaaaaaaaaaaaaaagggcggccgcggcggcccgctcccccatcgatnatnccccaggtnaannccacccccatttatagccaaaaanaatcaccccaac

SEQ ID NO: 370 - DNA, 2476 bp, Arabidopsis thaliana
  Clone ID: ARATH-23APR03-CLUSTER18163_1
agatcgaatttgatcagtgagagaggaggagatatgggtgctcagaagaaaggcggcgccgccgctagggtttcagaggatgcggaggtacagagtcgccaccgattgcaagcaattcttcttgccgacagtttcgccacgaaatttcgtcccgtaaccctagaacgcccaaaggtactgttaccgatagttaatgttccgatgattgattacacattggcatggctcgaatctgctggaatagaggaggttttcgtcttctgttgtgctcattcgatgcaggttatcgaatatctggagaaatccgagtggtattcgcatccaaacttgcttgtgagaacgattgagtcgcacaaatccatcagtgctggagatgctttgcgttacatgtatgaacaacagacagagacgtctcagattcaaggtgatttcgttcttgttagtggagatactgtgagtaatatgccacttgctgatttgattcaagagcatagagagaggaagaagaaagatgagaaagctattatgactatggttattaagcagtctaaatcttctccacttacgcatcagtcaagattaggaacagatcagcttttcattgctgttgatcctttgacaaagcagcttcttcattacgaggaagataagattgatcatccaagtgggtcagtttgcttagagaagtcattgttggatactaatccttctgttttagtatgcaatgatatgcaggattgctacattgacatatgttctcctgaagtgcttagtctctttgaggataactttgattatcaacatctgcgtcgtcattttgtcaaaggtgtgcttgtggatgatattatgggttataaaatcttcactcatgagattcactcgagctatgctggtaggattgataatttccgaagctatgacactgttagcaaggatataattcagaggtggacatatccttatgtaccagatattaatttcagtggaaatcggcctctaaagctcgggagacaagggatatacaaggcttctgatgtagttcaatcacgatctgctgatgttggagcttctactgtcattggatacggtacgaaaattggtcatggggataaaatcatgaactcggttattgggaatggatgctctattggatcaaatgtggtgattgaaggctcatacatatggaacaatgttactattgaagatgggtgtgagataaggaacgctattgtgtgtgatggggtgaaaatcagagcaggagctgttctgcagcctggtgttgttttgtctttcaatgttgtagttggacgggactttgttgtgcctgcatactcaaaggtttccctacttcaacagccaacgacagaagacagtgatgaagagctggaatatgctgatagtagcagcgggactgcggatcatttgtcaggcctaaatctgcaaatggagtccaaagcatctgagcttggtcctgatggagcaggttacatatgggaagtatgtgaaggggctcatgatgaggagtggaagcattctgttgcaccaatccccaaggataaactttctgagattactcaggccatagacgatgatgacacagatgatgaaagtgtcgtcccgacttctggagagttgaaatctgatgctgatagtattaacactgatgtgaatgatcccaatgatgattactattactttgagaaagaggttgaagggaccgtcttaagggctgttgaagagaatatcaaagtggaccttgtaactatggagattaacgggctgcggttgtcattcaacatggaatctgcagattgtgctggagcaacatttttctcgatgataaaactggcacttgatactccacacaattctggtagtgagttgtataaaaacgcagcgagtatcattacaaaatggaaggatcttcttggcttctacgcaaagaaaattgatgaacagatagaagtgatcatgaaatttgaagagatgtgtcaggaatctcacaaagagttgggccctttgttcacacaaattctacatcttctatatgacaaggacgtgttgcaagaagatgcgatactgagatgggaggaagagaaggcaggcgcggatgaagctgacaaagtatatctgaaacaatgtgatacattcatacagtggctcaaagaagcatctgaggaggaagatgaagatgatgaagatgaagaagaagaagaagataactgaattggtatacctgagttcgatggctctcaactagttgttcattatgcagttgatggcctcacattttgattgatcatttacttttaagagctactctgttttttgttctgtcatcatcaataatctttttttcttcatgtcttctgttctgttgcttcatgagatactttctcatccacgagtttgctcacatgtatcgtttgatatataattttacttgagtactaaatctcttaatttttatttgccc

SEQ ID NO: 371 - DNA, 1406 bp, Arabidopsis thaliana
  Clone ID: ARATH-23APR03-CLUSTER1816_1
gaaaaatatctcgaatccgattccttttttctcttctgcaatctctttgaaacctcaagcttctcttcaaaatttcgattacagctgaagattctctcgattttctggttttgactttttttttgtttggtttggtgaaagatttggatcaaatgggggtggattactacaatgttctgaaagtgaatcgaaatgctaacgaagatgatctgaagaagtcttaccggcgaatggctatgaaatggcaccctgacaaaaaccctacgagcaagaaagaagctgaagctaagttcaagcagatctctgaagcttacgacgtcttgagcgatcctcagagacgtcagatctacgatcagtacggagaagaaggtcttaaatccaccgatttacctactgcggcggagacggcggcgcatcagcagcagcggagctactcttctagcaactctgagtttcggtattatccgcgtgatgctgaagatatctttgctgagtttttcggcgaatccggtgatgcttttggcggagggagtagcggaaggacacgtggagatggcggtgatggtggcggtcggagatttaaaagtgcagaagcagggagccaggctaatagaaagacgccgccgacgaacaaaaaaacgacgccgccggcgaataggaaggctccggctattgagagtaaattggcttgcacattggaggagctctacaaaggtgcaaagaagaagatgcgaatttctcgcgttgttcctgatgattttggaaagccaaagacagtccaagagatattgaagatagacataaaaccaggttggaagaaaggcacaaagatcacttttccagagaaaggcaaccaagaacctggtgtcactcctgcggatcttatattcgtggttgacgagaaaccgcattcggtattcaagagagacggtaacgatctgattctcgagaagaaagtctctcttatagatgctttaaccggtctcaccattagcgtaacgactctagacgggaggagcctaactatcccggtgctggatatcgtaaaaccgggtcaggagattgtgatcccgaatgagggaatgcctactaaagaccctttgaagagaggagaccttagagttacctttgaaatcttgttcccgtcaaggctaacgtcagaacagaagaatgacctcaagagagttcttggtggaagctgatgagttgacgtttagttttcaagtaagctattgatcttctttaacaacggattccacaggaagttgctagtcatttgagtgtacatacatttacgtttttcctttgtaaacttgtgttataagaaaaacaagaaaacccaaatcgaataagactggatatgcgggatctaataatggctgccacacacaaaaaaaaaaaaaaaa

SEQ ID NO: 372 - DNA, 1659 bp, Arabidopsis thaliana
  Clone ID: ARATH-23APR03-CLUSTER1817_1
caaccagaaagaaaaaaaaaatgaagaagagtatcgaaactccgttattgttgaacaccaaacaatcacaagacgaagataaagaaaaaataagatgggagaagatgaagaaagttgcttcaatggctgctccaatggtcgccgtgaacatgtctcaataccttcttcaagcaacttctacaatgatcgtcggtcaccggagcgaactcgctctcgccggaatcgctctaggaagctcctttgctaatgttaccggctttggtgttctttttggactttcaggttcattggaaacactatgtggtcaagcatatggagcaaaacaatatcacaagcttggatcttacactttcacttcaatagttttccttttgattatctctgttccgatttcgattctttggatgttcatgaaccagatcttgctgttgcttcatcaagatcctcaaatagcagagttagctggtgtgtactgtctctggctggtaccagctttattcggttactctgttctcgagtcgttggttcgatattttcagtcacaaagcttgatttatccaatggtcttgagctctctagctgctctgtctttccatgttcctctctgttggctaatggttcataaatttgattttggagccaaaggagcggctgcgtctatcggtatctcttactggctcaacgcggtttttctttgggtttatatgaaacgctctagtcgttgtgtcgaaacgcggatttatatgtccaaggatgtttttgttcatacaaatatcttctttcaatttgccattccttctgcaatgatgtgttgccttgagtggttagctttcgaggtcattactttgctgtctggtcttctacccaactcaaagctcgaaacatcggttatttcgatttgcctcacgacctcttcattgcattacaatctagtaaatggaattggtgatgcagcaagcaccaatgtggctaatgagctaggagctgggaatccgcgaggggctcgtgattctgctgcggctgcaatcataattgcagctgttgagtcagttattgtgagctctagtctgttcttgtctcgcagtgtgtggccttatgcatatagcaatgtggaggaagtaattagttatgtgactgatatcactcctattctttgtatctcaatcctcatggacagcttcttgaccgtcctctccgggattgtgagaggaacagggtggcaaaaaattggagcttatgtgaacataacctcttattatgtcattggtattcctgttggacttctattgtgttttcatcttcacttcaatgggaaaggactttgggctggtttagtcacaggatcaacattacaaactctaatcctatttcttgttattggatttaccaattggagcaaagaggcaattaaggctagggagagaattggtgatgagaaagtttggagacatgactcattgcttaattgaagaaaaaaagaaatacaaacttttgggggattttgattgcttctttttttgtgtgtgtttgtgcaataaccttcagttgattgtaatttatattgaaagtacattatagtctttcatatgatattagagtgtaagaaagtttgaaaatatatctcagcaaaaaaaaaaaaaaaaatataatagatgaatt

SEQ ID NO: 373 - DNA, 2256 bp, Arabidopsis thaliana
  Clone ID: ARATH-23APR03-CLUSTER18184_1
gagaaccttctttttccggcgagggaagagcttcctcagccctaatcgctaaatcgatgaaattatgctcccaacgtttaacggtttaaagatcattccaaaaactcaaccttttgcgtgtctcctctcgccatgaccctaatctcaagatttttgatctctagagtgattagtagaactctgttttcgaatcagaataatagaacagctattaatgtttctgtaaagttgccacaattcagaattcagagtaatggatatcacacattgggtcttcttcataatgttaaaggaaggtttttaggtagtaatcatcatcagcttgcgcgtaggagctattcgattgcagttgcgagtaatgtagttaagcaacatgctcaagtctcttggggaaggcttgtacagagagtaactctgagtcgtagttggaacttacctcggataagtcagattgctcaagcgtgtagcttgtctttagcccgttcgcacttcttgttacctggtttattggctcttacctatagacaagtggcgtatgcgcaaagggtggttccaaatcctgtggtctattctccttcacacatttctccttataggagttcgataaacttccctatcgttctctcgtctttagtgttttctgcggtcaagggtgttgttctgatcgggagagctctttatttagcaattttgttttctccaaatgttattatggcgttgttgggatttgcttgcgggcctcgttacagacagctgcagtatgaggtcctccatcgaactctggagaaagcaggtcctgcttttatcaaatttggtcaatggattgctacgcgacctgatcggtttaataaggatttgtgtttgcagctttcaaagcttcacagtaatgctcctgagcacagttttgcgttcaccaaaaagagcattgaaaatgcatttggtcgtaaactctctgagatatttgaggaatttgatgaggcgccagtggcatctgggagtatagctcaagtacaccgagcttccttgaagtttcagtatgcaggacaaaaggtgaagtcctcggaagttgctgtgaaagttagacatccttgtgttgaggaaacgatgaagcgagattttgtgataattaatttcgtggcgaggctaaccacttttattccggggttaaattggcttagattggacgagtgtgtgcaacagtttagtgtctacatgttgtcccaagttgatctctcaagggaagcttctcatttgagtcggtttatatataacttccgtggatggaaagatgtctcttttcctaagcccatctatcctctaatacatcccgctgttttagtcgagacgtatgagcacggagagagtgtggctcgttatgttgatggctccgaaggacaagaaaaacttaaggctaaagtagctcatatcggaactaatgctctcttgaaaatgctcctggtcgacaacttcattcatgctgatatgcatcctgggaatattcttgtccggccaaacaatactagaagaggtctattcagatcgaggaagccacacatcgttttcctagatgtgggcatgactgcagaactttcaaaaactgaccgagataacctactcggatttttcaaggccgttgcacgtagagacggccggactgctgctgaacgaacacttaaattatctaaacaacagaattgtcctgatccacaggcctttatcaaggaagtagaagaagcatttacattctggggaacagaggaaggggatctagtccatccagcggattgtatgcacgaactattcgagaaaatgaggagtcatagagttaatatcgacggcaatgtgtccaccgtcatgtttacaacattagttctcgagggttggcaacggaaactggatccaggatacgatgtgatgcgtacgctacaaacaatgctgctgaaaacggattggatgaaatcactttcttacacgatcgatggacttatggctccgtagattgaaaaggttcaatctttgattcttttacccatttaacacttgagagccacatttttgttttgttgccttaggatgtgaagaagaaccaaaacatatattttagagaaaaacaaaggaaaagtcctttactgttttgtcttcttcttatcttttgcttattctttgattattctttttgctagaaattggaattcttcatcattctaaaacagagaatttgtatttaaggtatatatcagttttgaatttcctcgg

SEQ ID NO: 374 - DNA, 1833 bp, Arabidopsis thaliana
  Clone ID: ARATH-23APR03-CLUSTER181961_1
aaaaaatacagaaagtgaaaaagataaaaacttttttcttttctcttcttcagtttcttcttctttttgttttccttcctcgttctttcatgtcttccttgtgccattgatgagtccgtcaagaccaaatcgagagtagtgcaagacttttttctcacactgtttctaaaaccgcgtgagaaatcttcttcctcctcagatctctaccttttcccttaaattttcccgcattttctctctcttccaagcttctccaagcgtacaagctacttcttcttccataaactcaaagtaaaaccctaaaccaaaactctcttcacctctataaaaacaccacctttttttagctcctgtctctttcacagacttcaatcgcattttcattaccagccaaaaatcatcttcaatttccaggttacaagcttaagctttttcatagatagatagaaaagagaatgatgggaggaaaatctagcaagagcaaaaagaatgttgaatttggttcaccgtcaacgccagttcaaatcaagataaactcagagtacacagagcatttaagctcatacgaaagagcttgtagtgaagatccaaagcttgaatcttttgactctgcgcttcacgaaagaactaacagagtcatcaacaagcttgcttcaggagttgagatcaagtctttgtcgtttgattcacttagggaagtgacacaatgtcttttagatatgaatcaagatgtggtcaaagttatattgcaggataaagaagatatatggaacaatcaagatttgttctctcttgtgaatttgtattttgaaagtactgcaaagactatggatttctgttctgagcttgagaattgtcttaaccgcgcgaggcggagtcaagtgattattcagtttgctgttaaccagtttgaggaagagaatgaggataaggagaatagaaagtatgagaagactcttgaggagcttaagaggtttaaagtagctggtgaaccgtttacgaaagagttctttgctctttttgatttggtttacaagcaacaggttatgatgcttgaggagcttcataagttaaagagaaaactcgataagaggcttaggaatatcaaaacatggagaagggtgtcgaatatggtgtttgtgactgcgtttgtctctgtgcttatcttctcggtggttgcagccgctgtggctgcaccgcctgttgtggcggctatagctggtgcattggctgttcctgtaggttctgttgggaaatggtgcaacactttgtggacgaagtatgagaaagtggttagagggcagaaggagattattacatcgattagaatcgggacttatatctcggttaaggagatggataatataagtattcttgtgcgtaaagtggaagtagagattgaatctttgttgaagaaagctgagtttgctattactgaggagaaagaagtgaggcttgctatagatgagatcaagaagaagctcgatgtgtttactgaaaccattgaagaacttggggaacatgcgggtaagtattgtagcgatgtgacaaaggcgagaaccgtgattctgcagaggataatccgatacccggctggttcaccgaaggatgaagctccttggacggagatgatgtagtgagaatgtggattcggattcagatttgtgtttggctttggaaaattgttggtttgtcatctttagcacaagtattatgaacagctaaaggataatctttacctaatgttattagttgccctgaggaaacctttgtttaatacatttaattaaagagacacttgtaaggtttctatgccaaaaaaaaaaaaaaaaa

SEQ ID NO: 375 - DNA, 1352 bp, Arabidopsis thaliana
  Clone ID: ARATH-23APR03-CLUSTER18197_1
aaatatttaaggaaacaaataaaaaacaaaaagattcatcttccaatacccaacgcatattacgcagccaccacacagcggagagagagagagaagaaacagaaacagaaacagagctcgagctcgagacgctcaatattaatggcggccgcatcagcacgagctttcttcatgctctctcgtgtaactgacctttcaaagaaaaagctaatccttcaccaaccaccaccgtcgtcatctcctcaccggctaccttatgctccgaatcgtgcggtgtcttcctccgctgtaatcagctgtctcagcggtggtggtgtttcctccgacgattcgtatgtatctactcgtcggtctaagttagatcgaggtttcgctgtgatcgcgaatttggtgaatcggatccagccgcttgatacgtctgttatctctaaaggcttatctgattcagctaaggattcgatgaaacagacgatttcttctatgcttggtcttcttccttccgatcaattttccgtttccgttactatctccgaacagcctctttatcgtctccttatttcttccatcatcaccgggtatacattgtggaatgcggagtatcgtgtatcactgaggaggaattttgatataccgattgatcctagaaaggaggaggaggatcaatcttcgaaagacaatgttagatttggttcagagaagggaatgagtgaggatttagggaattgtgttgaggaatttgagagactgagtcctcaggtgtttggagacttgtcacctgaagcgttgagttatattcagcttttgcagtctgagctatcttccatgaaagaggagctagattcacaaaagaagaaagctttgaggatagaatgtgagaaaggaaacaggaatgatttgttggattatttgcgttctttagatcccgagatggtgactgagttatctcaactgtcttcaccggaagtggaagagattgtgaaccagcttgtccaaaacgtattagagaggctcttcgaagaccagactacttcaaatttcatgcaaaatcctggcataaggactacagaaggtggtgatggaactggtagaaaggtggacacatccagggattaccttgcaaagctccttttctggtgcatgctattgggacatcatttaagaggtttggagaatagattacatctcagctgtgttgttgggttgctgtaatatcagagaatcataaaaaggagacaagataaaaaagaaacacaaatgtatattcttctcccccattttgatttctttaatctaagcgttaagttattatctaaaaaaaaaaaaaaaaaaaaacgcgagactagttctcgtgc

SEQ ID NO: 376 - DNA, 1799 bp, Arabidopsis thaliana
  Clone ID: ARATH-23APR03-CLUSTER1819_1
agtttcggcttctctttttctcgtccaccaacataactatttctcctcttttctagcaaaagtaaaaaataaaaatttacaatatttttcttgcatagaatctctctctccatttttaggattcttcttcttcttccattagtctctattgaatcagcatctcaactctcaggttggattttgagagctaattaaatagttaagatgatggaaatagcttatcagcctcggattgattccgagattgaatcactcgtcgagagaatcaatcctccaagggtttgtgtagacaacgactctgacccagagtgcacacttattaaggtagatagcgcgaacaagtacgggatattactggacatggttcaagtgttagccgatcttgatctcgttatctccaaatgttacatctcatctgatggcgaatggttcatggatgtgtttcacgtgacagaccaactcgggaataagctcaccgaccgaagccttattctctacattcaacaggcaatatgttctagtagaacgggaggtataacaaaggagatgcagagtaatctaaaacgggaggtgcaacagcgccacgtgtcaacagaacacacggcctttgagataaccggaatcaatagaccgggtctactatccgaaatatctgccgtactttccgacattggatgtcacgtgacggctgctgttgcatggacccaccacgagcgagcggctatggtgatttatctagaagacgggtttaacggtgggcccattatcgacccaataagaaaggcccaagtaaaggatcatctggatacagtcatggaggcccatcacatagttggcgatgtgtctcatgtcgtcgtgagggtcgtcgaggctaaaggagttccggtcgggtgggctcacactgagcgacgacttcacgagctaatgtacggagaaggagattacgagaattgcttcgactgcgattgtttcggagacaggtgcgatgctttgtggagaggaagatgcgagaggatacacgtgacaatcgaagcatgtaatggctattcaatggtgaatgttaagtgtagagacagaccaaaactacttttcgacacggtgtgtgctttgaaagagttacaattcgttgtgtttcacgccgtcgccggagctaaaggctccactgcagagcaagaatatttcataagaaagaagaacgggggcacgttagaaacggaagggcaaagagagagactaaggcattgtttggttgctgcgatttcgagacgtgcttcacaaggattgaaactcgagattcggacagagaacaagatgggtttgttgtcggatgtgactagagttgtgagagaaaacggtttatcgataacgagagctgagatgtgcacgcaaggtgagattgcggttggctcgttttatgttacggatgtgaatggtggtgagacgggtcctagtgaggttgaagcggttgtacgagaattgggaggagcggttgtgtcagcggttaaaggggttggaatgatgccgaggaggattggttcgacgagtgatagtgtggagcaggacaaagctaagtcgtctattgggagaatgttttggtctaaattagagaggttgtcaacgtctataagatcgttgtgaagtgtttgattagtggtttttgcctctctggttctcgtgattatcgatcgttgtatatatagatgaactaggactatttgcagattcaattgaaattcgtataattattggttttagatgtgatctaatgagataagattctaccaaaaaaaaaaaaaaaa

SEQ ID NO: 377 - DNA, 1253 bp, Arabidopsis thaliana
  Clone ID: ARATH-23APR03-CLUSTER18321_1
tttttttttttttttttggttcagatcgaatcaaattgcaatccaagaatgattatacaatcttacacatacatgttaaattatatgcatgtagaaagaaaatagaactatatatataatatgatcatagttaggtctatcaactcacccacatctttctctcttattctctcactcttttttttttatattcctctctctctaaatctataaaatatatttaaaaacttgatcgtatataataaagtaaataaagaataataacaaaaaaaatggagaaaagaggaggaggaagtagtggaggttcgggatcatcagcagaagatcaactctctctctcactttcacaactctccctttctatttctctctctagaaaaatatcatcatctatcaattatatagagtacttatttagattcatttcataaaaatggagaaaagagaaagtagtggtggttctggatcaggagatgcagaggtgagaaaagggccatggacgatggaagaagatttgattctcatcaattatatcgccaatcatggtgaaggtgtttggaactctctcgccaaatcaacatcttccaggaagaacgggaaaagttgccggctccggtggctgaactacctccgacctgatgtgcgacggggaaatatcacaccagaagaacagctcaccatcatggaacttcatgcaaaatggggaaataggtgcaagaacatcgaaacacaattactattgtaaacaagataaggcataggagacttatgctcctacaccgacatcatatcaacataccaatatggaattcaactatggtaactattcggccgcggcagtgacggcaaccgtggattatccagtaccgatgaccgttgatgatcaaaccggtgaaaactattggggcatggatgatatttggtcatcaatgcatttattgaatggtaattgattgatcggtggacaaaacatggaatattaattgagtattatatatgatttttaggagtactattattagtacgtgacatgtatatgtttttgcctcgttgtagaggtttggggttataattaatatataatgttatctaatatgcaaccttgatacatatttggatctttattgaacccatgttatacataaataaaattgttgaaggggtcataaaaaaaaaaaaaaaaaaaaaaaagagatcttatatgaattaataaataactcgtatttactagatagcaaaaaaaaaaaaaaaaa

SEQ ID NO: 378 - DNA, 1684 bp, Arabidopsis thaliana
  Clone ID: ARATH-23APR03-CLUSTER1832_1
gaaaaccttatttcaaatggctaaaaccaaaaatgttatttctttcaaactttctctcatcttccttcttaatattttcatcgtagccaccatcgcagccgcagcggccgttaacgccggtaccaaaggtttggattctcggccgtccaaaaccaggcgtccctggcctttcaagaagctcaacaaaccggtggttttaatgatctcttgcgacggtttccggtttggttaccaatttaaaacggacacaccaaacatcgaccttctcatatccggaggaactgaggccaaacacggtttaatcccggttttccccaccatgacattcccaaaccactactctatcgcaaccggactctacccggcttaccacggtataatcatgaacaagtttaccgatccggttacgggagaggtgttcaacaaaggcttacaaccaaaatggtggttaggtgagccgctgtgggtaaccgcagtaaaccaaggtctcaaggctgtgacctacttttggccaggctctgaagttctaaaaagttcttggacttgccctgaaggatattgtccacatttcaatctttcagttcctttagaagaaagggttgattcggtcttgagccattttgatcaccttgaggacgaagttcctgatttactgatgttgtatttcgatgagccagaccaatcgggtcataactatggtcctgatgatcctcgggttacgactgctgtttctagggttgataaaatgattggtagggtgataaaggggctgaagcagagggagatctttgatgaggttcatgtgatattgcttggtgatcacggaatggtgaccaactgtgagtgtaacgagaaagcgatttacattgatgacttagcggattggatcaagatacccgcggcttggatccaggcttacagcccagtgctagcaatcaatcctcagtgggggaaagatgtcgagaatcaaagcgaaaagaacgcggaagtcgtggcgaagatgaacgaagctttgagctcagggaaagtaaaaaacggagagtttttgaaagtttacttgaaggagaagctaccagagagactgcatttttcagagagttatcggattccaccgatcataggaattgtcggagaaggtctaatggtcagacagaacagaacaaatgctcaagtttgctatggagaccatggttatgacaacgagctcttctcgatgaggactatttttgtcggacatggttctaggtttagtagaggaaaaaaagtgccatcattcgagaatgtgcagatctataacgtcgttgcagagcttcttggactccgaccagctccgaacaatggttcttctttgttccctcggagcattctcttgccttctggagcaacaagggaagtaaaatgaagtaaaatcacttagctcatgaataataagtaagatgataatgagtgactaatctatgtgctcaatcttgtgacccttaatgtttttgaataaccaggtttcgtggactgaagcgacgttaatagaacaagtaagaataaaaacattttttattcgaatgtatataactaaatcattacctaaattgttcctaaaataattcaattaatatcatttttgtaggatgtttagtagtaagtcacatcacacactatgcaatactcaaaactaattatttctact

SEQ ID NO: 379 - DNA, 4794 bp, Arabidopsis thaliana
  Clone ID: ARATH-23APR03-CLUSTER18367_1
atgtggttgctttcgtcttctccatggctctctgagctctcatgttcatattcggctgttgtagaacatacgtcttcagttccagtaccaatccaatggctcagatttgttttactctctccttgccctcaacgcgctctcttctccgccgttgattttatattcctcctctgcttcgctcttcacaagctcttttcttctccttcttcttcttccgaaatcaacggacacgctgagattaggaaacctcttattggtatccgtggaagaaccccaaccagaacaaccgcatggttcaaaacgacggtcgcagtcaccgttctattgtcgttttgctccgtcgtgctctgcgttttggccttcactggcaagcgacggactcagagaccatggaacctcatagacccgctcttttggcttattcacgccgttacacacctagtcatcgccgttctcgtcctccaccagaagagattcgctgctctaaatcatcccttatctctacgaatctactggatttccagtttcgtcctcacgtctctcttcgccgtcactgggattttccattttctctccgacgccgccacgagtctgagagcagaagacgtcgcttcattcttctccttccctttaaccgcctttcttctcatcgcctccgtcagaggaatcaccggcctcgtcacagcggagaccaacagtcctacgaaaccatccgacgccgtttcggtggagaaatccgataacgtctctctctacgcgtctgcttctgttttctcgaaaacgttctggttatggatgaatcctttactcagcaaaggctacaaatctccactgacgctcgaacaagtccccacgctttctccagagcacaaagcagagaggctcgcgcttctcttcgaatcgagttggcccaaaccgtcggagaattctagccaccctatccgtacgactctactccgatgtttctggaaggagatcctcttcaccgcgattctagccatcgtccgtctcggcgtcatgtacgttggtcccgttctcatccagagcttcgtcgatttcacctccggcaagagatcctccccgtggcaaggttattacctcgtcctcatcctccttgttgccaaattcgtcgaggtcttgacgacgcatcagttcaatttcgattcccagaagcttgggatgcttataaggtcaactctaatcactgcactctacaagaaaggtttaaagctcacaggctctgcgcgtcagaaccacggcgtaggacaaatcgtgaattacatggccgtagatgcacaacagctctctgacatgatgcttcagctccacgcaatctggctcatgcctttgcaagtcactgttgcactagtgcttctctacgggagcctaggcgcgtctgttataaccgcggttattgggctgactggagtgttcgtcttcatcctcctggggactcagagaaacaacggataccaattcagcttgatgggaaaccgagattctcggatgaaggccaccaacgagatgctcaattacatgcgagtcatcaagtttcaggcttgggagaatcattttaacaagaggatcctcaaattcagggacatggagtttggttggctatccaagtttctttactccattgctggcaatattattgtcctctggagcacgccagtgcttatctctgctctcaccttcgccaccgcccttgccttgggagtcaagcttgacgctgggactgtgttcaccaccacaaccattttcaagatcctgcaagaacccatcaggacgtttcctcagtctatgatttctctctcgcaggcaatgatctctcttgggagactggactcatacatgatgagcaaagagctgtcggaagatgctgtggagagagccctgggttgtgatggtaatactgccgtggaggtcagagatggaagctttagttgggatgatgaggacaacgaacctgctctcagtgatatcaacttcaaggttaagaaaggtgagctcactgcgatagttggaaccgttggttcagggaaatcttctctgttagcttcggttcttggtgaaatgcacagaatctcaggccaggtgagagtttgtgggagcacaggttatgtagctcagacgtcgtggattgaaaacgggacggttcaagacaacatcttgtttggtcttccaatggttagagagaagtacaacaaagttctcaatgtctgttctcttgaaaaagacctacaaatgatggagtttggagataagactgagattggagaacgcggaatcaacctcagcggagggcagaagcaacgtatacagctcgcacgtgctgtctatcaggaatgcgatgtatacttgctcgacgatgtttttagcgcagtggatgctcataccggttcagatatattcaagaaatgtgtaagaggagctctgaaaggcaagaccgtattactcgttacccatcaagtggatttcttgcacaacgtggattgcatcttggtgatgcgggatggaaagattgttgaatcaggaaaatatgacgaattagtcagctccggattggattttggggaacttgtggctgcacatgagacgtcaatggagctggttgaagccggtgcagactctgcagcagtcgccacatccccaagaacaccaacgtctccccatgcaagctctccgagaacgtcaatggagtctcctcacttaagtgatctaaacgatgagcatatcaaatcatttctcggttctcacatcgtagaagatggctcgaagctcatcaaagaagaagaaagggaaaccggacaggttagcttaggagtttacaaacagtactgcactgaggcttatggctggtggggaattgtgcttgttctgttcttctctctgacgtggcagggatctctaatggccagcgattactggcttgcatacgaaacatcagccaaaaatgcaatatcatttgatgcttccgttttcattctcggatatgtaattattgcacttgtttccatcgttttggtgagcatccggtcatattacgtcacccacttgggactcaagacggctcagatctttttccgacagattcttaatagtatcttacacgctcccatgtcattctttgacaccacgccatcgggaagaattctcagtcgggcatcgactgatcagaccaatgtcgatatccttattccgtttatgctcggacttgtggtctcaatgtacaccactctgctgagcattttcatagttacctgccagtacgcttggccaactgcattctttgtgattccccttggctggcttaacatctggtaccggaactattacctcgcttcttcccgtgaattaacacgcatggactcaatcactaaggctcccatcatccaccatttctctgaaagtatagctggagtgatgacaatccgatcattcaggaagcaggagttgtttagacaagagaatgtaaaacgtgtaaatgataatctcaggatggacttccacaacaatggctccaacgaatggctcgggtttcggctggagctggttgggagctgggtgctctgcatctcggctttgtttatggtattgttacccagcaacgttatcagaccagagaatgtagggttgtccctgtcgtacggactgtccctgaactcggttctgttctttgccatatacatgagctgctttgtcgagaacaagatggtttcagttgaaaggatcaaacagttcactgatattccctcagaatccgagtgggagagaaaagaaacccttccaccttcgaattggcccttccatggcaatgtacatctcgaagacctcaaggtgcgctacagaccgaacactccacttgtgctcaaggggatcactcttgacatcaaaggaggagagaaggttggtgtggttggacggacgggaagcgggaaatcgacattgatccaagtcttgttcaggcttgtagaaccatcaggagggaagataatcatagacgggattgatataagcactctagggctacatgatctcaggtcaagattcggaatcattccgcaagaacctgtcctctttgaaggaaccgtgagaagcaacatcgacccgacagagcaatactctgacgaagaaatctggaagagcctggaacggtgtcaactcaaggatgttgtagctaccaagcctgagaagctcgattctttggtggttgataatggggagaactggagcgtagggcagaggcagcttctatgcttaggcagggttatgttgaaacgcagcagacttctcttcctagacgaagcaactgcatccgttgattcccaaaccgacgccgtgattcagaagatcatcagagaagactttgcgtcgtgcaccatcatcagcatcgcccaccggattcctacagtgatggacggcgatcgagtccttgtcattgatgctgggaaagcgaaagagttcgatagcccggctcgcttgctggagaggccgtctctgtttgcggcgctggtgcaagagtacgctctccgatctgccggaatatgaatcttttacgccggcggggactgaaaatattttaaaaccttcttcaaatgagatttgtatcaaagaaaattcctataatctcacatgttttagattcaaaaacgacatcgtaattttagtgcagcaagcaacacagtaaatttttaattcgctcactatacttcaaacaactctctaataacaatccagtaatctaccaacacgtgaatttttctcgctctaagaatccaaacttcgtcgcgg

SEQ ID NO: 380 - DNA, 1889 bp, Arabidopsis thaliana
  Clone ID: ARATH-23APR03-CLUSTER1858_1
ggaagaacaaacatggaaacaaaagagaaaaatcccaaagctagaaaccctaatcccaaacgaatcaatggagcgagacgaagaagcgagtggaccgatgatggagatgtgcactaacggcggcgaagagacgtctaatcgaagacctatcataagtggcgaaccgctcgacatcgaggcctacgcggctctctacaaaggtcgcacgaagatcatgcggcttctcttcatcgctaaccactgcggaggaaaccacgcgcttcagtttgacgcgttgaggatggcttacgatgagatcaaaaagggtgagaatacgcagttgttcagagaagtggtcaataagattggcaacaggcttggggaaaagtatgggatggatcttgcttggtgtgaggccgtcgatcgtcgtgctgaacagaagaaagtaaagctggagaatgagctcagttcttatcggacaaatttgatcaaggaaagcatcagaatgggttacaatgactttggagatttctattacgcatgtggtatgctcggagatgctttcaagaactatatccgaacacgcgactactgcactacgacaaagcacatcattcacatgtgtatgaatgcgattcttgtcagcatcgaaatgggtcagtttactcatgttacaagctatgtgaacaaggcagagcagaatcctgaaacccttgaacctatggttaatgcaaaactgcgatgtgcatctggattggctcatttggagttgaagaagtacaagctagctgctcgtaagttcttagatgttaacccagaacttggaaattcctataatgaagtcattgctcctcaagatattgccacctatggtggactctgtgccctggcaagctttgatcgatcagaattgaagcaaaaagtcattgacaatatcaacttccggaatttcttggagctagtgcctgatgtgagggaacttatcaacgatttctattcaagccgctatgcttcctgcctggaatatcttgcaagtctcaaatcgaatctgctgctggacatccatcttcatgatcacgttgacacactatatgatcagataaggaagaaggcactgatccagtacacattgccatttgtctctgttgatttgagcaggatggccgatgcattcaagactagcgtctctggtctagagaaagaacttgaagccttgatcacagacaaccagattcaggcaaggattgattcacacaacaaaatcctctatgcaagacacgcggatcagaggaatgcaactttccaaaaggtacttcagatgggaaacgaattcgatagagatgtcagggcgatgctgttaagagccaacctcctgaaacatgagtatcatgccagatcggcaaggaaactttgatgacatctgctttgctaaactgagaggaatattcaagggtgttttttcaagattcgaaccaaacgagaaattgggcaagattacttttttgtaagaaccaagtgtttcaatgagtcgatgacatttagagtaagtaaaggttttattctaagatggacagtccattattaatcaactattgaatgatattgccttttaaatgagtcttaggtagcatcgcaataactccatgtttactcaaaactcacaaaccatgaagttaagaatccgccaaatttggaagatgggccaactctaaatttactcaccccaatactccatttattttgggttgcattgatgaaagtaatttgtataattgataggttgtgtatcaaaaaccggatctcattatttgtgatctttgcattagttatttttggagactaataaccatctttctaaactgtgagtaatacaaatataaacaaaaaaaaaaagaaaaaaaaaaaaaaaa

SEQ ID NO: 381 - DNA, 1373 bp, Arabidopsis thaliana
  Clone ID: ARATH-23APR03-CLUSTER186663_1
aattgtaatttttgtcacagtcattaaacaaaacgcttttatgacgatatcaacggttatagcattcatgtccatgttcctagtatttgttatgtctggtccgatagtggtggagggacgtgcttttttcgtgttcggtgactcgctcgtcgacagtggcaacaacaactatctggtgacaactgcacgtgccgactctccaccgtatggaatcgattttccaactcggagaccaaccggccggttttccaacggtcttaacattccagatcttatcagtgaggcaatcggtaacgaagagccaccgttaccttaccttagtccagagctaaggggccggagtcttcttaacggtgctaatttcgcctccgctggtatcggaattctcaatgataccggatttcaattcatcaacattataagaatgtaccaacaactcgattacttccaacaataccaacaacgtgtgagtcgcttgattgggaaaccgcaaactcagcggctcgtgagtcaagcgcttgtattaatcacggtcggtggaaacgattttgtgaacaactatttcttgtttccatattccgctagatcacgccaattcactctaccggattacgtccgactcctaatttctgaatacaaaaaaatactattgaggttaaattcacttggagtgggtcgagttctagtgacaggagctggaccactaggatgtgcaccggccgaactggcgagatcaggcacgtcgaatggaagatgctcggccgagctacaacgagctgcatctctatatgatcctcagctacttcaaatgataaatgaacttaacaaaaaaattgggagaaatgtgtttattgctgctaacactaaccaaatgcaagaggattttctaagcactccacgaagatatggatttgtaacatcgaaggttgcttgttgcggacaagggccgtacaatgggatgggtttgtgtacggttctatcaaacttgtgtccgaaccgtgagttatacgtcttttgggatgcgtttcatccgactgagaaagcatccgcatgatagtccgacatatcttgaccggtaccaccaagtatatgaaccccatgaaccttagctctgctcttgccctatgagccacacacgttgaagtgggaaactcggttttgtttatttcactcgcaagatatatgtatcgactaccgagtacaagagtatgaaataagataactcagtctcaatttaacttgttctttcttaaaattttaattggataaacttgttttgatttgatttacttaaagagtatttgcattttgcccccaaaaaaaaaaaaaaaaaaaagggcggccacgctagaggattaggctacgtagcttgc

SEQ ID NO: 382 - DNA, 966 bp, Arabidopsis thaliana
  Clone ID: ARATH-23APR03-CLUSTER1880_1
atcacaccagattgtagtggatgatcggaaactaagacttcagtcatctgagactttacagtgtttgaggaacgaagattgtgagacacaatggctaaggatgaagccaagggattgctgaaaagtgaagagctctataaatatatactggagactagtgtgtacccacgcgagccagaggttctcagggagcttaggaacattactcataaccaccctcaagctggtatggctactgcaccagacgctggccagttgatggggatgctgctgaatctggtaaatgcaagaaagactatcgaggttggggttttcactggatactctcttctcctcactgctcttacgctaccagaagatggcaaggttatcgccattgacatgaatagagactcgtatgaaataggattgccggttataaagaaagctggtgttgaacacaaaattgatttcaaagagtctgaagctcttccagccctcgacgagcttttaaacaataaagtgaatgagggtggattcgacttcgcatttgtggatgcagacaagctgaattattggaactatcatgagaggcttattagattgatcaaggttggtgggatcatagtgtatgataacactctctggggaggatcagttgctgaaccggactcgtccacgcccgagtggaggatagaagtcaagaaagcaaccctcgagctgaacaagaaactctcggctgatcagcgtgtgcagatctcgcaagctgcgcttggcgatggtatcactatttgcaggaggttatattgagcgagtattgttgttctttgtgatctttagggtcatatgattgtgagccctttatattgagctattgtgatgcaagagtgttattgttctatgtgatattttggttcctgtgtgaatgtgaaccttttctatcaagtttgtggatttctacaaaaaaaaaaaaaaaaacagacagtt

SEQ ID NO: 383 - DNA, 1455 bp, Arabidopsis thaliana
  Clone ID: ARATH-23APR03-CLUSTER18838_1
gaacaatggcttcgccggcgttaaccggcggttaccggaacctcactgcgccggtatctctcctgcgtactttagcgtccacccgtgtcactactccattgtttcgttccaacaaacactctccacgtttcatttcttctccaaagagattcacttgcttgtccttactcaaaaccgattctcaaaatcaaaccacactctcttcttcttccaattctggataccatgaatacaatcgattgatgccatgtcctgcatataatcttccaccaagaattgaacatatggttgtgttagaagacgacgttcttgtatctgagtttatctctaaacaattagatcttcctcctttatatgttgcagatcttattcgatttggagctgtacattacgctcttgtatgtcctaaacctccaccaactgcgactcctgaggaaattatactgtttgaagaagtaacctctccttctgtactaaagaagagatcttctattaaaggaaaaactgttagagaagctcagaaaacgtttcgtgtgactcataccaatcagtatgctgaagctggaacttatttgcgtgttcatgttcacccgaaacgttctccaaggtgttatgaaattgattggaagtcacggattgttgctgtgactgactcttatgtcattttggataaacctgccgggactacggttgggggcacgacggataacatcgaagagagctgtgctacatttgcctcacgtgcattggatttaccagaaccactgaaaacaacgcatcagattgataactgtacagaaggctgtgtcgtctttgctagaacaaaagagtactgctcggtcttccacacaaaaataagaaataaagaagtgaagaaactatatcgtgctcttgctgcggcacctcttcccattggaattatctcacattatatgcgcccaaaaaatatggctccaagactcgtagccgaagattcaattcaaggctggcacttgtgtcaacttgaggttttagaatgtaagaagattccttggcccgatgcagctactgagaagaaacacgatattgaagactgtggatggacttcaaaagagtttgcttatgagtgtacaataaaccttttaacaggcaagactcaccagatccgggcccagcttgcagcttgtggggcaccgttggttggtgactctatgtacatgccagcagcgattgcagaaatggggaatcctgataccaacccgtatgggaaagcaaagaaacattacacaatggaggagaaccaaaaggaaaccgctgttgccgaatggattgatagacatggcaaggaaccgagggtaggaatcggtcttcaagcttgtcaaatctcatgggacgatgatgatggcgagcacttctatgaagctgggactccatggtggagatgaaacacatgttctgatgtcgaggatcttatct

SEQ ID NO: 384 - DNA, 2174 bp, Arabidopsis thaliana
  unsure (1)..(2174): unsure at all n locations
  Clone ID: ARATH-23APR03-CLUSTER18864_1
atcgatgattttgagaagcgaattagatgcatgaggttggttttccgttggatctctctgtcttcactcgccttatagcgactctatttttcctcgccgttggtgttttttactttctcaaaaacaccgccgctaagtacttcgacatcggagccgccgccgccggaggtttcgacagggacttcatggcggttgatgctgaggattgctctgtctgtgggaatttttccaccaagaaatgctcccgctgcaaatccgttcgatactgctcagcagagtgccaaaggtcagattggagttcgggtcatcaaagaaactgcagggattatgggattactacattaacaccatctgcaaagaatggcttaaggttcagagcttctccattcggggatagttctgcgtctagtattgcactgatttccgaacggggccaaaacaagagtagtctcaagccaagagaagttctttttccatatgaagaatttgttgaatattttaactgggacaatccagaattggctccctgtgggctcatgaattgtggaaatagttgtttcgccaatgtgattctacaatgcctttcctggacacgtcctcttgttgcatatctgctggagaaaggccacaagagagaatgtatgcgcaacgattggtgcttcctctgtgaatttcaaacccatgttgagagagcgagtcaaagtcggttccctttttcaccaatgaacattatttcacggttaactaatattggtggaactcttggatatggaagacaggaggatgctcatgagttcatgaggtatgcgattgatatgatgcagtctgtttgccttgatgaattcggtggagaaaaaatagtgcctcctcgttcacaagaaacaacacttattcagtatatatttggaggtctccttcaatcacaggttcaatgtactgtttgcaatcatgtttctgaccaatatgaaaatatgatggatctaatcgttgagatgcatggggatgcggggtctttggaggaatgtcttgatcaatttacagccgaagagtggcttcatggagataatatgtacaaatgtgataggtgtagtgactatgtaaaagcatgtaagcgtcttacgattcgacgcgctccaaatattcttactattgccttaaaaagatatcagggaggaagatacggaaaattgaacaaaagaataagttttcccgagacattggatcttaatccttacatgagtgaaggcggagatggatcagatgtatataaactctatgcagtgattgtccatttagatatgctgaatgcatcattcttcggccattacatatgctacattaaggatttttgcggaaactggtatagaatagatgattccgagatagaaagtgttgaattagaagatgtcctttctcaaagagcttatatgctcctctacagcaggattcaagctcggtcgtcatcttcatgtcttagatcagaagttaaagacgagaagaaaacagacacattggacacagaatcttgcgtaaaagagttagttgagagttcaatggtaggagctattgaaagcagaagcagcacccatgcgaccattgaagaccctgtatgcgagcaatcaccatcaccatcgccatcaccatcaccatcaccatcgccatcaccatcaccatcagtattggcctctgaatgttgtagtgaggttgaaaggattgatacattggattccgagtccaactcttcgattgatgactctgcaacagatcatcaagaggatgtagcaaatgggaacaaagatccagaggtaaaatatcaggctgccgattcttggtcagaccctacaacttcaactccattggtctgtacaaaatccaaacctccggtgagagatatggacaccaagatgatcgacgctcagtgatgtggtatgttacaacatttgaaaatcagcagagctttttagcttacaaagttacaatagtgatgtagatactattacacaatgacttctatggtaataaagggtgattatacgtaaaaaaaaaaaaaaaaaaaaaaaaaaaaaaaaaaaaaaaagggggnnnccttttaaaaaaaaaatnttgggggccccccttaaaaaaaattttttttttttttgggggcaaaaaaaatttttttttttggggggggc

SEQ ID NO: 385 - DNA, 2074 bp, Arabidopsis thaliana
  Clone ID: ARATH-23APR03-CLUSTER1889_1
gaattcggcacgagcaaaaacaaaaactctaccaagtgaagaagaaagagaagtgtcacatctctctctctatctctttgatccaaacaaattccctcatatatctctgctctctcttcccaatattcttcctttttcttcaatcgagattttatcgctttttgattcgagaatttcgaaatcggaacccaccaccaccaccctccatcgtcgccaacagatccaacggttctctgattatttttatttgaactaaatgggtcgcatcgagatttagaagaaaagggaaatgttggcaatggagaaagaatttgattcaaagcttgttcttcaagggaactcatccaacggtgctaatgtttctagaagcaaaagcttctcctttaaagctcctcaagaaaatttcaccagccatgatttcgaatttggcaagatctatggtgttggttcttactctaaggttgttagggcaaagaagaaggaaactggaactgtgtatgctttaaagattatggacaaaaagtttatcaccaaggagaataaaactgcttatgtgaaattggaaaggattgttcttgatcaacttgaacatcctgggatcattaaactttacttcacgtttcaagacacatcctcactatatatggcacttgaatcttgtgagggtggcgagcttttcgaccaaataaccagaaaaggtcggctatcggaggatgaagctcggttctacactgcagaagttgtggatgctcttgagtatatacatagtatgggactgattcatcgagatattaagccggagaatctgttgctgacttcagatggacacattaagattgcggattttggaagtgtaaagccgatgcaggatagccagatcacagttctacctaatgcagcttctgacgataaggcgtgcacttttgtcgggactgctgcatatgttcctccagaagttctcaactcctctcccgcaactttcgggaatgatctttgggctctcggctgcactctctatcagatgctttcggggacttccccatttaaagatgcaagtgaatggctgattttccaaagaattatagccagagatataaagttcccaaatcatttttcagaagcagcaagagacctcatcgaccggttgctggataccgagccaagcagaaggccaggtgctggctcagaaggttatgttgctcttaagagacatcctttctttaatggagttgactggaagaatctaaggtcccagactcctccaaaactagctccagatcctgcgtctcagacagcatctcccgagagggatgacacacatggttctccatggaacctgacacatattggagattctttagccacacagaacgaggggcacagtgctcctcctacatcttctgaatcatcgggttccataactcgacttgcttcaatagactcttttgattcaagatggcaacagtttttagagccaggagaatcggttctgatgatatcagcggtgaagaagcttcagaaaataacgagcaagaaggtgcagctaatactcaccaacaaacccaagctgatctatgtcgacccgtcaaaactagttgtgaaaggaaacattatatggtctgataactcgaatgacctcaacgttgtagtcactagcccttcacatttcaagatttgcacgccaaagaaggttttatcatttgaagacgcaaaacagagagcttcagtgtggaaaaaggcaatcgagactcttcagaaccgctgagacaaactccactgaagaatggttctgttaatttcctcgttggtgttttgtctttccttcaagattttaaactgaccaaactccattcttcatatgttttttctatttcacgcatccttgaaaagaccagttggacacaaaactgaaaaactgctttttgaatcctttgtataagtcaaacaaatgtattacaaggttaaagttacatgagatactgaattcaaacaaaaaactgaaaaactgctttttgaatcctttgtataagtcaaacaaatgtattagaactagtctcgagggggggcccggtac

SEQ ID NO: 386 - DNA, 1242 bp, Arabidopsis thaliana
  Clone ID: ARATH-23APR03-CLUSTER189153_1
agtcttcaacggtcgaattgaatccaagagatatgagagagaaaaggggaaatcggaaagccctagatcccgtcggtgaggatggagtcaccggaaaagatggaaaaggcttcttcgcctgttatctcttgacctctcttagccctcgtcataagggtcaaacctatatcgggttcactgtaaacccgaggcggagaataaggcagcacaatggagagatcactagtggtgcttggagaacaaagaagaaacgtccatgggaaatggttctctgtatctatggtttccccaccaatgtctctgcccttcagtttgaatgggcttggcagcatccgagagaatcggttgcagttagagaagctgctgcggctttcaaatccttctctggggttgctagtaagatcaagcttgtatatacaatgttaaatcttccagcttggaatagtttgaacctcacggttaattatttctcgtcaaagtatgcacaccacggtggtaaatctccaagtttacctttacatatgaaagttcaagtttgtgctatggaggatcttcagtatttcacaaaggtagatgacagttctcaacccgaagatgaagagagtcccgaggttaatgaagaggatgatgatgatgatgatgatgatagtagcaacctaagccagcctgggaattcaaatacaagctcatcggatgaccggcattttgaaaaagcgaaagaacctgtaactgtatttgatgaagaagacagattagcaaatttcagtggttttggcttattagatgaagaagagactgttgaagatgaagtatcacatatcactgttggatccattagagctactgagaaagaacccgagactgtattcaatgacagattagcaagtttcacttgttttggcttagtagagattgttgaagatgaagtatcacatggaactataggatccactgaagctatggagaaagagtgtaggaaaagaaggaaccatatcacctcaacgacgactgaggttgatgtagaggtgatagatctgatgactccatcaccaagctgcagagctggatcatctatgaagagacgaagagtttctgagtttatagatttgactatgtctcctaatttcatagagtcgtagaagtaatacacgagaatttgtgtgaaaatcaaaatcaactttgttgtaattttcttttatatctaataaaagatttcaaaccttttgaaaaaaaaaaaaaaaa

SEQ ID NO: 387 - DNA, 2885 bp, Arabidopsis thaliana
  unsure (1)..(2885): unsure at all n locations
  Clone ID: ARATH-23APR03-CLUSTER18965_1
attcggcaccagnagctcactagtgcccccccccccccccccgaaaaaatcgaagaaaattagaaaaatcggaagagcgatcgaagaggattttgaaccgccatggcttcttcttcgctctctaatctgatgctcgccattcatgagaagaagacgagctccgttgatctctaccgtcctctccgcaactacgttactttcacctactctgagcgcgaggctcagcttatagacgacgatctcgagaccttgaagcagctccgatccgatatagaacgcgtttccgatccttctccagctgctcggcgagaccttctcatctcctattacaaagttctttgtcttgtggagacgcgatttccaatttcccctgacaaggatcatgtcaacgccgtctctttcgtatggtacgatgctttcaagcaaaagcataaagctactcagcagaacattcatttggagaaagcagctgttctattcaatcttggtgctagctacagccagattggactcggtcatgaccgcaccaccgtcgatgggcgtcgtcaggcttcacatgcgttcatggctgcagcaggggcgttcgctcacttgagggataacgagtccattaaggcgacgatcgggccgagcactaccgtggatgtgtcggttgagtgtgttggaatgttggaacggttgatggtggcgcaggcgcaggaatgtgtctttgaaaataccattgctaaaggaagtactcctggtgtctctgctaaaattgctaggcaggttggcatattttatgaggaggctttatctgcgctaatcatttcgccattgaaggatcatttcgacaaaggctggatttctcatgtgcagctgaaagcagcactcttctatggtgaagcttgctttagatatggaaaagagttgcacgagaaagaggaaattgcagaagaaattgcacggctgaggagtggagccagccgtttggcagaagcaaagaagtcttcaaggggagctcctgctcagcttatagaagcgatgaacacactagagtctagcattgatggcaatttggatagggctgtcaaggaaaacgacagagtgtacctcatgagagttccttctccttcttctttgtctccacttcccgccttctcaatggttaagccaatgaacatgactgatattttggatgcaagcaaggaaaaaatgttttcaatccttgttccagacagcagtgcaaaggctctctctagatacactgagatggtcgatgatgtaattagaactcaggcggagagattacagcaagctagcgaactaactcgagttaggctcaaagagatggatcttccagattctattctcgctgtggatggtaattcagctcttcctgttgatcttaaagaagatgtagaagctgttcagatcagtggtggtccagctggcttggaagctgaactgcagcaacttagagatttgaagagggttaatcaggaactgttggtgcacactgaagagcttttgcagaaagaagcaactgaagattctcagttcagaagtcaatttgggactcggtggactaggcctcaatctagcacactgacaaagaacttgcaggataggctaaatcggtttgcagccaatttgaaacaagctggcgaaagtgatgttaagattgagcgatcagtgagagataactccgccctcatgtctattcttgatcgacggccgatagagtctgctgtcccaactcttgctaggccaataatgtctctggacgcaacagaggatgctattgtgggaactttgaagcagagtctgaggcaactggaaaatcttggtgctcagcgggcaggtcttgaagacatgctcaaagagatgaagagaaaggatgacatactgccaaagctgatgaccataacaggctcctatgaagatatgttcaggaaagagatatcaaagtatgaccacatttgtgaagatatttcccaaaacattgaagttcaagaacaattattgatgcaaattcaggctcaaaatgaagagttttcaactattttcaatcttgaagattataaagcatccaaggagaagtgctacaagcagattcaagctgcaataatgaagtatcgagagatcaaggagaacatcaatgagggcctgaagttctatgtcactctccaagatgcaatcacgaatgtgcagcagcagtgcagtgattttgtgatgacaaggagtatccagtgccgagatatgattgaagatgtgcaacgacagatgtctggtttgagttttcaggatcatagaagctccggcccatacccatctgtgcatcaaccaacggcttcaagtccgcctcctccaccagaaactcagaatccatctcatcctcacccacatgcaccatactatagaccgcctgagcagatgtcaaggcctggctactctatcccaccctacggtccacctcccccataccatactcctcatggccaggcgccacaaccataccctcctcaggcacagcaacagcctcatccatcatggcaacaaggctcttactatgatccgcagggacagcagcctcggcctccttatcccggccagagcccataccaacctcctcaccaaggtggaggatactacaggcaatgagttactttgggagcaataaaattctggtgttatatatctattgttgtgtttcctgtgagtacttgatgtgtgtctatctctttgacatgtttctgtcatgaaattgaatatctggtttgatagtgactcaaattctttattcaaagtagagccgatgtgatggatgagagttgtgtaaagcacgttattcatatatagtagataaaaggtacatcctcgagggggggcccggtacccaatcg

SEQ ID NO: 388 - DNA, 1158 bp, Arabidopsis thaliana
  Clone ID: ARATH-23APR03-CLUSTER18_1
atttaaaatccaaaactctctctctctctctctgtctcttgtcttattatttatctctctaacggcgaggcaatgggttttccggtgggatattctgagctacttctcccaaaaatctttttctacttgttatctttcttaggtttgatacgtaaactcatctccacaatgttcaagatcattggtacaccagatttcttagaacctgaaccgacggctgacgaattgtcgacatataatcatcacaatccaaaactctctctctctctctctctctgtctcttgtcttatcatttatctctctaacggcgaggcaatgggttttccggtgggatattctgagctacttctcccaaaaatctttttctacttgttatctttcttaggtttgatacgtaaactcatctccacaatgttcaagatcattggtctaccagatttcttagaacctgaaccggtttcaacctcatggcccgacccaccacccacgttgaccaaacctgactcagcagcaatactagccggagagatgttaccggttgttcgattctcggatataaaccgaccggaatccgagtgttgcgcagtgtgtctctacgatttcgagaacgacgacgagatccgacggctgacgaattgtcgacatatatttcatcggggatgtttggaccgttggatgatgggttataatcagatgacgtgtccactttgtcgtacacagtttatacctgatcatcttcaactggagtttaatcaaaggctctggtctcaatcttctgctgtttcttctcaacttcttgatgaatcatcatcttaggacgtattaaatctttgtccaaacaaaaaaaaaagacatattaaatcctttttttttggtactttcattgggaattgggtttggtgtgagatcgatgtaaatattaaacaaaaaaaaaaaaggtagtggttacaggttaatgaaaaaagaaagaagaagaaaatttgtacttatccatccctgaaagatgaaattacattttgagttattataaagttgtaaactttttttttttttgttaaggaaaaaaaaaatcatttgctaaaacagataaatactgaatgtgttagtttttaaaaaaaaaaaaaaaaagggcggccggtcttagcatacaagcttac

SEQ ID NO: 389 - DNA, 2372 bp, Arabidopsis thaliana
  Clone ID: ARATH-23APR03-CLUSTER19124_1
ttataaaacgcagcgaagtgaattggatttaggtaacactatatgacacctaatccgttgaaggatgtcatacgttaattttgaaccttaagaccgtcagcccatgtaaataatattattgtttattgacattgcatagtcagattggtttttaaaaatcaaaatccattaaaaataataattattaattcttgtgaaaacaaatataatctgtgtaaaggtaaatgcaagttgcattgcatactccgagcggtaatgatttctgtaaaaattcaccaaactccaacaacctgcggttgcgactccaaaatccatctatcttcaaacacacacacaaagttcctgcagcttcgatcagatccaacgagccgattcttctctctttgtaggtcaagtagttccagagaactgcattgcatattcaccaacatcttaggttcctaattcaattagcccactgggatatgccagagagaattggacactgtaccatttgaacatatgcgtatgggtcaaatataaaactttcttccttgaaattccgaggcaagagagctgtccattacaggggtactcgtgtttttttaaatacctgttgagtaaagaaaggctggattactagattgcatgctttgtcacagttgtctgtgaatggaagccgaaaaggtttgctggtgagttcagattattgatggagcaaagagtgcaactccgtgttggtacaatggaaaccatatccaatgagggagatgtagatagagaacaggttttagagacttttggtattgaaaatgagaccgggaaggagacaaacggctccagaagttttgatgttggttacagctccggtgatacccttgaatgattgtgaatggaagccgaaaaggtttgctggtgagttcagattattgatggagcaaagagtgcagctccgtgttggtacaatggaaaccatatccaatgagggagatgtagatagagaacaggttttagagacttttggtattgaaaatgagaccgggaaggagacaaacggctccagaagttttgatgttggttacagttccggtgatacccttgaaacattgcctaaagcgtcaaaagtagatatctctcctgctgacgtgcttaaaacactcttctttatacttgtatggtacactttcagcacatttctgactctgtacaacaaaactctcttaggagatgatttagggaaatttcctgctcccttattaatgaataccattcacttttctattcaagctgttttatcaaagatgataacatggtattggtcggggagatttcagcctgatgttaccatatcatggagagactatttcgttagagttgtaccaacagcgcttggaactgctatggatataaacctaagtaacgagtcacttgtcttcatatcggttacatttgcaacaatgtgcaaatctgcagccccaatatttcttcttctgtttgcttttgccttcaggctggagtctccaagcctgaaactttttggcattatttcagtgatctcagcaggagtgttgttaacagttgcaaaggagacagaatttgagttttggggtttcgtttttgtcatgcttgctgctgtcatgtctggtttccgctggtgtatgacgcaagttcttttgcagaaagaaacatttggactgaaaaatccattcatattcatgagctgtgtggcaccagtgatggctatagcgactggtcttctttctctccttctggatccatggagtgaatttagagacaacaaatactttgatagtggagcacattttgctcgaacttgttttttgatgctttttggcggagcactggctttttgtatggttttgacagagtatgtccttgtttccgtaactagtgctgtaaccgtcacaatagcgggagttgtcaaagaggctgtcaccatagtggttgcagtgttttacttccatgacgaatttacgtggctgaaaggtgtgggtctgatgatcattatggttggtgtcagtttgttcaactggtacaaatatgataaactacaaaaggggcacaaaacagaggaagagaagcagttacaagctccaagtcagactggaaaatatgtgattcttgatgagatggatgatcaagaaaatagtccctaagaattatttttgatacattcacatgatatggtaaacccccttttaggctggtacatccgtaatgtggaagcatgtggaccttccttgagaaaaagactataacatacttttaaggcagatgaattggaaactttgatgtttccctgccttacaaaaatgatagaagaacataaccatttcaacaaattttaaagggaaaaagttagtagtggctgc

SEQ ID NO: 390 - DNA, 2789 bp, Arabidopsis thaliana
  unsure (1)..(2789): unsure at all n locations
  Clone ID: ARATH-23APR03-CLUSTER19134_1
cacacttcgtcgtctctctttcactacttttgagaagctctcttcttcgagcttccatggatgcaatcaaatgcagttccagtttcctccatcacaccaagctcaacactctcttctctaatcacacctttcctaaaatctccgctcccaatttcaagcccctcttccgtccgatttcgatttccgcaaaggacagaagaagcaacgaagctgaaaatatcgccgtagtagagaaacctcttaaatcagatagattttttatctccgatggacttccttctccattcggacccaccgtcagagacgacggcgtcaatttctctgtttactctacaaactccgtttccgctaccatctgcttgatttctctctccgatctccgtcagaacaaagtgacggaggagattcagcttgatccatcaaggaatagaactggccatgtttggcatgtgttcttgagaggagatttcaaagatatgttgtatggttatagatttgatggcaagttttctcctgaagaaggtcattattatgattcctccaacattttattggatccttacgcaaaggcaattataagcagagatgagtttggagttttgggacctgatgataattgttggcctcaaatggcgtgtatggtacccactcgtgaggaagagtttgattgggaaggggatatgcatctgaagcttccacagaaagatcttgttatatatgaaatgcatgtgcgaggttttacaaggcatgagtctagtaaaattgaattccctggcacataccagggtgttgcagagaagcttgaccatttgaaggagcttgggataaattgtatagaattaatgccatgtcacgagtttaatgagctggagtattacagctacaatacgattttgggagaccacagggtaaatttttggggttactctaccattgggttcttctcgcccatgatcagatacgcatcagcaagctctaacaattttgctggacgagccataaatgaattcaaaattcttgttaaggaggcacataaacgaggaattgaggtaatcatggatgtcgtcttgaaccacacagccgaagggaatgaaaaagggcccattttctcatttagaggagttgataacagtgtctattacatgcttgctccaaagggcgagttctataattattcaggctgtggtaatacattcaactgcaatcatcctgtggtgcgtcaattcatattggattgcctgagatattgggttacagaaatgcatgttgacggcttccgctttgatcttggttcaatcatgtcaaggagcagcagcctttgggatgcagccaatgtttacggggctgatgtagaaggtgacttgctcacaactggtactcctattagctgccctccagtaattgacatgataagtaatgatccaatactccgcggtgttaagctaatagctgaagcatgggatgcgggtgggctgtaccaagttggcatgtttccacactggggtatttggtctgagtggaatggaaagtttcgggatgttgtgagacagttcataaaaggcaccgatggcttttctggtgcttttgctgaatgtctctgtggaagcccaaatctgtaccagggaggtaggaaaccttggcacagcatcaattttatatgtgcgcatgatggttttacgttggcagatttagtaacttacaacaataagaataacttggcaaatggagaagagaataatgatggagagaatcacaattacagctggaactgtggagaggagggagactttgcgagtatctcggtgaagagactaaggaaacgacagatgcggaatttctttgtttccctcatggtttcccaaggtgtcccaatgatttacatgggagatgaatatggccatactaaagggggaaacaacaacacgtattgccatgacaactatatgaactattttcggtgggataaaaaggaagaagcacattctgacttcttcagattctgccgtattcttatcaagtttcgtgatgaatgtgaatcacttggcttgaatgatttcccaacagcaaagcgtctgcagtggcatggtcttgctcctgagatcccaaattggtctgaaacaagtcgatttgttgcattttcactggtcgattctgtgaagaaagaaatctatgtggccttcaacaccagtcatttagccacacttgtttcgctaccgaataggccaggataccgatgggagccatttgtagacacgagcaaaccgagcccttacgactgcataacaccggatctcccagagagagaaacggcgatgaagcagtataggcacttcttagatgcaaatgtgtacccaatgctcagttactcatccatcattctccttctttcaccaattaaagacccctgagtttgcgtgattcctccaaaagcgtattagacaaaatcacaacatatgaaggaatcttctcaaatgtgaatgagatgcatatacagacaactatttcgttacctatataatgtattatagtaaaggttccttttatggttagaagaatctgaatggggtacctttggtcggcttcagatatgcccactcattgttaatagattcctttatcgtctgttaatccaatcaaaagcttgttacatcgttttcagaattcgtgtaagaacaagaaatcaaagttttcatctataaagttataaatgattattagtgggncgtcatagctcttctanagnggccccaaantcaattcaccgggcggcggtttacaancgccgtncc

SEQ ID NO: 391 - DNA, 1797 bp, Arabidopsis thaliana
  Clone ID: ARATH-23APR03-CLUSTER192000_1
ttcggctcgagctgagaaccattctctatggaaatacctccatcacctccgccggagacggcggcctacacattaaccacctcttcaatctcctacaccataccaaaaacctctctctccctcctccgcttcccggcgactgagccaccctcctttatcctccgcaacatcactctcaccgctcatccaaccgagatcctcgccgtcgttggcccttccggcgccggaaaatcaactctccttgacattctcgcctctaaaacctccccaacttccggttcaatcctccttaactccattcccattaacccttcctcttatcgaaaaatctcctcttacgttccccaacatgactctttcttccctctcctcaccgtctccgagaccttctccttcgctgcttgtctcttgctcccaaacccatcattagtttctgaaaccgtaacctctcttctatcagagcttaacctaacacatctttcccacacaagactcgctcaaggcttatccggtggcgaaagaagaagagtctcgatagggttaagcctccttcacgacccttgctttcttctcctcgatgaacccacttcgggtttagatagtaaatccgcttttgacgtcattcacatcctcaaatccatcgctgtgtcaagacaacggaccgtgatattgtccattcaccagcctagcttcaagattctctccatcatcgatcggttgttacttctttcaaaaggaactgttgcgtaccacggaagacttgactccctcgaaggtttcttgctcttcaagggatttactgtccctccgcagctcaattcccttgaatatgcaatggaaatacttcaagaactacgagaatccgatggaaacaccgacgctactgatctcccttcaatcgaaaaccggaaacagagagaaaaacagagtattgttcgatatagaaaatcaaggatcaccgagataagccttctcgcgagaagattctggaagatcatttaccggacaaggcaactacttctaaccaatgcattagaagcccttgtagttggtcttgtcctaggaactatctacatcaacatcggaatcggcaaagcaggaatcgagaaaagattcggcatgttcgccttcacgctcacttttctcctctcttcaacaaccgaaaccctcccgatcttcatcaacgagcgtccaattcttctcagggagacttcgagtggtgtttacagactctcctctcacattctcgcaaatacactcgtattcttgccgtacttgttcgttatctcaatcatttactctgtttcggtctatttcctcattggtctctgccccacatggcaagcttttgggtacttcgttctcgtgatatggatcattctcctaatggcgaactcttttgttctcttcttgagctctcttgccccaaattacattacgggaacctctcttgtgacaattcttctagcggctttcttcttgttttccggttacttcatttccaaggaaagtcttcccaagtactggcttttcatgtacttcttctcaatgtataagtatgcattggatgcacttctgataaacgagtactcgtgcttagcctccaagtgtttggtctggttggaggaagctcaaacaaagatctgcatggttactggaggtgacgtgttgaagaagaaaggacttcatgagaaacagaggtggtttaatgtttatgttttgttagggtttttcgtactttatcgtgtgttgtgttttcttgctctccttagaagagtttctggttcaaagaggtaa

SEQ ID NO: 392 - DNA, 1042 bp, Arabidopsis thaliana
  unsure (1)..(1042): unsure at all n locations
  Clone ID: ARATH-23APR03-CLUSTER19349_1
caagatcgtcaagagacagtaaacctaaaatggcgaactcagacaaaagattattcgagaaggtagctataataaccggaggagcaagagggataggagcggccacggcgagattgttcacagagaatggcgcgtatgtgatagtcgcggatatccttgagaatgaaggcatccttgtggcggaatcgatcggtgggtgttacgttcattgtgacgtatcgaaggaggctgatgttgaggcggcagtggagctagcaatgagacgtaaaggtagactagatgtgatgttcaacaatgccgggatgtcgcttaacgaaggtagtatcatggggatggacgtggacatggttaacaaacttgtctcggttaatgtcaatggtgttttgcatggtatcaaacatgccgctaaggccatgatcaaagggggacgaggaggctcgataatatgcacatcgagctcatcagggctaatgggaggacttggaggacatgcgtatacgctctccaaaggagccatcaacggggtggtgaggacaacggcgtgcgagcttgggtctcacggcatccgtgtgaatagcatctctcctcatggagttcccactgacatcttggttaatgcgtaccgtaagttccttaacaatgacaaactcaacgtcgctgaggtcaccgacattattgctgagaaagggagtttgctgaccggaagagccggtactgtggaggacgtagctcaagcagctttgtttcttgcaagccaagaatcgtcggggttcattaccggacataacttggttgttgatggtggttacacatctgccactagtactatgagatttatctacaactagttttcgtttggtggtgtttccttttcaaagttgttctttgaaaaaagaaaaaaaaaaagagtttatcttaattgctaacttgtcaatctttcttaattcggttgaataatccgaacaaagatttagctcatttccactttcaacaaaaaaaaaaaaaaaaaaaactcgagggggggcccggtacccaattcggn

SEQ ID NO: 393 - DNA, 1137 bp, Arabidopsis thaliana
  Clone ID: ARATH-23APR03-CLUSTER193620_1
agatctttagctttaccaatgaatccaatcctatcttctttgtttgctctctctttgctttcttcactatcaccatcaacacatgcccatcaatgccatttcccagcaatctttaactttggtgactctaactccgataccggcggtctctccgctgcttttggccaagctggtcctcctcacggctcttccttcttcggctcacccgcgggacgatactgcgatggtcgcctcgtcattgacttcatagcggagagtcttggattaccatatctaagcgcgtttctagactccgttggttcaaacttcagccacggcgctaacttcgctaccgcgggatctccgataagagctcttaactctactctacgtcaaagtggattcagcccattttcactcgatgtacagttcgtacaattctataacttccacaacagatctcaaactgttcgtagtcgtggaggagtctacaagacgatgttgcctgaatccgacagcttctcaaaagctttgtacacttttgacattggtcagaacgatctcacagcaggttacttcgctaataaaaccgtagaacaagttgaaaccgaagttcctgagatcataagtcagttcatgaatgctatcaagaatatttatggacaaggagggagatacttctggattcataacactggacctattggttgtttagcttatgtgattgaacggtttccgaataaagcatcagactttgattcacatggatgtgtttctcctttgaaccacttagctcaacaattcaatcacgctttgaaacaagctgtgatcgagctaagaagttctctatctgaagcagccatcacttatgtagatgtctactctctcaagcatgagttgtttgttcacgctcagggtcacgggtttaagggatcgttggtttcgtgttgtggacatggagggaagtataactacaacaagggtatcggatgtgggatgaagaagattgtgaaaggtaaagaggtttacattggaaagccgtgcgatgagcctgataaggctgttgtgtgggacggtgtacacttcacgcaggctgctaacaaattcattttcgataagattgctccagggttaagcaaggcctgtaaaaggcagtga

SEQ ID NO: 394 - DNA, 1824 bp, Arabidopsis thaliana
  Clone ID: ARATH-23APR03-CLUSTER1942_1
gggagggactctcattctctaatctatttcttcgatagtgttgattctccgcaaaatcctctcgagagaatctttcccaaaagagattagatttggtggaagaaaagagttcttcgtcttcttgttgttgttgaggattgaagaagaatagaaatgaaccgacaaaacggtggagggcagcggctgagatccgctagacccaccacaattcacgattgtgctctctccggcgatcttattgctttacagagacttcttaaagacaatccttctcttctcaatgaacgcaatcccgtcatgtatcatacgccacttcatgtttctgctggtaatggtaatgttgatattgttaagtatcttctcgcttggactggatctgataaagttgagttagaagcaatgaatacttatggtgagactccattgcatatggcagctaagaacggttgtaatgaagctgcaaagctactccttgagagtggtgcttttatcgaagctaaagccagcaatggtatgacaccgttgcatcttgcggtatggtactcaattactgctaaagagatctcgactgttaagacactgcttgatcataacgcagattgcagtgcaaaagataatgaagggatgactcctttggaccatctgcctcaagggcaaggcagtgagaagttacgggaattactgcggtggtttctccaagagcagaggaaaagaagtgcgcttgagcaatgtggtaagacaaaagccaagatggaactacttgaggatgagttatcaaatattgttggattaagtgagctgaagacacaactgaggaaatgggcgaaaggaatgcttttagatgaaaggcgaagggctcttgggctaaatattggaacccgaagacctccgcatatggcatttcttggaaaccctggaacaggtaaaaccatggtagctcgagttctcgggaagctgcttaacacggttggaattttaccaactgataaggtaacagaagtacagcgtacagatttggtgggtgagtttgttggccatacaggaccaaagaccaggagaaagatccaagaagctgagggaggaattctgtttgtggatgaagcatacagattgatcccgatgcaaaaggcggacgacaaggactacggtctagaagctctggaagaaatcatgtcagtcatcgacacagggaaaattgtggtgatatttgcaggatacagcgagcccatgaagcgtgtgatcgcatcaaacgaagggttttgcagaagggtcacaaagtttttcaatttcagcgacttcagtgccaaggaactggcgcagatactacacatcaagatgaacaaccaaggagaggacactctgttctatggtttcagattgcatgagtcctgcactttgcaggagatagcgtcactgatagaggcagaaacaacggaaaagcagaggaaagagatgaatggaggattggtggacacgttacttgttaacgcgagggagaatcttgatctccgacttagctttgagtgtgttgacactgaagagatttgtacaatcaagttggaggatctagaggccgggcttcgagttttctcgcagtgaaaagaaacttctgatggctaataattggttagtattacaaattgtattgattcaattctttacatcatatattctttatgtttttgtccccctcaagatcttgtaggaggagaggctttggtttcaacttccattgtttgatcaaatctatttctgttgtataaaactatattgatattttgtcttttcacttttctcatatttttttgaaaaaaaaaaaaaaaa

SEQ ID NO: 395 - DNA, 1256 bp, Arabidopsis thaliana
  unsure (1)..(1256): unsure at all n locations
  Clone ID: ARATH-23APR03-CLUSTER19459_1
gcacnagnccattacctagaacatcctaatcaaaaacacaacataatcctcccaaacagagagagtctcaaaaattaaaccaacaaatttaaagatgaattgcttgatagctatagctctttcagtctctttctttcttgtgggaatggttggaccgatccaagctcaattgcagatgaatttctatgccaattcttgtcctaatgctgaaaagattgttcaagattttgtttcaaaccacgtttctaatgctccttctcttgctgctgctctcattagaatgcatttccatgactgttttgtccgaggttgtgatggatcagtgcttataaactcaacgtcaggaaacgcagagagagacgcgactcctaacctaacggttcgagggtttggcttcatcgacgcaattaaatctgtgcttgaagctcaatgccctggaattgtctcttgcgctgatattatcgctctagcttctcgcgacgctgtcgttttcaccggaggaccgaattggagtgtaccgaccggaagaagagacgggaggatatcaaacgcagcggaggcattagccaacattcctcctccaaccagtaatatcaccaatcttcagacactctttgcaaaccaaggacttgatcttaaggacctcgttttactatccggggctcacactattggtgtatctcactgctcgtctttcacaaaccgtctctacaattttacgggtcgtggaggccaagatccggctttggacagcgagtacgcagccaatctcaagtctagaaaatgtcctagcctcaacgataacaagaccatcgtagagatggatccagggagccgcaaaacatttgatctaagttattaccagctcgtactcaagcgtagaggtctgtttcaatcagactctgctctcaccactaaccccacaacactttcaaacataaaccggatcttgacgggttcggtggggagtttcttctctgagtttgccaagtcaatggagaaaatgggtcggatcaatgtcaagactggttcagctggagtggttaggaggcaatgttccgttgcaaatagttaaggggtggaaatgtaaaagatttgggagcttgtgggggtagttgtgataataattaataaggatgattgtgaatttatgatgtggccttttgggatttgtgtgtatggattttgttacagacttcgtcaataaagaaataaaaagattttactgcttttttttaaaaaaaaaaaaaaaaann

SEQ ID NO: 396 - DNA, 1361 bp, Arabidopsis thaliana
  Clone ID: ARATH-23APR03-CLUSTER19463_1
tcatcgctgtctggaagagctcggttcgagtcatcgctgtctggaacagcgatgactcgagaaccgatctcctccctctctctcttaaccactaagcaaaaatcccatctttctatataaacctctctcccaactctgctacttcccaccgtaaatcgtttctgggttcttaagaataacatggcctcgtcatcatcatcatcttatagattccaatctgggtcttaccctctttcgtcaagtccttctcttgggaatttcgtcgaacgcattaaagacgcttgtcatttccttgtctctgctgttttgggtaccattatctccgcgatcttgaccttcttcttcgcactagtgggcacattgctaggggcacttacaggagctttgataggtcaagaaactgagagtggtttcattagaggagcagcaattggagccatttcgggagctgttttctctatcgaggtctttgaatcatctctggatctctggaaatccgatgagtcgggtttcggatgttttctctacttgattgatgtcattgttagtcttctaagcgggagacttgtacgagagcgcattggtcctgcaatgctaagtgcagtgcaaagtcaaatgggagctgtggatacagcttttgatgatcacacaagcctttttgatacaggaggctcaaaaggattgacaggagaccttgttgagaaaatcccaaagatgacaatcactggcaacaataacactgatgcttctgagaacacagactcatgttctgtttgtcttcaggatttccagctcggtgaaacagttagaagcttgcctcattgtcatcacatgtttcacttaccttgcatagacaattggctccttagacacggttcttgcccgatgtgtagacgtgatatttaatctcttcatctctccatcgtccgtctctcataatgcagtttaacctcgcagttcagatatttctacagctcgtacatcaagagtctgctctgctcttcttccctcctccttgagtttcatgtaaattccagttcttttggctgtttacaattacgatacctctcttactctttcagagtcattgtaggactcctagttctctaatgtacaaagaaacacaaaaatagagtttttgttttatctaattctttactctggctaatgttgtgtgacttgtgttccattgagccagaaactagtttggtcggctttttcttaagcacttgaaacaagagacactactcacgggaccaaatccattgaacgatattattagattcttgtctggtgtaaccaaactaagtacttacgtatttaattaaagcactcttttgatgtaaaaaaaaaaaccaaag

SEQ ID NO: 397 - DNA, 1926 bp, Arabidopsis thaliana
  Clone ID: ARATH-23APR03-CLUSTER19467_1
atctcgccggaagattgattcatccgttgattaatcggagctccttagttttgattccgttatggagagtttgattgcgcttgtgaacaagattcagagagcctgtacggctctgggagatcacggcgagggaagctccctcccaactctctgggactcattgcctgcaattgccgtcgtcggtggtcagagttctggaaagtcttcagtgctagagagtgttgttggaaaagattttctacctcgtggagctgggattgttacacgcagacctcttgtcctgcagcttcatagaattgatgaagggaaagagtatgcagagtttatgcatcttccaaagaagaagttcacagattttgctgctgtgaggcaggagatctcggatgagacagatcgtgaaactggtcgcagcagcaaagtaatatccacagtcccaattcatctcagtatcttctctcctaatgttgtgaatttgacacttgtcgatcttcctgggctaacaaaggtagctgttgatggccagcctgaaagcattgttcaagacatcgagaacatggtcagatcgtttattgagaagcccaactgcatcatacttgctatttcccctgcaaatcaggatcttgcaacatctgatgccattaagatctctcgtgaagttgatcccaaaggagacaggacttttggagttttaacaaaaattgatctcatggaccaaggcactaatgctgttgatatacttgaaggaaggggatacaaattaaggtatccttgggttggtgttgtaaaccggtctcaagctgacattaataaaagtgttgatatgattgctgctcgtcggcgtgaacgtgattacttccagactagcccagagtacagacatttaactgaaagaatgggttcagagtatttaggaaagatgctctctaagcatttggaagttgttatcaagtctagaatcccgggacttcagtctcttatcacaaagacaatttccgagttagagacagagctaagccgtcttgggaagcctgtagcagctgatgctggtggaaaactttatatgatcatggaaatttgccgtgcctttgatcaaacttttaaagaacacctggatggcacgcgttcaggtggtgaaaagataaattctgtgttcgacaatcaattcccagctgccattaaaagactgcaattcgacaaacatctctccatggacaatgtacggaaactgatcactgaagcagatggatatcaacctcatctcatagctcctgaacaaggttatcgccggctcatagaatcatgcttagtctccattagaggccctgctgaagcagctgttgatgcggttcattccattctcaaggatcttatccacaaatccatgggcgaaacatctgaactgaagcaatatccaacactcagagtagaagtatcaggtgcagccgtggattcattggatcgaatgagagacgaaagcaggaaagcaactctgttactagtggacatggagtctggttacttaacggtcgagttcttcaggaaactcccgcaagattctgaaaaaggtgggaatccgacacattcgatattcgacagatacaacgatgcttatctccgaagaatcggctcaaatgtgttgtcatatgtgaacatggtctgcgctggcttgagaaactccataccgaaatccattgtttactgtcaagtccgtgaagcaaaacgaagccttctagacatcttcttcaccgaacttggccagaaagagatgagcaaattgtcgaaattgttggatgaggatcctgcggttcagcagcgaaggacttcgattgcgaagaggctggaattgtatagaagtgctcaaacggatattgaagcagttgcttggtccaagtagagagacgagaccctctcttcacactccatttt

SEQ ID NO: 398 - DNA, 927 bp, Arabidopsis thaliana
  Clone ID: ARATH-23APR03-CLUSTER19548_1
gggacagtggacggatttgctcgctagttttctcttcgaattttccacaaacaaattttctcagccaaagttcgatcggatctgggttttatatttttttgaagaacccgtgtccgtcttcgatcagttcgcgttcaatagccaaatcttatctcttcagctggaatctgacgaacattattatcatcggtagtgttctatagaaagaccgaaagttttcttcaatttcaaagtcagtggcgatgtcgtgggctggtcctgaagaaatttatccttcaacatcattcgctagatagaccgaaagttttcttcaatttcaaagtcagtggcgatgtcgtgggctggtcctgaagaaatttatctttcaacatcactcgctagttatctcgatagaaaactacttgtgcttcttagagatggtagaaagctaatgggaacactccgttcctttgatcaattcgccaatgcggttctagaaggtgcgtgtgagagggtaattgttggtgaacaatactgtgacattcctttaggcctctatgtaatccgtggagagaatgttgttttgattggtgagctggacacggagagagaagagcttcctccacatatgattcgcgtctcagaggcagagattaaaagggcacaaaaggtggagagggaagcgagtgagctgagaggaacaatgaggaagagaatggagtttcttgactttgattaaaccagattgtatccccattcattattggcttgatgctctgctttggctcgcaagttttatgatgagcctttttggtgtgttgacttaggggatcgacgcaattcttgtgtttcattttggatgaatatgacaataaatctgtgtacttttgtctttggatctatttacctttttaagaaaaaaatgttaagcaaaaaaaaaaaaaaaaa

SEQ ID NO: 399 - DNA, 1649 bp, Arabidopsis thaliana
  Clone ID: ARATH-23APR03-CLUSTER19552_1
ataatttatcgacaaactcacaaaagtatcggcgaagaagagattggattctctgtttcagttccttaagagtttgaggagattctctgtgtataaattgagatggttcctcccataatttataagtataagcgaaggaaagatcggcgacttggtagggacgatgatagttcagtgatgatgactcgtcggagacccgactccgattttatcgaggtaagtgatgagaatcgctcgtttgctttatttaaggaggatgatgaaaaaaatcgtgatttgggtttagttgatgatggttccacaaatttggttcttcaatgtcatgatgatggttgttccctagagaaggataatagcaatagcttggatgatttgttctctgggtttgtttataaaggtgtgaggaggaggaaaagggatgactttggaagtataacaacgagtaatcttgtttctcctcaaattgctgatgatgatgatgatagtgtttctgattcacatattgaaaggcaagaatggagtgaatttcatgttgaagtaagaagagtttctccatactttcagggatctactgtttcacaacagtccaaagaagggtgtgattctgatagtgtttgttccaaagaaggatgcagcaaagttcaagctaaagtcccacgagtttctccatacttccaggcatcaactatttcacagtgtgattctgacattgtttcttcttctcaaagtggaagaaattatcggaaaggaagcagcaaacgtcaggttaaagtcagaagagtttcgccatatttccaggaatcaactgtttcagaacagccaaaccaagctcctaaaggtttgcgtaactattttaaggttgtgaaagtttcaagatatttccatgctgatggaatccaagtcaatgaatcacaaaaggagaaatcaagaaatgtgaggaaaactcctattgtgagccctgtactctcgctttctcaaaagaccgatgatgtatacctgcgaaaaacgccggataacacatgggtgcctccacgatctccatgtaatctgcttcaagaagatcattggcatgatccatggcgggtgctggtcatatgtatgcttctcaacaaaacatctgacgcggggagtgatatcagacttgtttggattgtgtactgatgcaaagactgcaacagaagttaaagaagaggagatagagaatctaataaaacctcttggattacaaaagaagagaaccaaaatgattcaacggttgtctctagagtatcttcaagagagctggactcatgtcactcaactgcatggcgttggaaagtatgcagcagatgcgtatgcgatattctgtaacgggaattgggatcgcgtgaagcctaatgatcatatgctaaactattactgggactacctcaggattcggtataaattatgaatgagaaggtacaagtatatatttgtcctaatttgctctgttttttgttgttgtcaatgtgtaaaagttgtaaatgaaaatcttgtcttatactagtttgttatatcatatattggaatgtgttttggtatcaaaaaaaaaaaaaaaaatgtttaatattgtcgaacacctaagatggggcatgattgttgataatgaaaagctatgcgactttctc

SEQ ID NO: 400 - DNA, 1765 bp, Arabidopsis thaliana
  Clone ID: ARATH-23APR03-CLUSTER19558_1
aattttctctcactaaatcagaaatgccgccgtcgttaccgtctctgcaactccgacggcttctcctccgtagcttcatttcctcctcctccgtcaatactcttcaatctcagccccgtatcatttcttccaagccgttgttttctcctcttcccccttcccgttcctctatattctcaacccgtccctctagattctcctcatctccttcgagtgccgtctcggctgcttcggatgcggatgcggtcgctctcgcttcctcggaggtcccccccgcgttcccggacgccctctcccggacccctgcccccgggtcccatcccagctccccccgcttcacgcccagccccgccctcatcccccctactcccgatctctctccccaagctcgtcgccccgccccaggctctgcccgcggggtccaggctttcaccaactgctcgcatcccaatccaaccttttccccccccgtcgaacactttcgcttttcggccagttatttgggcccaattttctctcactaaatcagaaatgccgccgtcgttaccgtctctgcaactccgacggcttctcctccgtagcttcatttcctcctcctccgtcaatactcttcaatctcagccccgtatcatttcttccaagccgttgttttctcctcttcccccttcccgttcctctatattctcaacatttccttctagattcttctcatctgaaacgaatgcggaatcggaatctttggattcgaatgagatcgctctctctttctcgatggtgattagcggggagcctatctgccgggcaaaacccttgacgcagctaggttagctggtgaaatgtctagtcgaggatttgagataggaaccaaagcgtataacatgatgcttgattgtgtttgtaagctttgtaggaagaaagatccttttaagcttcaacctgaagtagagaaggttttgctggagatggagtttcgtggtgtacctagaaacacagagactttcaatgtgttgattaacaatctttgtaaaatcaggagaactgaagaagcaatgacattgtttggtaggatgggtgaatggggttgtcaaccagatgctgagacttatcttgttctgattaggagtttgtatcaagcagcgaggatcggtgaaggggacgaaatgatcgataagatgaaatcagcgggatatggtgagcttttgaataagaaagagtattacgggtttctcaagatattgtgtgggattgagaggcttgagcatgcgatgagtgtgtttaagagcatgaaagctaatggatgcaaacctgggatcaagacttatgatttgttgatggggaaaatgtgtgcgaataaccagctgactagagctaatgatttgtagaaagaggaagcggatagcaatgttaagaagagggagactttgcctgagaaaaccgcgaggaagaagaaacggctcaagcagatcaatatgagttttgttaagaaaccgcacaataagatgagacggagaatgtgatgctgatgaatcttcaacatctgatagaattttctaaagattattgtctttgttctttcctttttaagatattgtcaagagtactcatcattttgcttgatcatgagcaaattgtcccaataatcttttgttttgtctcagtgtaacgtttactaagagttcatgctttgctccaggatcggcggaattttcccattattttcttttgttgtctctcagtaaaacgtggcccaaaaaaaaaaaaaaaa

SEQ ID NO: 401 - DNA, 801 bp, Arabidopsis thaliana
  Clone ID: ARATH-23APR03-CLUSTER19575_1
aattctggattactcatttgccttataacaatgccttcttcttccgaagagattgtgtccgccggcgaatcatcagagatcgaggaagcggttgcgagtctaaccatgtcttctaacaagattttgttgacgagttccgatggcgagtctttcgagatcgacgaagcggtggcgcgtaagtttctgatcatagtgcacatgatggaggataactgcgccggtgaagcaattccgcttgaaaatgtcaccggggatatcctctccaagataatcgagtacgcgaagatgcacgtcaatgaacctagtgaagaagacgaagacgaggaggcgaagaagaatctagactcgtgggacgctaagttcatggaaaagctagatctggagaccatcttcaaaatcattctcgctgccaactacctaaacttcgaaggacttctcggtttcgctagccagacggttgctgattacatcaaggacaaaacaccagaggaagtacgagagattttcaacatcgagaacgatttcacgcctgaagaagaggaagagattcgcaaggagaatgcttggacttttaatgagtaatccaactttagggtttgcagaatttcgtttcgaattgcacaatttagggtttctcttctcccccctcttagatttcgtgaatgggttcatcttttcgttatcgacttggtctcaagtaatattctttgtagattgaccaatgttgttcttgctctattagcgttctaattcgattctcgatcttgttcaaaagccaaaaaaacgaaaaaaaaaaaaaaa

SEQ ID NO: 402 - DNA, 1071 bp, Arabidopsis thaliana
  Clone ID: ARATH-23APR03-CLUSTER19584_1
ccctctaattctctcctatttgttttataaacatgttaggcctagctcctgatgggcttgttaaacataattatactgggccaaatttactctctaattctcttaatttatttataaacatgtaaatgattgggcctagatactactgggcttattatccaattatggcccaacctaaatgactatcgaaccctatactatcaaaaaccgtgaaggtcggatctctttcttgatttggccgacacatctgatctaacaatggcgacgaacaacatcgtacgtttgatcgctccaagccgatccgtctcctctagattcctcgagccagtgtcacggtttctaagctccggtacacctcctccgccgcaagctccatctccgaatcaggatctgaaccgggacgtgaagccagatcagaatcttcaacagaatctgcagatgcagaaggaagaagaagaggaaggagaaggaggtggaggtggagagtttgtgaacgaagatactggtgagattggagggcctagaggtcctgaaccgactcggtacggcgattgggaacaacgtggtcgatgctctgatttctgagaggattcatgtatccctgtgttttagcttgttcttatatatttctgggaaaaatggaaataaattcgttttatgtgtttatgtatttgcaaaataatggagaaaatggaagaaaatgtagtagaacttcaaattcgttgcctttatttggatcatcattctctggtgatcttgttattccagtaatagttaataagttcttcctcaggaaagttaagaaaaaaaaaaaaaaaaactttctcgagtagtggggtcacctgaatgcgccctgcccggtgggccagatctaagctagctacccccgctctgtttggcgaaccggggcgttctgagttccgttttgtctttacccggtggttacatgagttctggtccaagtttaggcatggctgcatgggtcagtgagatgatgtcaaggtatttctgttgttcaacaacattgcaatgtgcacttctgtgataactacaattgcacaactgggtgat

SEQ ID NO: 403 - DNA, 1359 bp, Arabidopsis thaliana
  Clone ID: ARATH-23APR03-CLUSTER1961_1
acacaaacattaaacaatctaaacacacaacaatccaaaagaaaaaagaaaaaagaaaaaaaaatggcttcaaattcagcacttctcatgaaaacaatcttcctcgtactcatttttgtctcttttgcaatctctccagcaacttcaactgcgccggaagaatgtggaagcgagtcagcgaacccgtgcgtcaacaaagctaaagctttgcctctcaaagtcatagcaatcttcgtaatcctcattgcaagcatgattggtgttggagctcctctctttagccgtaacgtttcgttcctccaaccagacggaaacatcttcactatcattaagtgtttcgcctccgggatcatccttggaaccggttttatgcacgttttacctgattctttcgaaatgttgtcatctatatgtcttgaagagaacccgtggcataaatttcctttctccggatttctcgctatgttatcgggtctaatcactctagccattgactccatggccacgagcctatacaccagcaagaacgcagtttggtatcatgccccatggtcatggtcatggtcacggccccgcaaatgatgttaccttaccaataaaagaagatgattcgtcaaatgcacagctcttgcgataccgagtcattgccatggttcgtacgcacatatatacataccgtgcttccatcaaatgttcgaagccatgggtcttggcggttgtatcctccaggctgagtatacaaatatgaagaaatttgttatggcgttctttttcgcggtaacaacaccattcggaatagcgttagggatcgctctatcaactgtttaccaagataatagcccaaaagctttgatcacggttggacttctaaatgcatgctccgctggattgctcatttacatggcactcgtggatcttctagctgcggagttcatgggacctaagcttcaaggtagcatcaaaatgcagttcaagtgtttaatcgcggctcttctcgggtgcggtggaatgtcgattatcgccaaatgggcttaactaatactccagatattgcggaattgaaatcatgtggatttcattatcgaactaaaaccgttttaggtttacgtctcgattctctatcggttttttatcttctcttacaaaagatttgcgtggatctatcacattttaaggaacatgtcttttggtagatatgtaaatgtgataggccccacgattcatagttttcttttgtatcttcctttattttgtcaaggcagtatagttcatatcgtgtaatgtttttgcatctcatataaataaataaaacttttgctgctttttcaagataagtaattaaagaaaaatatatatttt

SEQ ID NO: 404 - DNA, 1402 bp, Arabidopsis thaliana
  Clone ID: ARATH-23APR03-CLUSTER19636_1
aatcttttgcattccccaacatacactcctgtctctctttctatctctctcttccacttcaaacttcaaagatctcacaacttctttgagttttgtaatggcaacagatgaaatgaaatcagaaactaaaaaaacagaacataagcaaaaacaatctacacaaatcaaacaagaccttcctcctccgaccataccacctcttccacttccttacaagtcatgcaccttgaaagtttctattcactgcgaaggctgcaaaagaaaagtcaaaaaaatacttaccagcattgaaggtgtttttaaagtggacattgatgtgaaacagcataaagtaacggtgataggaatcatctcgccggagattctgttaaagaagcttaacaaagctggtaaaaacgctgaacaactgccggagatacccgacccggttgacaacaaacccaaacccgtcgacccgaaagagaagaacaagaagaagaagaaagaagagaaagtgcaaataaccaatgaagctacttcttccggtatagataatccggaaaaacccggttctggagagtgtgataaaccggaatctgaaaaacccgtcgacgaaaagtgtctttccggtgacggcggtgaaacttccggtcctgtgaaagaggaaaaaaaggacgttcttaaggagaaagattctgggaaggaagaatctccgtcaccaccggcggattcttcggctccggcggcggagaagaaagctgaagacaccggtggagctgtccctgataatggcaaagttggtaaaaagagaaaaagaaagggcaaagtttggctactactaacaatcctaccgatggacctgcccgtactcaatcacttcctccgcccactgcaacagattatgaccgtccaattaatcagatcaacgaccaccatataacaaccactaataatccgccacgtcacgatctgtatccttatcctgcacaaggctattatgcgccgcaagtcatgtatggcgtaagttataacgttgctcaacctccggtgagtgtagacgctgcgtcgtattatacacctccaccaccgtattcgtatgcgtacatgcacaacggttatcaaccgtccgatcaaaacccttgtcaacctcggccgtcagattcgtttgagttattcagcgatgagaatccaaacggttgtgcgataatgtgatgtcaaattaccaaaaggaccttgaactctgcttatacgccttgtatgacttaaggatggtttcgtaatttgaagttctttcacgtgcaagttagcttaatggtgtttctagttaagtttattttaatgaatgttgtattagttttataactatgattatgattatgttaagataaagattaagctttcattaaaaaaaaaaaaaaaaaaa

SEQ ID NO: 405 - DNA, 1059 bp, Arabidopsis thaliana
  Clone ID: ARATH-23APR03-CLUSTER19637_1
actgctaaaacctcacctgcggcttcacctttcttagagttcgtgaaaaagagacgtcgcatcgcaccgccgtcgccatttccaccgtcgtagcattgccgcttcactgactgtcgcactgaatattgttgaatcgagaaaatggcttatgttgggcaaagtagaaacgtgattcggcatgtagtctcgagaggaacagcttatcacaagtatgaaaatgcgattcatcatcctctccttttcgcttgtcaaggagttcgatacagaaaattagaagttattcttacaacgggcattgagaagcttggcaaagctggtgagactgtgaaggtagctcctggatacttcaggaatcaccttatgccaaaacttcttgctgtgcctaacattgacaagtatgcttatctcatccgagagcaacgcaagatgtataatcatgaagaagtaaaggaggaggttaaggtggttcataaaacttctgaagtccagacaaaagagtatgaaaaggctgcaaagcgtctggcgaatgctaatttggtattgaggaagttagttgacaaggaaaagttcaaaaaccgctcctcaaaagacgacaaacctgatgttcaaactcctatcacaaaggaagagatagtctctgaggtggcgaggcagctctgtgtgaagattgatccagacaatgtggttttagcggcgcctttggaaacttttggcgagtacgaggtgcctcttaaattccccaagacaattcctttgccacaaggaactgttcaatggattctcaaagtcaaagtccgtggccattaaatcttccacctttgaaagtcctccttcagtgatagttctcttcttcaatatgtttcaatatagttttggaattgcagaaacataagcaaacacaaatcagttacatttcccttgactcagtttttttttttttttttttgtagttgtataaaccgggtttactccggtctttaatttaaacaatgactcgaattttgcgaaaaccggactcgtccagaagacggataaatttaataaaaaaaaaaaaaaaaa

SEQ ID NO: 406 - DNA, 1193 bp, Arabidopsis thaliana
  unsure (1)..(1193): unsure at all n locations
  Clone ID: ARATH-23APR03-CLUSTER19673_1
aatacgagaagaaaaaggcgaaaacctcgccaatccgattacgcgaaaaatcaaaggtttttggatatggcgtcgaagcggatcttgaaggaattgaaggatctccagattttttttttttttttttggcaatttctttcatgtgattcccttctattaggcgttgcttcgctcttttggctattttgtttttctgcaggcgttcataatctcaacatgtatcctttcatagtctttttttaataaaagtcagttgacgaagaaaataaaagtaaaaaaaaaaaaaaaaaaaaaaaaaaaaaaaataaaaaatggcttcctcatcaacgagaaagtacgagacacgaaagcgagatccaaactctaaaatcgcagctcttctcgttatcgacatgcagaatcacttctcctccatggccaaacccatcctcaacaacgttctcaccaccatcgacatctgccgacgcgcctcagtccccgtattctttacgcgtcacaaccacaaatccccgaccgaccacggcatgctcggcgagtggtgtaacggcgatgtaatccttgacggaaccaccgattctgaaatcatccaggagatacaaggccaagtaaccggaccagacgagatggtggagaagaacacgtacagtgcgtttaacaaaacccgcctccaggaaaacctggaaaagatcggagtaaaggaggtgatcgtgatcggagtgatgacgaacttgtgctgtgagacaacggcgcgtgaagcgtttattaagggttttagggtttttttctcgacggacgcgactgcgacgtttaatgaggagcttcacgaggctacgctaatgaatctcgcttttggcttcgcttatctcgtcgattgcgataaactccggcgaagtctactcggtaactaaaaaatgataattacacgcacaaccgtcgcggaaaagttatccgacgttacatgttatgtggagaagcaaagttggagtctctatgcttaccatattgagctttttttcttaagtattttgtctaatatctttcatgtgattcccttctcttaggcgttgcttcgctcttttggctattttgtttttctgcaggcgttcataatctcaacatgtatcctttcatagtctttttttaataaaagtcagttgacgaagaaaataaaagtaaaaaaaaaaaaaaaaaan

SEQ ID NO: 407 - DNA, 2806 bp, Arabidopsis thaliana
  Clone ID: ARATH-23APR03-CLUSTER19696_1
gccggtgtgagacgttttgtggcgtctataaatatacaagaggtgagagagaaagaaaaaaagaaagagtaaaacaatgggttattcatcatcctcaagaattgggttatgtttgtgcctcttcttcacatttgctcttctctcttctgctcgcatcagtctttcattttcagaaaatgaaatgacggtggtgccagaacggtcattgatggtgagcaccaacgactacagtgaccctacagctaacggtagacatgatccaccccgtgaaggcagaggacgcagacgttaagagagaggataattttcttaattttccgactcctcttgcaagcttgcaaattatctatatatatagaaaacagaagaaagtagttttaaaaacgagttatatatgtgatatcagagtgtgtgtgtgtgtaatatataataattcatttgcatttggtaaaagtaagccgtttgaggtgtacaaaaggcgaacaaccgttgttgtttctcgtgaaatatttgtaaacgttgtctgtgatgccctggctgagtacaagtatgtgggtcatgaccaaagggcagacttgattctgtcgtgcagaatccgagaaaggaaagaatctgtgactgttctactgtgcggtactagtggctgtggcaaatctacactctccgcacttctgggaagtaggcttgggattacaacggtggtctcaaccgactcaatccgtcacatgatgaggagtttcgttgatgaaaagcagaatcctttgctatgggcttcaacataccatgctggagagtaccttgaccctgtggcagttgctgagtcaaaagccagaagaagaagagccaaaaaaatggatagtattgaggacgaaaaagcgaaagcctctgaaggtgggaaggctaagaatactcaacagactgatgttggatcaacaaaaaacacccctgtattgttaagtcccaagcaaatggctgtagaaggatttaaggctcaaagtgaaatggttattgacaatctcgataggctcattaccgcatgggaagaaaggaaagagtctgttattgttgaaggtgtccatttaagcctcaactttgtgatgggactgatgaaaaagcatccttctatagttcctttcatggtatacatcgcaaacgaggagaaacatttggaacgatttgcagttagagctaagtacatgaccctggacccagagaaaaacaagtatgtaaaatatatacgtaacatcagaacaatacaggattacttgtgtaaacgagctgacaaacatctcgtccccaagataaacaataccaatgtcgacaagagtgtggctgcgatccacgctacagtcttcagttgcctgcgtaggcgagaagcaggagagcatctctatgatgctactacaaatactgtctcagtgattgacgatgagtatagaaaccagtgtacagctaattcattgagctccaaaggaatgtttcagctgatccaaagaaaaggttcttctaggcatcttatggctcttctcaatactgatggcactttcgcaagaacttggcccgttactggtaaggtcgatgagagtggaaagccagtcttttgtaatgagatgattgaagaaaatggaatggagcacccggtctatggatacctacagaaagctgaaccggtgaatcttcagtttggtctatttgggatcagtgcttggcctagtgatggagccactagccgcgctgggagtgtagatgactgtaaagctgacatggctgaaaccagcagtcggtattactcttcttgctgcagctcgcctaggatgtctgaaggaacttctaaagagcttaaggaggatcagtcagtccatgggagcgatgaagaagtcgaggatgatcctcccgagccagatacagattttagcgatgacgataacaagcgagaccatgacgaggtgggttcggttgatgagcaatcaacaaagtcagatgaggagtacgatgatcttgctatggaagacaaaagctactggacagatgaagaggaagagtcacgagatacgattgcaataatgtctgaaaaaaacaacaagcaagcaacaaaagaagacaagtacatacagaacttagacctttttctacggaccgcaaaccagcagcttgtcgagccacttcagctatgtgcatcactgctcacatgcgagaatgggaacacaagactctggttgggtaaagaaaagatgaggaaacgttctttaagcatctcggccattggcaaacatgggtcgggtttgggtgatgcgattctcttgggtgccccatgaggccatgatcttttactttagtttgatatttctctggtgtagtcttttttttatttcttgataaagtattctggttctggtctttagtttaagttttctgtgtgtgtatgtgtgactgtgtgaatagtcttaacttgcacaaatttgggggtttataaagtgcttcgttttcttttctttttttatttaaggcttttcttttcttcgacctcaaatgtaaatacttcaatattaacatctaagactccagtttaaatttctatataattgagcgtttgcaagcaaaaaaaaaaaaaaaaccgactcctcttgcaagcttgcaaataatctatatatatagaaaacagtaaaagtagttttaaaaacgagttatatatgtgatatcagagtgtgtgtgtgtgtaatatataatacttcatttgcatttgtgttctctacatcgacttcaacttgttattcttacctagattaatatatgtgcagtgtgctac

SEQ ID NO: 408 - DNA, 2415 bp, Arabidopsis thaliana
  Clone ID: ARATH-23APR03-CLUSTER19707_1
acacaatagagagaatcattcagttacaagaaaatcgtcctcttctctcgccgatctcttctcttcagatcctctcctctataaaatctctccctctctcgttcctctctcgagatctgactcaaatcaaatcaaaaactctcagctatggaagtcgaacgatcgaagaaagacgacgatctaaacaatggatctaaatccaacgaagaagaagaaatctccgtggagagaatcttcgaagagagtaacgaaatcccaccgccgtggcaaaaacagctcacgttcagagctctaatcgtgagtttcatactcgcgattctctttacctttgtggtgatgaaactgaatctaacgactgggattattccgtcgctgaatatctccgccggtttgcttggtttcttctttgttaaaagttggactaagattcttaataaagctggttttcttaaacaaccgtttacacggcaagagaatactgtgattcagacttgtgtcgtcgcctcctccggcatcgcctttagcggtgggtttggtagttatctgtttggaatgagtgatgttgttgctaaacaatctgcggaagccaatactccgttgaacataaagaatccacatttgggttggatgataggatttctctttgtcgttagctttcttggtcttttctccgtcgttcctcttcgaaagatcatgatcgtggacttcaaattgacatatcctagtggtactgccactgcccatctcattaacagcttccacacacctcaaggtgccaaactcgcaaagaagcaagtcagagcattgggcaagttcttctcattcagtttcttatggggtttctttcaatggttctttgctactggtgacggttgtggtttcgccaacttccctacatttggtctcaaagcctatgaaaacaaattctactttgatttctctgctacatatgttggtgttggaatgatttgtccatatcttatcaatgtgtctcttctcatcggagcaattctctcatggggtgttatgtggcctctcattggtgcccaaaaaggcaaatggtatgctgctgatctctcatcaaccagtctccatggtcttcaaggctacagggtgtttatagccatagctatgatcctcggtgatggtctctacaacttcatcaaagtcttaggccgcactgtcttcggtctatacaagcaattcaagaacaaagatgttcttcctatcaacgaccatacatcaacagcccctgtaaccatttcctacgacgacaaaagaagaacagagcttttcctcaaagacagaatcccatcatggtttgctgtaaccggttacgtagtattggctatagtctcaatcatcacagttccacatatcttccatcagctaaaatggtaccacattttgatcatgtacataatcgcccctgtcttagccttttgcaacgcctacggttgcggactcactgactggtccttagcttccacttatggaaaactcgccattttcaccatcggagcctgggctggtgcatctaacggaggcgtcttagctggacttgcagcttgtggtgtcatgatgaacattgtctcaacagcttctgatcttatgcaagatttcaaaaccggttacatgacattagcctcaccaagatcaatgttcttgagccaagccattggaaccgccatgggatgtgtgatctctccttgcgtcttctggctattctacaaggcgttccctgactttggccaacccgggaccgcctatcccgctccatacgccttagtctacagaaacatgtctatactcggagtcgaaggattctctgctttgcccaaacattgcctcatgctctgctacatattcttcgcagcagcagtgatcgtaaacggtataagggatgcccttgggccaaagtgggctcggtttatcccgctcccaatggctatggctatacccttctaccttggaggttacttcacaatagatatgtgtctgggaagtctcatactgttcatctggaggaagctgaataaaccaaaggccgatgcgtactcttctgctgttgcttctggtttgatctgtggtgaaggtatttggacgttaccaagctctatccttgccttggctggtgtcaaggctcctatttgcatgaagttcttgtccatggcttccaacaacaaggttgatgccttcttgaacccttcttaacattcttttttttttttttagagtttggtttttaattttctacgtttctttgtctagttttaattggctttttaggtcctcatgtgtctgtctttaagttggtggtttcttttctttctactcaaatatgtaaaaaaagggaatgaatgaattatttggttttctggttaaaaaaaaaaaaaaagaaaaaaaaaaaaaaaa

SEQ ID NO: 409 - DNA, 2046 bp, Arabidopsis thaliana
  Clone ID: ARATH-23APR03-CLUSTER19725_1
ctctcagcagaaaaaccctaaaattcttaagcttcgtttacacacacatacagagactgtatctgtacattcgcatcgttttgtaaaaatggaggtatcttctgtgaaaaagcttgagcagctggagtactctttagagtcagtcactgatctctcttcgtcttccgtttcgtcgtcctctccagctgtagctacgttttcctacgttgatggagtcacggagctccgatttctgcaatcggattcgacccattgtttcaattttgatctcgcttccgctcagttattcaagttggggccagtccatttcatctgtgtatctgatggttcaagttcttcagaggagaaatcattctccaaaggagtcaatataaaattcaaaaatgagaaggatagcaaggatttttgtgagtcctttgaagagtggagaaatgattctgttgttcaaggatcatccttgcaaaatggaacagtttcagctaataaaagcaagttcgacaataagattgaggcgtcttcagcaaaaatgtattttcattattatggacaacttttacatcagcaaaatatgctacaagattatgtgcggacaggtacgtactatgccgcagtcatggagaatcattcagattttgctggtcgtgttgtggtcgatgtgggtgctgggagtggcattttgtcaatgtttgcggcccaggctggtgccaaacatgtgtatgctgttgaagcatcagaaatggctgagtatgctcgtaagctgattgctggaaacccattattcgctgaccgaatcacagtcatcaagggtaaagttgaggatatcgagttgcctgagaaagcagatattttgatttctgaaccgatgggcaccttattggtcaacgagagaatgttagaatcgtatgtaattgctagggatcgttttatgactccaaaaggcaaaatgtttcccactgtcggaaggattcacatggcacctttttctgatgaattcttatttattgagatggcaaataaggctatgttttggcaacagcagaactattatggagttgatctgacacctctatatggatcagcgcaccaaggttatttttctcagcccgtggttgatgcatttgatccgagattattagtggcttctccgatgttccacatgatagatttcactcaaatgaaggaagaagatttttacgagattgatatcctgttgaagttcactgcttccatgtgcaccacaatgcatggacttgcctgctggtttgacgttctctttgacgggagcacggtccaaagatggctcacaactgctcccggtgcacctacaacgcattggtaccaaatcagatgtgttctctcgcaccctatttacctaatggcaagtcaagagatcactggtagacttcatttgatagcccacagtgctcagagttacaccatagatctaactttatcagctaaaatgtgggggcccggtgcaagtcaaggcggaattctccaatcatcgacatgcaaattcgatctgaaagaaccttattatagaatgtctcagccacaagcataccctgttgcacaagaaccacctctacaaccacaaccagagctaagtacacaggacatacaaacaccaaacgatgaattagaagaagagttactgcaacaattgccacagaacccaagtgcccagctctaaaagctaataagtgaaatgaaggtgagagatgataattgggatctttgaatctcagtcatattttgagcttgggatttctgtttgtaacgtcaaaaaggtaaaaaaaatgtttctggtgtctttatgagttttggtatggaaagatcaaaatgatgagcatggaaagatcttatcattcccattgcttccatggaaaagtctctgcttctttgtgtatttcttttcacacccaacttatcaattatttacgttatctttaaaagccacacgcaatgtaaacaatgaatcaagaatcgagttcatttatcagaaaaacatgtctttctaaaaaaaaaaaaaaaaaaagtaaaaag

SEQ ID NO: 410 - DNA, 1533 bp, Arabidopsis thaliana
  Clone ID: ARATH-23APR03-CLUSTER19728_1
gaaagagaaaaagaaagggggtttgtgttatggctcccataacttttagaaaatcttacactatagtaccggccgaaccaacgtggagcggtaggtttcccttagccgagtgggatcaagttggtacaattactcacattcccaccctttacttttacgacaagccatctgaatctttccaaggcaatgtagtcgaaatcctaaaaacctcgttgagccgtgtgctagtccatttttaccctatggctggccgtctcagatggctccctcggggacggttcgagctcaattgtaacgccgagggagtggaattcattgaagcggaatctgaggggaagctttcggatttcaaagacttctctcctacgccggaattcgagaatcttatgccgcaagtaaactataaaaaccctatcgaaacgattcctctatttttagctcaggtaaccaaattcaaatgcggtggaataagccttagcgtcaacgtttcccacgcgatcgtagatggccaaagcgcgcttcacttaatatcggaatggggaagactcgcgcgcggtgaaccgttagaaaccgttccatttctagaccggaaaatcctctgggctggtgaaccgctcccaccgtttgtgtcgcccccaaagttcgaccacaaagagtttgatcagccaccgtttttgatcggagaaacggacaatgtagaagagagaaagaagaaaacgattgtggtgatgctaccactgagcacatctcagctgcagaagctacgaagtaaagccaacggaagcaaacactctgacccggcgaaagggtttacaaggtacgagaccgtcaccggacacgtgtggaggtgcgcgtgtaaagcacgtggccactctccggagcaaccaacggctctaggaatctgtatagatactcgtagtcggatggagccacctctgccacgcggctacttcggcaatgctactcttgacgtggtcgcagcaagcacctcaggtgaactgatatcgaatgaattgggtttcgcggcgagtttaatcagtaaagccataaagaatgtaacaaacgaatacgtgatgattgggatagagtatcttaagaaccaaaaagatctgaagaagtttcaagatctacatgccttgggaagcacggaaggtccattctacggaaacccaaatcttggagtggtgagctggttaactttgccaatgtacggccttgatttcggatggggcaaagagttctacacgggaccaggcacgcatgactttgacggcgactcgctgatcttgccggatcaaaacgaagatggctcggtgattctcgcgacgtgtctacaggtggctcacatggaggccttcaagaaacacttttatgaagatatctaggccttatatgttttttatatacatgacgtatacaaatatttatgcactttcatttgaattctacttatattgtagtgattattgaattgtaataacagattctaaactatatattattgttaaaaaaaaaatggaattaacatttaac

SEQ ID NO: 411 - DNA, 1115 bp, Arabidopsis thaliana
  Clone ID: ARATH-23APR03-CLUSTER19733_1
taagaaatcaccaaataccacaatgcctccctgcaccgtcgtaaccaccgtgacccacgtagcttcatctatccttacctcaagtaccgcattagccgtctctacccggatctttcctgcagtctcgctgtcgctgttggacttcagtaatctgcggcggagagtcaatgcaccatcgccgaggcgcctcgtggttcgcgccgctagaactgagtcagccggagtaaaactgggagctagagctcccaattttgaggtaaaactgtgatatgcgcgtcgctggaaaaacataaaaaacaaggagtttctaattatagagatttgtgtgtgtgtttatgagtgaactatttagcttccggagccgctcactggaaacttatggaaattagaagattttgaactgtatccgtctctactggtaatgttcatctgcaatcattgcccgtttgtgattcatttaaaaaaagacattgtaaagctatgcaatttctatatgaagaaaggtcttgctgttgttgcaatatcttcaaattctgtggtaactcatcctcaggatgggcctgagttcatggcagaggatgcaaaagttttcaaatacccatttccttacttatatgatgagtcacaagaggttgcaagagaatttggagctgtttgtacacctgagtttttcttgtataagaaggatggtcgtagaccatttgagctggtctatcatggtcaatttgatgattcccggcctagcagtaactcaccagtaaccgggagggatctaagcctggcgattgatctttcccttagctgtcaaccaataccatcaaatcaaaagccaagtgttggttgcagcataaagtggcacccagaaacaaagtcatgagctaagacatgattgtacttacaaatagcattattttcaggtatgttccaaaattcgaaactgaaaggatagaagaatgcaaagcagaagaacatagaaagtgtaagttgtatccattattcgagactaatatacagtaaaatctactccacggatcctatattgtgggattgttcatgtatgatataactttatgaacaatataagaatcagttttagtgcaaaaaaaaaaaaaaaa

SEQ ID NO: 412 - DNA, 1421 bp, Arabidopsis thaliana
  unsure (1)..(1421): unsure at all n locations
  Clone ID: ARATH-23APR03-CLUSTER19753_1
aggggggggggaaatatttttcccccggagaaaaaaagtttctcttttttttcccccaggggaaaaatatccccccccaaaaagggagaaaaaaaggtggggttccccccggggggggggccctttttaaaaaaaggagtacccccgggggcccggaaattttggcccagggagaagaccttatgtgcccccncnnnnnnnccccccctttttctccttttttccctttggaaacatattggaaaccctttaaacccgggggggaaagggaacccgggggaataaattccaacctttcttcagttcaaaggtttaattccattggtggcccaaatctgggggttgtcattctttttttggaaaggaccaagattttttttcccattcaaccgcacccattcgaggcgaatattccccagaaatcggagtgcccatcaaacccacanncaatgcaccaaattgcccaattctctatccgacgcatgggttcactatgtcacntcagagatcacaccacaacaaacgcggacgcgtgggctcagtctcaaagagagtcttggacaagaagtctccttgtaacttcctcgtctttggcttaggacacgatagcttgatgtgggcatctctcaatcacggtggacgcactttgttcctcgaggaagatgaagcttggattgagacagtaactaagaaattcccaaacttggaatcctaccacgtcgtatacgacacaaaagtgaaagattccaacaagcttatggagctaaagagaacagaggattgcaaagccgtgtctgatcctagagattccaaatgtgctctgtctctcaagggttttccagctgacgtgtacgagacgcaatgggatgtgataatggtcgatgctcccactggttaccacgatgaagctccagggaggatgagcgctatttacactgcgggtttattggctcgtaaccgttatgacggtggggagactgatgttttcgttcacgatattaaccggccggtggaggacgagttctcggtggcgttcttgtgtggagggtacatgaaagagcagcaaggaagacttaggcatttcaacatccctagccaccgggctagcttcggtacaccgttttgtccggcggatatcagtcgccgcttttgatattgtacaatgagagaaaagtgcaaagaacaataacaagaaaacttggcaaaggactttgaagttgcggaaatgagaattcgatattgatctagtttattctatcaaattagtaaaacttcaaatatacttttgccattttatgtttcgtatgatacaattaatcaagaagaaaagagagatatattttaatacatacgttgtgtgtcaatcttatgcctttaagcatcaagaaacttgttaaaaaaaagcctttaaaaaccaaacc

SEQ ID NO: 413 - DNA, 507 bp, Arabidopsis thaliana
  Clone ID: ARATH-23APR03-CLUSTER19800_1
tatggatcaggccaaatcggccgagctcgaattcgtcgagaaccgggaaactcttctcgtttgtttcgttggtgattgagtttgaaaagttgtgttgtgccgttgttaaagaaatggcgaaatcgaagaatcacacggcgcacaatcagtctgccaaggcgcataagaacggaatcaagaagccaaggagacaccgtcacacaccaaccagaggaatggatcctaaattcctaagaaaccagaggtatgcaaggaagcacaacgtcaagagtggcgagaatgctggtgtcgaagagtagatcttttgatcgtctgattgacagtttaagttttttttatgaatttcacttgtttagacaaaggaaccaatgttctacaatcagggattatgtctatccagattctcttatatattttgcatgttacttgatttgatgcaattctttcacttgttcgtttcgattcgggtccccgtacaatcctaaagctgaacctgatttacataga

SEQ ID NO: 414 - DNA, 663 bp, Arabidopsis thaliana
  Clone ID: ARATH-23APR03-CLUSTER19815_1
gatcattcacaatggcatatgcaactattctcatgatcttctcggtggtggcactaatgtccggcgagagagctcatgcagcagtggactgctcatcgttgatactaaacatggctgattgtttgtcgtttgtgactagtggtagtacagttgtcaagccggaaggaacatgttgttcagggcttaagactgtggttaggacaggaccagaatgtctatgtgaggctttcaagaacagtggttctcttggtttaactcttgatctttctaaagctgcttctcttccttctgtttgtaaagttgctgctcctccttctgctcgttgtggcctttctgtctctggagatcctcctgctactgcccctggtttatctcctacggccggagcaggagcacccgcgttgtccagtggtgcaaatgcggcaactccagtttcgtccccgaggagttccgatgcgtccttgctctctgtatcttttgcatttgtcatcttcatggcactcatttcttctttctattgagtcttaaaatttaattgcttcttgttgagttatttttgtttgctatgtagctgaagagtttggtgttactgatcatatttacctttcatgtgtcaattttaatgagaaatctccttttagttaaaaaacaaatgaaaaaaaa

SEQ ID NO: 415 - DNA, 1165 bp, Arabidopsis thaliana
  Clone ID: ARATH-23APR03-CLUSTER198279_1
aagtcatcttctctctctttttttagtgtgtgcaaagtcatcttctcttttaatatttacctaaaattccaaacaaaagagaacgttatgaaaccaaagagcaaagttgcagaatctacagctgcatcatgttttctcgtcatgagcttgttatgcagctgcattattggtgaccaaatggagactaataatgaaggcttgtcttacagttactacgagaaaacttgtcccaaagtcgaagagatagtgagatcttcactttcatcaatgtttatacttgatcctacttctcctgcagccttgctaaggcttatgtttcatgactgccaagttcagggatgtgacgcatctatcctactcgagccaattagagaccaacagttcaccgagcttgattcagccaagaacttcggaatcagaaagagggacctggttggctctatcaaaacctcactagagcttgagtgtcccaagcaagtctcatgctctgacgtcatcatcctcgccgccagagacgccgtggctctcacgggaggcccactcatctccgtgccattaggacgaaaagactccctctccactccaagcaaacacgtggcagactctgagcttcctccctccactgctgacgttgacactaccttaagcctattcgctaacaaaggcatgaccatcgaagagtccgtggccatcatgggtgcacatacgataggagtcacacattgcaacaacgtattatcgcgtttcgataacgcaaacgcgacaagcgagaacatggatccacgttttcaaacgttcttgcgtgttgcttgtccagagttttctccaacttctcaagctgccgaagccacatttgtccccaacgatcaaacttcggtgatcttcgatacagcttattacgatgatgccatcgcgggacgtggcaatcttaggattgactcggagattggagctgatccacgtacacgtccatttgtggaagcgtttgcagctgatcaagaccgtttcttcaacgccttctcttccgcgtttgtaaaattgtcgtcttacaaagtgttaaccgggaatgaaggagtaattagaagcgtgtgtgacaaggttgattgatgtatatttataattatcaaatgttaaaaatattaaaaaataaaaaaaaaaaaaaaaa

SEQ ID NO: 416 - DNA, 1368 bp, Arabidopsis thaliana
  Clone ID: ARATH-23APR03-CLUSTER1982_1
gtacactcatcatcactttggtcggccgctttcttccttccttcctcctcaaataatctacacatatataacatccctcttagtttctcagtggatccattgagacatatatcataagtaacaatggtgccataccaagaactcactcttcagagaagcttcagctacaactcaagaaagatcaatccagtgacttctccggcgcgtagctcacacgttcgttctccttcttcctctgctttaatcccaagcatacctgagcacgaactcttcctcgttccttgccggagatgctcctacgtccctctctcctcctcatcgtcggcctctcacaatatcgggaaatttcacttgaagttttctttgctcttgcgttctttcatcaacatcattaacatccccgcttgcaaaatgctctctcttccctctccgccgtcttcttcttccagcgtctctaaccaactgatctcactcgttaccggtggatcctcttctctcgggagaagagtcaccgggactctgtacggacacaaaagaggccacgtcacgttttcggtccagtacaaccaaagatccgacccggtcttgctcctcgacctggccatgtcaacggcaactctcgtcaaagagatgtcgtcggggctcgtcaggatcgcgttggagtgcgagaagcgtcatcgatcaggtacgaagcttttccaagagcccaaatggacgatgtactgcaacgggaggaagtgcggctacgctgtgtcacgtggcggcgcgtgtactgatacagattggcgcgtgttgaacacggtatctagggttactgttggagccggagttattccgacgccgaaaactattgatgacgtgtccggtgttggtagtggaacggagcttggtgagttgttgtatatgagaggcaaatttgaacgagtcgttgggagccgtgactcggaggcgttttacatgatgaacccggacaaaaacggaggtccagaactcagtatttttcttcttagaatataataaagaataaaatggtttttaaagagaatttgacttcttaaaagtttgaaaatgtctttaaatgacgtattattatgtatatgtaatatgattgcaatgttgtgtcatgagatatatgtaagcgatattgatatgaaagaaagagagaggggcctagagtatgataaggttttgtttttctagttgtttatttgatgtgtggtatttttgtatctttgttattgatcaataagaagtaaaaaagaaaaaaaaaaaaaaaaaaaaaaaattgcttatatgcaaggcatgaagatccccacatggtccgtcatgattaatgccaaatttaagattcttgttgtcttttattat

SEQ ID NO: 417 - DNA, 1208 bp, Arabidopsis thaliana
  Clone ID: ARATH-23APR03-CLUSTER19830_1
tcgcgggtttgtccgttactcgccctttcccgacacctacttttgtcgattctctaggcttttttatattctgaaagttttgattttttgtatcttgttttgtttctcaatcatcaatttgtggtagtagctcactagcaaacaatggaggggaggttgaataatatgtggaggttgactgtgaatgagagcaaattcgttgaatctgcgttgcaatctgagctcagagtcgatggtcgtggcctttatgattaccgcaagcttactattaagtttggcaaggaatatggcagctcacaagttcaactgggtcagactcatgtaatggcttttgtgactgctcagctagtacaaccttacaaagacagacctagtgaaggctccttctctatcttcaccgagttttctccaatggctgatccatcgtttgagccagggcatcctggtgaatctgctgttgagcttggccgtattatagaccgtgctctacgagaaagccgtgcagtagatacagagtcgctttgtgttctagccggaaagctggtttggtctgttcgcattgatcttcacattttggacaatggagggaacttggttgatgctgctaatgttgctgccttagccgcactcatgactttcaggagacctgattgcactgtaggaggggacaacagtcaagacgtgatcatacatccacccgaagaaagggaaccacttcctttgataatacatcatctcccaatagccttcacgtttggattttttaataaaggcagtatcttggtgatggacccaacttacgttgaagaagctgttatgtgtgggagaatgactgtgacagtcaatgccaatggcgatatatgcgcaatccaaaaaccaggagaagaaggcgtgaaccagagtgtaatccttcattgcctgcgtcttgcttcttcaagagcttctgcaacaacaaagataattagagatgcagttgaagcatacaaccgtgagaggagctcacagaaggtgaagcggcatcatactttggctaagtctgaagttttgggacctattgtagttgtgtaggaagagacataaataaaacatttgctgtggtcgtcgattgtaaataaagattttagttgtagaaatcttatcagcaacactaagctataaaaacgtcgatatgatcaagacatgttgagactcaaaaaaaaaaaaaaaaa

SEQ ID NO: 418 - DNA, 1517 bp, Arabidopsis thaliana
  Clone ID: ARATH-23APR03-CLUSTER19848_1
attcgttctaaaccctaaaccggagcaaagcgttactgctgtctcttccgtcttcgtcctccgacctctgtctttcttctgatccttcgaaaaagctctcgtgagtcactactcttctctaatgtctgtacatgtcaaggaagaacctgtgcttgttccaaactgcgatgtcgagaatacagagcttgcagttttcaatggaaatggagaaagtgagcttgagaattttgggacttgcgtagatgagataacagatagagtgaatcagcttgagcaaaaagttgtggaggtcgaacacttttactctacaaaagatggagctgctcaaactaacacttctaagagtaactcgggcgggaagaagatcgctatttctcaaccaaacaactcgaagggtaactcagccgggaaagaaaaatcaaagggaaaacatgtttccagccctgaccttatgcgtcaatttgcaacaatgtttcgtcagattgctcaacataaatgggcatggccgttcttggagcctgttgatgttaaaggacttggactacatgattattacaaggttatagagaagccaatggacttgggaacaattaaaaaaaaaatggagagttcggagtatagcaatgtcagggagatatatgccgatgttagactagttttcaagaacgcgatgagatacaatgaagaaaaagaagatgtttatgtgatggctgaatctcttctggagaaatttgaggagaaatggctcctgataatgcctaaacttgtggaggaggaaaagaaacaagtagacgaagaagcggagaagcatgccaataagcagcttacaatggaggctgcacaagcggaaatggctagggatttaagcaacgaactatatgagattgatctgcagctggagaaactccgggaatcagtagttcagagatgcagaaaactgtccactcaagaaaagaaaggactttctgcagctctaggtcgtctctcacctgaggatctgtctaaggcgttaaaaatggtttcagagagcaacccgagtttcccggctggagcaccagaagtcgagcttgacattgatgttcagactgacgttacattgtggagactgaaggtgtttgtgcaagaagcattgaaagcagctaacaaaagctctggaggaacaaacgctcaaaacaataacaatactggaactggagagatcaacaagaacaatgcaaaaagacggagagagatctctgatgcaatcaataaagcttcaattaaaagagctaagaaagcttgaatctctctctatctcttgatgtgtttattgatacagaaggaacaagagtttggtgaacaccaatctaaattagaaactttccagttccattgcgcatgttgcttcaaatgttgagcacaatgtaaaaaagaatgaatgggaaaaaaatctgagctatagaggagaaaaaaaaaaaaaaaaaaaaaaaaaaaaaaaaaaaaaaaaaaaaaaaaaaaaaacaaaaaaaaaaaaaaaa

SEQ ID NO: 419 - DNA, 798 bp, Arabidopsis thaliana
  Clone ID: ARATH-23APR03-CLUSTER19858_1
aggcggcaaaaaggcaacaatcagatgtgggtgggcgtaccggtagcagcagcagtaaccaccgtcggcggccacagaataccggtgttagtggctgcatcaggcaagaggtcgatggcttcgaattcgggttcattcacgacactaaaagaaaccgtatccgtggagaaagagataaagaagagcaagttcatcgcaatcgctggaccaatctcctccgagcaatcagctcaaatgtttctctctcaggtccgtgatcctcgcgcttctcacaattgctgggcttataagatcggtgatcatcaccatcgatgtagcgatgacggcgagccatctggcacagcagggaagcccattcagtctgctattctctcttctggattagacagagttatggttgttgtcattaggtattttgggggaatcaaacttggaactggaggtcttgttagagcatatggtggtgttacatctgattgcctgaaaactgctccttcttgtctggtcaagtccaaagttcaaatgggagttgaggtcacatttgatcttttaggtgttctttacaatcagctgcaatcgtgtcacgctgaagacatcaaggaagactatgatactggtaaagatggtactgcaatggtttctttcaaggttgagtttgaccttgttgataaattagaggatgctatcaaatcaaactgtagacgagaccttgtcttttacaaaacttagggtaaaagcattctcatgtaatcagttacagaataaagcttcttttttttcctttcaaaaaaaaaaaaa

SEQ ID NO: 420 - DNA, 850 bp, Arabidopsis thaliana
  Clone ID: ARATH-23APR03-CLUSTER19868_1
ataaaattcacactatgaaactcgccaaactaattccaaaacgtttcttcatcagatccaaagatcgttccactgtctctaagtcccccacggctttttccttcggatccgcttcctcatcttccggccaagactgtaaaaactccggtggtgatggcggtggcggttccgttaccccgactagcattctcccggaggttccttctccttattcctacgtcgagattctccaagcgtttaagttgatagacagagacaacgacggagctgtctctagacacgatcttgagtcgttacttagccggctaggtcctgatcctttgacggaggaggagatcaacgttatgcttaaagaggtggactgcgacggcgacggtacgatccgtcttgaagagcttgcgagtcgtgtagtctctttagatccggctcgtgactcgactgagctgaaggagactttcgagttctttgacgcggatcgtaacggtttgatctcggctgatgagcttctacgagttttctcgaccatcggagatgaacggtgcacgttagatgattgtaagcgtatgatagcagatgttgatgaggacggtgatggttttgtgtgcttcactgagttctcacgaatgatggatctccagcgttgatcttcccctttcttttttttcaaatttttttttttcttggttttgctaagcccatgaagccccttttgcccctggtctaggggtacgagtatcttttggtttcctgggaattagtgttttttttaagctgaataagccggagttccaaccaagaaaagatgaaattttgagtatgaagtaattaataataaagattctgataaaaa

SEQ ID NO: 421 - DNA, 1074 bp, Arabidopsis thaliana
  Clone ID: ARATH-23APR03-CLUSTER19879_1
gggggtttcagttgttcttccagctttcagttccgtagctgtgtattctctctttcgttaaattcttcgagtttctctcctctggtggtttcagttgttcttccagctttcatattgtagcaatggagattgatagagaagatggaagaacaccaaatcagctgagacctcttgcttgttcccgtaatatccttcatcgtcctcatggctctgctagttggtcacaaggggatacaaaagttctagctgcggtttatggacctaaagcaggaacgaaaaagaacgaaaatgctgagaaggcttgttttgaagtcatatggaagcctaaatccgggcagattggaaaagttgaaaaggagtatgagatgatattgaaaaggacgatacagagtatttgtgttttgactgttaatccaaataccaccacctcagtgataattcaggttgtgcatgatgatggttctcttctaccatgtgcgataaatgcagcatgtgcagcgcttgtcgatgcaggaatccctatgaagcatctggctgttgctatatgctgttgcctggctgagaatggatatctcgtactcgatccaaacaagcttgaagaaaagaaaatgacggcctttgcttatttagtctttccaaatacaactctctctgttcttccggaagggtcatcagtagcggaaggcgagccagtagagcatgggatcatcacatcaattacacatggagtaatgtcagtggacgattatttcctgtgtgtagagaacggccgtgctgctacggctagtttatctgcattttttagaaagaacttccaacaaagttcatccaaggctgggtaaaagcacaaattcataatggtttgcatgagattttgaaacggtttcatattactcctgttgtagctttgatagaatccttgtcgtctatgtgtctaatcaaaaatcaaaagctagtggcctattatctagtatcattagatatgtgaacagatgaacctcgtatctttaatacaaatggtagccatggtcagagctattgattcatcacttgtcttaaaaaaaaaaaaaaaaa

SEQ ID NO: 422 - DNA, 1368 bp, Arabidopsis thaliana
  Clone ID: ARATH-23APR03-CLUSTER19892_1
cttttgatccaagtttggttgcccagaaatatcaaagaaaaaaaaacaaagctttgttgtttctggcagtagaatcattcatggctttctttgcgtgttaaacattcactaacctaaaaactaaaacttcgttttcagcaatcatgagattcaacaagggaactaaagtcgaagtgttgagcaaatcatcggttccatctggcgcctggcggtctgcagagatcatatcaggaaatgggcattactacactgtcatgtatgatcataatgatggtacagagagggtaccgaggaagagtatgaggcctgagcctcctcgtttacaagttcttgatgcttggtgtcctggtgacattcttgaggttttccaaagttgttcgtggaagatggcaatcgtttccaaggttttaggaaacggttgtttcttggttagattacttggttcctcactgaagttcaaggtgactaaatccgatattcgggttagacaatcttggcaagataacgagtggatcatgattggacagggtacatcaagattaagcgcacagacttcaacaggagaactaaggagaaaggtgaatccgaaaggcgactacatttcatctgagagcaaagacaagcttgatgagtctgatgtacctttgtcagtaggtctaaagaaacggacttactctttggttgaacctcacaatcaaactagagctttagctgcttatcctccaaggtttcgtgaagaagtgaaagaagaagaagaagatagagagagtgttgcttcttctgttggtagttgttgcatggatactgatggtctcagtgctgtttcattcaatcccattgaaaccggtaactctagtgacacagagtcatcgtcttgtggctacgggaaggtcaagaagttggtggttccaagaaaaggctcagaggctgctgatgttcataggttagagctggatgcataccgaagcagtatcgagagattgcacgcatccggaccaatcataacatgggaacaagaaacgtggattacaaatctccgtctcaaattgaacatttcgaatgaggaacatctgatgcagataagaaaccttatctctgacgataacagtactatatacagatagcagcagcagcagcattgagaactacagtttgtgttacatagaataaaaactgagtgtagattgtacaaatgtcattttatttttcattcaggttttttgatttaattccaaacttgtgaaagaaaatttgatcatctttactcttctaaaaaaaaaaaaaaaaaaaggaagactagctcgcgatatatgcgcgtggccatggcctaaaagctatacataaaaaaggagatgagaagatttgtgt

SEQ ID NO: 423 - DNA, 1155 bp, Arabidopsis thaliana
  unsure (1)..(1155): unsure at all n locations
  Clone ID: ARATH-23APR03-CLUSTER19920_1
agctnaggananccnncatcnccccggctgcaggaactcggcaccagctccctagtccccccccccccccgaaatcgttctctctcaaatcgcaaaattagggttagggttttcaattccccaaccttgcgaatttctcatttctcgtagccgccgcagcaatcaacgatgacaggcaaagcaaagccaaagaagcacacagcgaaggagctccaagctaaagccgatgcagcgttgaccaatcgcggtggaggaaaggcagggctcgccgatagaaccggtaaggagaaaggtggtcacgcaaagtaattccttcctctatttattttaatacttctttttaactaaagataaataatctcgcatcgaaactccgtagcccaaaaatcgttctctctcaaatcgcaaaattagggttagggttttcaattccccaaccttgcgaatttctcatttctcgtagccgccgcagcaatcaacgatgacaggcaaagcaaagccaaagaagcacacagcgaaggagctccaagctaaagccgatgcagcgttgaccaatcgcggtggaggaaaggcagggctcgccgatagaaccggtaaggagaaaggtggtcacgcaaagtacgagtgtcctcactgcaagatcactgtaccggatctaaagacgatgcagatccatcatgaatcgaagcatccaaagctgacttatgaagagccgaggaatcttcatgaggctttagctgctcctgctgaatcatctaagcctaagcctggaatcagaggaagccttaagaagtgaagtgaagatggtttgggattgtatcgaatttcgatttgaaatttgtggtctttttaatggtgttttgatgtgagaatataaacttgcgttgatgatgctctatgtcttcgtatttttatgttatgatcatataaaaaagtaactgatattttcttattaaatggtttgtttctaacttattaattaaaaaaaaaaaggggggctcgaacaataattccctgggccggngntttacaaccgtncgganctggggaaaacccttggngttcccaanattattcnccttggnntgaantccnctttccncngntgggntataangaaanaagccgnaccnttcgcccttcccacaggtgcgg

SEQ ID NO: 424 - DNA, 4484 bp, Arabidopsis thaliana
  Clone ID: ARATH-23APR03-CLUSTER19926_1
agagagtcgatgtcgtggaactaagttctggtttggttttatgctatgggtgagaaagcgattgacgaagacaaagtagaagcgatgaagagcagcaagacctctcttgttttcgccattaacggacaaagattcgagctcgagctctcttctattgatccttccaccacactcgtcgatttcttgcgcaacaagactcctttcaagagcgtcaagcttggttgtggcgaaggtggttgtggcgcttgtgttgttcttctttcaaagtatgatccattgctcgaaaaagtcgatgaattcacaattagctcgtgtctcacgcttctctgtagcattgatggctgttccatcactacctcagacgggctcggcaacagcagagtcggtttccatgccgtccacgagcgtatcgccggttttcatgccacacaatgcggtttctgtactcctggaatgagcgtttcgatgttttctgctctcttgaacgctgataagtctcatccacctcctcgcagcggtttctcaaatctcacggctgtagaagctgagaaggctgtgtcagggaatctttgccggtgtactggatatagaccgcttgtggatgcttgtaagagttttgcagcggatgtggatatcgaagatctcggattcaatgccttttgcaagaagggagaaaacagagatgaggttttaagaaggttgccatgttatgatcatacatcatctcatgtctgtacatttccggagttcttgaagaaggaaatcaagaacgatatgagtcttcattcaagaaagtatcgatggtcaagcccggttagtgtctcagagcttcaagggttattagaagtcgagaatggtttgtcggttaagttagttgcgggtaacacgagcaccgggtattacaaagaagaaaaagagaggaagtacgaaagatttatcgatatcaggaagattccggagtttactatggtgagaagtgatgagaaaggagttgaattaggagcttgtgtcactatatcgaaagctattgaggttctaagagaggaaaaaaatgtttctgtgttggcgaaaatcgctactcatatggagaaaattgcaaacagattcgtgaggaacacgggaacgataggtggaaacattatgatggctcagagaaaacagtttccttcggatcttgcaaccatacttgttgctgctcaagcaacggtgaagatcatgactagcagctcgagtcaagaacagttcacattggaggagtttctacaacaacctcctcttgatgcaaaatctcttcttttgagcctcgagattccatcttggcactccgcgaagaagaacggttcttcagaagatagtattttgctatttgaaacttacagagcagcgcctcgtcctctaggaaacgcattggcatttctgaatgcggctttctcagctgaagttactgaagcacttgatggcattgttgtaaatgattgccaattagtttttggagcttatgggaccaaacatgcacacagggcaaagaaagtagaagagtttcttacaggaaaagtgatatctgatgaagttttgatggaagctattagcttacttaaagatgagatagtacctgataagggtacttcgaatcccgggtatagatcaagcttggctgttacttttctcttcgagttcttcggatctttaactaaaaaaaacgctaaaacgacaaacggttggctcaatggaggatgcaaagagattggttttgatcagaatgttgaatctttgaaacctgaagctatgctgtcatctgcacaacaaatagttgaaaatcaagagcatagtccggtcgggaaaggcattacaaaggctggagcttgtctccaagcatctggtgaggctgtttatgtagacgacattcctgctccggaaaattgtctatacggcgcatttatttacagtacaatgccgctagcgcgaattaagggtataaggttcaagcaaaacagagttccagaaggagttcttggcattattacttacaaagatattcccaaaggcgggcaaaatatcggtaccaacggtttctttacctcggatcttttgttcgcagaagaagtcactcattgtgcgggtcagataatcgcctttttggttgcagatagtcaaaagcatgcagatattgcagcaaatcttgttgtgatagattacgacaccaaagatttaaaaccacctatactgtccttagaagaagctgtcgaaaactttagccttttcgaggtccctccacctctgcgtggttacccggttggtgatatcaccaagggaatggatgaagctgaacataagattcttggatcaaagataagtttcgggtcacagtacttcttctatatggagacacaaacagctcttgcagtgccggatgaagacaactgtatggtggtttatagctcgactcaaacccctgagtttgtacatcaaaccatcgctggatgtcttggagttcctgagaacaatgtgcgtgtcatcactagaagagttggaggcggattcggtgggaaagccgtgaaatcaatgcctgttgctgcagcttgtgcacttgcagcatccaaaatgcagcgtcctgtgaggacatatgtgaaccgaaaaacggatatgataactaccggaggaagacatccgatgaaagtcacatatagtgttggattcaaatccaatggaaagattactgctttagatgtagaggtgttacttgatgcagggttaaccgaagatataagcccgcttatgccgaagggaatacaaggagcactaatgaagtatgattggggtgctctgtctttcaatgtgaaagtatgcaaaacaaacactgtgagcagaaccgcgctgagagctcctggggatgtacaaggatcatatataggagaagccatcattgaaaaagtagcttcatatctttcagttgatgttgatgagatcaggaaggttaatcttcatacatatgagagcttaaggttgtttcacagtgccaaagctggtgaattttctgagtatacgttaccattgctttgggacagaatcgatgagttctcgggatttaacaagcggaggaaggtggttgaggagtttaatgcatcaaacaagtggagaaagagagggatttcacgtgtgcctgcggtttatgcagtgaacatgcgatcaacaccgggaagagtaagcgttttgggagatgggtcaatagttgtggaggttcaagggattgagataggacaagggctttggacaaaggtgaaacagatggctgcatattcccttggtttgatccagtgcggtactacaagtgatgaactgcttaaaaaaatcagggtcattcaatccgacacactaagtatggtgcaaggctcaatgactgctggtagtacaacctctgaagcgagtagtgaagcggtaaggatttgctgtgatggcttagttgaaaggcttttaccagtcaagaccgctttggtggagcaaacaggaggacctgtgacttgggatagtctcatcagtcaggcttatcagcaatcgataaacatgtccgttagtagcaaatacatgcctgactccactggcgaatacctgaactatggaattgcagcgagcgaggttgaagtaaacgttttgacgggagaaacaacgatcctgcgtacagatattatctatgattgtgggaagagtctcaatcccgctgttgatttaggacagattgaaggagcctttgttcaaggacttggtttcttcatgcttgaagagttcctaatgaactcagacggtctcgtggtaacagacagcacatggacttacaagatcccaacggttgacacaatcccaagacagtttaatgtggagattctcaacagtggacaacacaagaatcgtgttctttcatccaaagcttcgggtgaaccgccattgcttttagcggcttctgttcactgcgcggtacgagcagctgttaaagaagctaggaaacagatcctgtcatggaatagtaataaacaagggactgatatgtacttcgaattgcctgttccagcaacaatgcctattgtgaaggagttttgtggacttgatgttgtcgagaaatacttggaatggaaaatccagcaaaggaaaaatgtttgatagcttgtgtttgtgttttcgatgtgaatgtaaaattgctctgtttttgtttgtggtttgattcgtttgaagcgtttgatagaatgtttgggattgtgatatacttgttgttgtaataagctgcatggcaatggcaatggcaatggcaatggcaatggcggtgttctgcttaggaaaaattatgtcgatggcaatggattgtgatgtaattttccattgttgtaataaaaattatgtctttcctgccatattatatatttaggaaaaaattatttaagaggcttctgtttatatgtataatacgatattattttttcctaaatataatatgg

SEQ ID NO: 425 - DNA, 1908 bp, Arabidopsis thaliana
  Clone ID: ARATH-23APR03-CLUSTER19932_1
ctctcgcgcttttcaaaggcgcgaatttctcaaaagaaacttctatagaaatctcaaacatattcatgcaacgattctgcgtctgttcaccttcaagttatcgtctcaatcccataacatcaatggctactggatccggttcactgatttggttccggaaaggtctccgggttcacgacaacccggctcttgaatacgcctcaaaaggttctgaatttatgtatccggtttttgttatcgacccgcattatatggagtcagacccatctgcgttctctcccggttcgtctcgcgccggggtaaaccggatccggttcttgcttgagagtctcaaggatctcgattctagcctgaagaaacttggttcacggttgcttgtttttaaaggtgaacctggcgaagtactagttcgttgcttgcaagagtggaaggtgaagaggctttgctttgaatatgatacagatccgtattatcaagctttagatgttaaggttaaggattatgcttcttcaactggagttgaggttttctctccagtgagccatactctgttcaatcccgcacacattatagagaaaaacggtgggaagccacctttgagttatcaatcatttctgaaggttgctggggagccctcatgtgctaaatctgaacttgtgatgtcttattcctcacttcctccaattggagatattggaaaccttggcatttcagaagtaccatctcttgaggaacttggctacaaagatgatgaacaagctgattggactccttttagaggtggtgaatcagaagccttaaaaagattgactaaatcaatcagtgataaggcatgggtggcaaactttgagaaaccaaagggtgatccatctgccttcttgaagcctgctactacagttatgtcaccatatttgaaattcggatgcctttcttcgaggtacttttatcaatgccttcaaaatatttataaggatgttaaaaagcatacatcgccgccagtttctctcctggggcagttgttgtggcgagaatttttctataccactgcatttggaactcctaactttgacaaaatgaagggaaaccggatctgcaaacagattccatggaacgaggatcatgctatgttggctgcttggagggacggtaagacaggatacccttggattgatgccatcatggttcagcttctgaaatggggttggatgcaccatctagcgcgtcactgtgtagcctgttttcttactcgtggggatctgttcatacattgggaacaagggcgtgatgtgtttgagagacttctgatcgattcagactgggcaatcaacaatggaaattggatgtggttatcatgttcgtcgttcttttaccagttcaaccgcatctactctcctatatctttcggaaagaagtatgatcctgatgggaagtacattaggcattttctaccggtactgaaagatatgccaaagcagtatatatatgagccatggacagcaccattgagcgttcaaactaaagcaaactgcatagtcgggaaggactacccaaagccgatggtattgcacgattcagcaagcaaggagtgcaagaggaagatgggtgaagcatatgcattgaacaagaagatggatggtaaagtagatgaagaaaatttgagggatttgaggagaaagcttcagaaagatgaacatgaagagtccaaaatcaggaaccaacgaccaaaactcaaataggtagaggattaaaaaccttttctgaaattgatgaagtgtgtattgttacaataattctagctggtatgacttaatcatggttacatttctatttctatgtaaaaaaatctgttatgcatcaatgtgtcatgtaacacttctcttgaggcaaatataaattatttgaattact

SEQ ID NO: 426 - DNA, 2371 bp, Arabidopsis thaliana
  unsure (1)..(2371): unsure at all n locations
  Clone ID: ARATH-23APR03-CLUSTER19942_1
tggagctcgcgcgcctgcgnggcnncactagnggntctgnntatcccctggtcggcaggccgtccgcgccaagatttttagtcatccaaaaggtcgattcgccgatctagaagacgacgacgacgactaccaaacactccgatcaacggtcctccgattctctctcgctttcgtggcgacctcaaaaatgtcgcagcaaatcagcggtaataataatatcccgctgagtgaagtttactggtctctcgttaacaaagccgataagaaattctccaagatcagagacttgcccttctatgaacgctccaggtatgagaactatttcttcaaggtattcaaagtatacacacaactatggaagtttcagcaagagaataggcagaagcttgttgaagctggacttaagagatgggagattggagagatcgcttctcgcattgcccagctttactatggacattatatgcgaacaagtgatgctggttacttatccgagtcctatgtattctacgaagcaatactcactagggagtacttcaaagatggattgtttcaggatctcaatattgcaaacaagcagcttcggtttcttgcaaggtttcttatggtgtgtttggttcttggccgccgtgagatggtgcatcaactcgttgatcagtttaaacggttgattgatgaatgcaagaggacattccaggaaaccgattttaaggaatggaaggtggtggcgcaggaaatagttagatttctgaaatcggacactgcattcatgaacattagacctctaagatacagtcttgtattggatcctaatctggatgctggtactccgcgtgcaagtaggtctttaaggttgacggatgctatcttgagcagttattactgtaacgaggtcaagtattcggagctcacgctcgattcttttaggatgcttcaatgcttagagtgggaaccgagtggttcactatatcaatcaactggtgctaaaatgggtcagaatgctcccgttggagttgctcgtattaactcccagagcatgaatgatcctactttgccacctaaccctcgcaaagctgtcctttatcgtccatccataacacattttttggctgttttggccaccatttgtgaggagcttccttctcatggcattcttttattatatctgtctgcttctggcaagattgaacagatttcatcatctcccttgagtgctagaagtgcaaccagtgttgaggagaatatcttgagagactttgaatctcacacaatcaaacaagagacagaaccatcacttcaaattacgccatctggtcagtctttgaggcaaatcagtgaggacgcagtcagtaccccatgtggtttgtcttttggcagtcatgggctcacaggatcaagctacatatatccctctgatttagttccatttacaaggaaacctcttttcataatcattgacagtgatagcagcacagtttttaaaaatatttgtggagcggagaaaggagaaccagcgcgttacttctgtctccatcacatactcctccgcttatctctgctgatttctctcgtcaacctagtggtagccttttcaccatttttctcacgtcaccagtccaagcgttttgcttgttaagtgagatttccgcctctgatatggaaacggatatttttactaaggccgagaagcttctttcctcgtctatgaacgaatgggcttcgacattggcaacatcagatacccttcaccctgtttggtcacagatactaaaagatcccttcttgagacgactactcctaagattcatattctgccgggctgtcttggcactgtacactccagtcttcaataacaaacaaaatcagccagagtgctgtccgtctctcccagaatcgctattaccaactgctcctgctgttcaatccgctgtgtttcagatggccaatgtatttggtgctacaagtaaatttactatacctcaagatatcacaatgctcgaaagcttctaagaagcttacctctgcgacgataagagcttcggtctgaaatattcttgttcaaatcgggaatctcgatttggtttcccggtaaggtatactattattagatttggagaatgcttcttccatgtcattggagcattatgactgaacatcttttgagattaatggtgcaagatcattttggtgtgaacaaagtaagtgtttgatgcagaacatgtcatcgactctgatgtatcttcattttgaaaaaggattcgttttgggttttgtatattgatcaacttttacagtctaatggaaattcaccatcttctgtaattcgatcgagaaaataagaggttcaccactgttaaaaaaaaaaaaaaaa

SEQ ID NO: 427 - DNA, 1765 bp, Arabidopsis thaliana
  Clone ID: ARATH-23APR03-CLUSTER19945_1
gtaccacctatcttagaaatggagttctcaagctttttgtttactattttactcttttcactgaatatttctcctcttgtttcagctcatggctccaaccatgaagactttcttaagtgtctttcttaccgaatgaacgacaacaccgtcgaacccaaagtcatacacacttccaaagactcttcctttttttccatattggattcttcgatacaaaatccaagattctcggtttccgaaacacctaaaccggtctcaatcatcactcccgttaaagccagtgacgttcaaactgtgatcagatgcgcacagctgcatggaattcatgtaaggactcggagcgccggtcactgctacgaaggtctctcttacattgcgtacaacaaaccattcgctgtcatcgatttaaggaatcttcggtctatatcattagacgttgataaccaggacaggttgggtccaaaccgggagcaacgcctggggaattgtagtaagtgattgggaaaacctcgaaatctcaggctatcttggccggtattgacccgaccgtttgcgtaggcggacaatttaggggtggtggtaattgctcgttgctatggaaatacggtttagctgcggataacataatcgatgcacttgtggttgacgcgagtgggaggattcttgaccgacaagcaatgggcgaggattacttttgggctattcgtggagggggcggatcaagcttcggtgttatactatcgtggaaggttaaattagtcgatgttccatccacaattaccgtgtttaaagtccagaaaacatcgaagacagaggccgttaggatcatcaagaaatggcaatatgctgcagataaggttcctgatgatcttttcattaggacaacattggagagatcaaacaagaacgcagtacacgctttgttcactggactatatattggtccggtgaacaatctattggcgttgatggaagaaaagtttccggaactaggtcttgagaaagaaggttgtgaagagatgagttggattgagtctgtactctggtttgctgatttccctaaaggagaatctcttggtgttctcacgaatcgtgagcgtacatctctatctttcaaaggcaaagatgattttgtccaagaaccgatacccgaggctgcaattcaagagatatggaggcgattagaagcccccgaggctcggcttggaaagatcatattaactccatttggtgggaaaatgagtgaaatggcagagtacgaaacaccattcccacatcgaggagggaatctctatgagattcagtatgtggcttactggagagaagaggaagacaagaacaagacggagacagataaatatctgaaatgggtcgatagctgtttacagaatttgatgactcctgatatgattcgaaatctcaaagaggtagcttatgtcaatttcaaggatatggattggggtatgtattttggaaagaagtagacaaaatacgagagagggaaaagttggggagtgtagaatatctagaacaatttctagagagaggtgtgagtgaagaaaagggtttatccaccagttttcttctgctatgaagagagaagtactctggttatcaaatttgccagaagatattattttaagtatatttttagtcccttttctctgtgaaatcatctgtgcgtgttgaatattatgcgtcaagtgtgtaacttatgtgtgtgaatgtgaattgtgatatgtgtgttgaataaacttttcatgtt

SEQ ID NO: 428 - DNA, 1593 bp, Arabidopsis thaliana
  Clone ID: ARATH-23APR03-CLUSTER1996_1
ggttcataaaatccatggctgaagcttgcagagttaggaggatgaagctaggaagccaaggccttgaggcatctgcaccaggactaggaactacagtaaaaaattcagagctctacaagagtcacctcatagagaagtgaagagacagagatagttgtgacagagagattcatggcggaagcttgcggagtgagaaggatgaagctgggaagccaaggccttgaggtatctgcgcaaggccttggttgcatgggcctctccgctttctacggtgctcccaagccggaaaatgaagccatcgctctcatccaccacgctattcactccggcgttactctccttgacacctccgatatctacggccctgagaccaatgaagttctcctcggaaaggctctcaaggatggggtgagagaaaaagtggaacttgcgaccaaatttggaatcagttatgcagaggggaaaagagaggtcagaggagatcctgaatatgtaagggctgcttgtgaggcaagtttaaagaggctagatattgcctgcatcgatctctattatcagcatcgtgtcgatactcgtgtccctatcgaaatcactatgggagaactgaagaagctggttgaagagggtaaaataaagtacattggtttgtctgaagcctctgcctcaactatcagaagagcacatgctgttcacccaattactgccgtgcagatagaatggtccttgtggacgagagatgtggaagaagaaatcattccgacctgcagggaacttgggattgggattgttgcttacagtcctctaggacgaggtttcttcgcatctggacccaagcttgttgagaacctagaaaaggatgacttcagaaaggctctaccaagattccaagaggaaaacttagaccacaacaagattgtttatgaaaaagtttgtgcaatatcggagaagaaagggtgcactcctggacaactagccctggcatgggttcatcaccagggagatgacgtttgccctatcccaggaaccactaagatcgagaacctcaaacagaacattggagctttgtcagtgaaactcactcctgaagagatgactgagcttgaggccattgcccaaccaggttttgtgaaaggagatagatacagtaacatgataccaactttcaagaacgctgagacaccaccattgtctgcttggaaagccgcttaaaaccggctgaagtttctacggttgtggtggtgcatcatgacattgaagtggtcttaactttctgtcagctagatcagtgtgttggggaataatggtgcgtcttcgagagtagagtatcattcccacggaaacccaagtatcatggttaatgccttgaagaataaataatgtagagttccccaagtgaaaacttcaattttacatttccatacattgtaaccaaactctataaataaagtgttgtgatacataccttaccaaaaaaggctatctatattgtaaaattcatcttctactcaataacttgtgcttctctcacccaaaaaaaaaaaaaaaaaaaaaaaactggttttccgcttgaaacttatacctcaatccaagggg

SEQ ID NO: 429 - DNA, 1885 bp, Arabidopsis thaliana
  Clone ID: ARATH-23APR03-CLUSTER199_1
cctccgggagagtgcgctcttgtccccccccccccccccccagacacacaacacatgaaaatccctgcatcatctcctcaagacacgaccaacaacaacaacaacaacactaacagtaccgatagtaatcacttatcaatggacgaacatgtcatgcgttccatggattgggattctatcatgaaagaatgcgcccgccaccttcttcttctcccacacacaaagaaaaaagacagaaagaaaaaaactttttttcttttcgttaaaggctccacctttctttcttcttaacacacaacacatgaaaatccctgcatcatctcctcaagacacgaccaacaacaacaacaacactaatagtactgatagtaatcacttatcaatggacgaacatgtcatgcgttcaatggattgggattccatcatgaaagaattggagcttgatgacgattctgctcctaactcacttaaaaccggtttcaccacaaccacaacagattctactattttgcctctttacgccgtcgattcaaatctccctggctttcccgatcagattcaaccgtcggatttcgaatcgtcttccgatgtttatcctggtcagaaccaaacaactgggtacggttttaattctcttgatagtgtcgacaatggaggatttgatttcattgaagatctcatccgagtcgtggattgtgttgaatcggacgagttacaactcgctcaggtggttttatcacggcttaatcaacgcttgagatctccggcgggtagaccgttacagagagctgcgttttactttaaggaagctctcggttcgtttttaaccggatcaaaccggaatccaatccggttatcttcttggtccgagattgttcagaggatccgagcgattaaggaatattccgggatttctccgatccctctcttctctcatttcacggcgaatcaagcgatactcgattcgttgagctcgcagtcgtcttctccgtttgttcacgtggtggattttgagattggattcggtggccaatacgcatcgcttatgagagaaatcactgagaaatctgtaagcggtggatttttaagagttacggcagtggtggcggaggagtgcgccgtagagacgcgactagtgaaagaaaacctaactcaattcgcggcggagatgaaaattcgtttccagattgagtttgtgctgatgaagacttttgagatgttatctttcaaagcgattaggtttgttgagggggagaggaccgtcgttttgatttccccggcgatatttcgtcgtctaagtggaatcactgattttgttaacaatttacggagagtatcacctaaggtcgttgtattcgtggatagtgaaggatggacggagatcgccggatctggatcattccggcgagagtttgttagcgctcttgagttctacacgatggtgctggagtcgctcgacgctgcagctcctcccggagatttggtgaagaagatagtggaagcgttcgttctacgaccgaagatctccgctgcggtagaaacggcggctgacaggagacacaccggcgaaatgacttggcgggaagcgttttgcgccgccgggatgaggccgatacagctaagccagttcgccgactttcaagctgagtgtttattggagaaagcgcaagttagaggattccacgtggcgaaacgacaaggagaattggtgctgtgctggcatggaagagcacttgttgccacatcagcttggcggttttagataaaccgggtttggtttaacaatatgatatagaatagaataattgtatttaccgcctttaatatctcttttctttttgctgtttatctttcaaataaagaaataaaaatatttcttacgaag

SEQ ID NO: 430 - DNA, 1285 bp, Arabidopsis thaliana
  Clone ID: ARATH-23APR03-CLUSTER20054_1
atgatgatagcaaggtgttctctttttccgccgccgtgtttctccgccgtgaggattagatgtttcgccggagaaacttcagatactgggattctattccgggagaagcttatttaccttcaagaccttaacgtagatcctcacaaagctctccgagtaaacccatctctccgttctgctccaatctcctccgtcgtctccgtcgagactctactctcttccaccggactctcaagacccgccgttggtcgtatcctcgacatgtttccagatttgttaacttctgatcctgaatctgaaatcttaccagttcttcgcttcttatccaatgagatttcaatttcagagcaagacatacctaaatcgatctctcgttgtcctcgattgctaatttcatctgtagattatcagcttcgtcctgcattaacgttcctcaaaaccctaggattcgtgggtcgcgacacgattacgtcacggaacacggtgttgcttgtatcgaatgtggaacgaaccctaatccccaaaattgagtatcttgaagaagggttagggtttacaagagaagaagtagcgaagatggttgtgagatctccggcgttgttgacttatagtgttgataacaatttagttcctaaagttgagttttttattgaggagatgcgtggagatgttaaggagctgaaacgtttccctcagtatttttcgtttagcttggagaggaagataaagccaaggcatagattgcttaaggaacatgggattttgatgcctttgtctgagatgttgaaggttagtgatggtcagtttaaccattggcttttagaacttcgtcttaggtctgctgaaagaagatgatgataaacaacaacgttctttttgatgttctttttacttgagatttgggacatgtcaagacacttcacatgagttttgtatatagtttctgtttcaatgattaggctgagtacatgtttcgttagatcatgtaatgtgtaacttgagatcgtgaaagaagatgatgatcaacaacaacaatgtaagctttttgatgttctttgttcttggtacttgagatttgagagatgaaaattgcagaagttttgtactttgggacatgctaagacactttcatatgagcttgtatatagttttttgtttcaatatgttagatcatgaaggtgtaattaagaatctagttttttttttttggtaaggtaattaagaatctagttgatgaggaatgaaagttgctttaaggtaaaaaaaaaaaaaaaaaaaaaaaaaa

SEQ ID NO: 431 - DNA, 1519 bp, Arabidopsis thaliana
  Clone ID: ARATH-23APR03-CLUSTER2012_1
gggaaccggtgccgatcttgaggcttggggctacagaagttgagaaaaggaagaagaagcaatttcaatggagaagagaggggtgatcgacacatggattgataagcaccgttcgatctatacggcgtctacacgtcaagcacatgtcgtcttaatacgtgtcagatccgttcatttcaagtccttcggtacttggttggggcaagattatctgttcgtgaggaggtttgtgccgtttgtagcgagtgtgttgatcagagcttgcaaagattccggcgagagttccgatatggaagtggtgcttggtggtatagcatcgttgaatgatgaaatagaatggtttaaaagagaaggatcgaaatgggatgttgatttctcgaccgttgtgcctcaaagagctaatcaagaatatggcaggtttttggaagatctgatgagcagtgaggtgaagtatccggtgattatgacagctttctgggcgattgaagcagtgtacagaatgttatttcctcattgtttagaagacgggatactcatcttagctgaatctcttgagagagaattaggttccaaaaccaaaactgaatcacagtattgttcgtctgtcaagaacattgccgaacgttgtctggagaatgcctccggtgaggtgctcggtgaagctgaagatgtacttgtacgagttcttgaactagaggttgccttctgggagatgagccgtggaggacagtagctaatgtttgggtttgaatttctcatttcctctaaatgccaaagagaaacaagttccaatctttatgtttggtgaaacacaagttgagattatggtttcataacagattacatgaatacggatttgtctctgactggggcagaaggttgttcccgtcattccacatattacacttactggtaactacatcaactcctaaaactcttaagaactcaccaattgaaaccgaaaagctctttattctctccagcgatgaccacaattcgggttgcaacagacaaagaacagtgtcattccttcttcacctctagccgtagcctgcacattcaatgatagctacattaaatcctcaagcggtgtacagaatttgagcataatgttttggggaagcaaacagtgaagatacagcataaccaagtagttaaataaataatggagcttaagagagttatacctggaagaaaacggcctccctatgctgacacttagagcaacgcacagccttggttcggggaagagtagggtcagaagccacgtctgttaagatctgagttcgctcacttacagagtgatgaacctcgtttctgtacacacagctgttatcagctacctcctgcaagtcagtgccacaaaaagtataaattctgagatgaggacaacaaacccatttacatgatctaatctaatctgtcaatttgtaacaacaagattgataatgcagcttaaaaaattgcaaataactactcagtttgtgtaaatcaataagctaaaagaggcccttcaagc

SEQ ID NO: 432 - DNA, 891 bp, Arabidopsis thaliana
  Clone ID: ARATH-23APR03-CLUSTER20266_1
gcgcggggagatgacgaactggcgtgcgggtgcgcgcgcttgcccggcggggggcctcgcgcagggaccgccaatgacccatcccctacgaccgcagacccgcgcttggcaggacccagcccatcgctacctggaaccgcgatgactcaaatagatgaagaaatggcgagcttaagcacgagcttgctcggaataagacgagggtcaagtaacaagaacaaggcagaagataagaccaaaaacgcagtgttttgcaagaagcatccaaagcatagacaatcacctggtgtttgttctctttgtcttaacgagaggctctctctttttatcaaagcagcttcttcacgtagaccaagatctcgtcaaatcttgtctacttcttcctcaactacttcctctctttcatctgacggttcttcttctgtctcttcttgtccttctcctattgttgatcgccgacgatacttgttaatgtccggaggcagcggtagaggagagaaagtgatttcgtggatgacgaaaagccgatccgtagcttataaagtggatgatgagaaaagaaggaagaagaagacaaagacgaatagtggtttcttttttggtttggtaatgggcacaaagaagagacaataagatagtcagtcttgtagatttgttagattagattgttcttgattgtgtattttcttgattctttcattttagattgattgctacatatagatgactagatcagtttggtgggtacgtgcaagtgagagagattctttatacgtattcttgtgattgattccctaagcttgtagtttagtgtggtaacataaaatgtgataatccagatttaatatgcgttgaacatacaaaaaaaaaaaaaaaatcaagagatttgcg

SEQ ID NO: 433 - DNA, 1195 bp, Arabidopsis thaliana
  Clone ID: ARATH-23APR03-CLUSTER20285_1
atcataataatcatagaattttcaacttttaagctctagatagagagatagagagagacaaagtaacaaagagaaagagagagaaatatggaagagacaaaatcgagattcaagaggatctgtgtcttctgtggaagcagttccggcaaaaaaccttcataccaagaagctgccattcaattgggtaacgagttggtggagagaaggattgatttggtatacggaggtggtagcgtggggcttatgggtctcgtctctcaagctgttcatcatggtggtcgccatgttctaggggtcattccaaaaaccttgatgccaagagagataactggtgagaccatcggagaagttaaagccgtggccgatatgcatcaaaggaaagctgaaatggctcgccaagccgacgcattcattgcccttcctggtgggtatggtacgttagaagaattgctggaagtcattacatgggctcaactcggtatccaccgtaagccggtgggtcttcttaacgtggatggttactacaactcgctgttaacgtttattgataaggctgtggacgaaggatttatatccccaatggctcgtcgaatcatcgtctcagctccaaacgctaaagagttggttcgacaactcgaggaatatgaaccggagtttgatgagataacatcaaaattggtttgggatgaagtggaccggataagttatgtaccgggttcggaggtagctaccgctacgtaaggatgtattatggggagtttattttttggtaaaagcagtgtacagcggaaattaagttgtttaacatcagaaggtaagggcggaaagaagacaaaagaaagtattggggtcgttttgataaacattattttgtaggggtggtttaaatgtgtgaagtggataaaccatgtgggtaactgctaaccgcgtatataccaaaccctatcactccccacttgtctttgtacattttggtttaatggaaaaaaaggatagggctattttcaagaaatgacaaaacgatccttttcttttggttattttctgattttatccataacttctagtttttaacttttttctcgtgtcaaaggtatcagatttttatttaaccagaaaattatcatgtacgatattttttaattaatccgagtggagaatattccgagtaataccacaaaaaaaaaaaaaaaaa

SEQ ID NO: 434 - DNA, 772 bp, Arabidopsis thaliana
  Clone ID: ARATH-23APR03-CLUSTER203195_1
aaaagattgtgaagatatatcatggagagagtgtgttgcatgtgcggtgatgtcggtttctccgacaagctcttcagctgcggtcactgccgctgccgcttccaacactcttattgtagcaactactacggccagtttgcggagcctaccgagatttgcgactggtgccgcagcgacgaccggaagctgagcaacgttgctagacatggcggttcttcttcaaagaagccttcttcttcggttaaatatgaaaatgacttctcaaacagatcggaatattcgcccggccaccggatcaagcataacaataaccgtcacgatcaagtagccaagggcgttgctggagatggaggcggagttacgtcgcctaagacggccacacgaaggtacaagcttctcaaagatgtcatgtgttagttccacctaaacgagaggtattagaagacttactataatcatactactctttcgagactgtgtgattaaattatgtataattagccactacggagagagcaaattaaaaaagaaaacgtcgttgtttgttttcatcctttttctcctttttacttttgtgtttatatatatggaatgtgtgtttggcgtgagcttgtgttttcttaatcaccatataagctattaataactgcaatttgcgtaaaagactcctttttctttaaaacctttcgtaaagatctttattaaacttaacatccacgtatatatactggttcctttaggttttcgtcgtaaataccattaataatgcgag

SEQ ID NO: 435 - DNA, 1523 bp, Arabidopsis thaliana
  Clone ID: ARATH-23APR03-CLUSTER2031_1
atttgaatttccggaaaagaaaaaaaaacaaacacaaaacacgcttctcgcaaaacaacactaaacctgaaacaaacgtaaatccgccgcaacaacccagttttttccgacggcgtacaagcttcctccgccgtaacgccgtcgtttaataccagtaagcttgattaggtttccgtagtgtgtgatttttttaaggttctgaacactgatgtcaaacccattgaaagagtcaagagaggatattgcaaattctactcctcacatgagggataatgagtatgttcggctagttgtggctcatgaagcctccccagctgaaaccgtgttgtctctatcgcaatcagaggtgcagagtaagaaatttatgtggtggttaaaagctttgggaatatgtgcagttgctctcttgcttacgcttgttttcggaaaatggggagttccgtttgtgtttcaaaaggttcttattccaattttgcaatgggaagcaactgcgtttggccgtcctatgctcgcgattgtccttgttgtttccttggctttgtttcctgtgttcttgataccttctggtccttccatgtggttagctgggatgatttttggttatggtctcggttttgttattatcatggttggaaccaccattggcatggttctcccttacttaatcgggcttatgttccgtgatcgcctccatcaatggttaaaaagatggcctcgtcaagctgctgttctaagactagctgcagaaggaagctggttccatcaattcagagtcgtggcaatctttcgggtttccccatttccttacacgatttttaactacgcaatcgtcgtgacaagcatgagattctggccttacttcttcggatccatagcaggaatgataccagaagctttcatctacatttacagcggtcggttaatcagaacattcgcagatgtgcaatacggacatcaacgtttgacaacagtggagattgtgtacaatgtaatctccttagtcattgcggttgtgaccactgttgctttcactgtgtacgcgaaaagagctttgagagagcttcaaaacgcagaagctaatgaagatgaagaagttcaagtaagaaaagtgagattcgagatgaagaacgtagttcagcacgaagaagataatcatcagcgtttgccttagccgaaagttgacacaaagctaagataggtttgtataaagctttgaacgttgacatgttcttcagcaggatttagagtaaataacaaaaggggtaaaaaaagtctgatatagtaggaagactaagactagtcaagattggatttatattagtgtgactgattccaattattgaaacaaataaaagaagcatttaggctaaaatagtgtatgaaaatatggatgctcatgctctctttgatctagtagtgtatattttaaccaacggttgtccaggagtttttaaatttgctttttaggcattacttaaaccccatttgtccaattcaaaaaacaattgattattcatttccct

SEQ ID NO: 436 - DNA, 1493 bp, Arabidopsis thaliana
  Clone ID: ARATH-23APR03-CLUSTER20340_1
acaattctttgcatcatcatcattcatcatggattcttcttaccttagaatctctctttcttttctcttctgggctttactactctcaccggctgtgtcacagtcatcttcttgttcgtcacagacattttccggcgtcaaatcttaccctcactgtctcgacctccctgatcttaaagccattctccattactcttatgacgcatcgaacacaactctcgccgttgttttctctgctccaccgtcaaaacctggtggttggatcgcttgggctattaaccctaaatccaccggcatggctggatctcaagccctcgttgcctctaaggaccctagcaccggcgttgcttccgtgacgacccttaacatcgtctcttacagctctctggttccctcgaaactgtcctttgacgtgtgggatgttaaggcggaggaggcggctaatgacggtggagctttacgaatctttgcgaaagtgaaggttccggcggatttagcggcgagtgggaaggttaaccaggtttggcaggttggtccgggagtgtctaatgggaggatacaggctcatgatttcagcggtcccaatcttaactcagtgggatcactcgatttaaccgggaccacccccggagtccctgtctccggaggtggtggtgccggtaattctagaatccacaagagaaatatccatggaatattgaacgcagtgagttggggacttctatttcccattggagcaatgatagctaggtatatgagaatctttgaatcagcagatcctgcttggttttacctccacgtgtcatgccaattctctgcttatgtcatcggtgttgccggatgggccaccggactcaagcttggttcagaatctaaaggtattcagtacaacactcaccggaacatcggcatctgtctcttctctatagccactcttcagatgtttgcgatgctgttgcggccaaggaaggaccacaagtttagattcgtttggaatatttaccaccacggagttggatactctatcctcatccttggaatcatcaatgttttcaaaggtcttagcatcttgaatccaaagcatacttacaagacggcttatatcgctgtgattgggaccttaggaggcatcacgttactcttggaagttgttacttgggtcattgtcctcaagagaaaatctgccaagtctacaaagcctctcaaggcctaatggtgttggtaattcaaaggatttgtattgttttattttcttttttttttgaagttagaaattgcattgtctttctccacaaattatgattcatctcttgacgttgcttgttttgaggatgatgattatgacttgtgtgttttatgtatagtaggagaaacacatatatgtcttagtgtttgttctttgtagctctgccttttatttcgtgtgtttttgtggttcagaatacttgtagggaattataaactaatttttcaatctaaaaaaaaaaaaaaaa

SEQ ID NO: 437 - DNA, 1147 bp, Arabidopsis thaliana
  Clone ID: ARATH-23APR03-CLUSTER20345_1
acttcgacttcatttctctctctctctctctctcatagaaaaggaagagatagaagatgccgaggccagggccaagaccgtacgactgtatcagaagagcttggcatagtgacagacaccaacccatgaggggtttgctcatccaagagattttcaggattgtttgtgagattcacagccaatccaccaggaaaaacacagaatggcaagagaagctccctgttgttgtcttgagagctgaagaaatcatgtattccaaagccaattcttaggctgagtatatggacatgaagacccttttagaccgtacaaacgacgccatcaacacaatcatacgacttgatgagaccaccgaaacaggggaatttcttcagccttgtattgaagctgcattgcatttggggtgcacaccaaggagagcttcaaggagccaacggaacattaacccgagatgttatcttagccaagactcaactaacttggacaacatgttgtcccaagtattcatgaaaccaaacaactttgctccaaagaatcttgcagtagcacaagagaattgccctgtctccaagtactctgcctaccctttatgctattcattccggccaatcagtgactcgtgtaagtccaagaacagtagaccggcgagtctcattgacgcaacaaatggcattacctttggtgggtgtgaatgtgatctatctctgcgcttaggtcctcttggacctcctactcaaaaacgaagtaagataagcagcaacaataacaactgaaaaggagagcaagattgggttttgattagcaagtgtaggttatctatctctgctcttaggtcctctttgacatcctactcaaaaaccaattaatttaagtagctaaactaacaaatgaaaaggagagcaagattgggttttgattagcaagtcttgtgttagaagaatgtgtgcttagttaggccttttagtctcctctctagaccctaggtttaggtttgtgaacatgtaaatagagagacgaagtaacaaaacaggagatgaagtcgttttcttctacctgcatcaatctcgaatcatcagacttcacgaatgtatttttacattgcaacactgttcgagaaatatccattccacaaaaaaaaaaaaaaaaa

SEQ ID NO: 438 - DNA, 966 bp, Arabidopsis thaliana
  Clone ID: ARATH-23APR03-CLUSTER203465_1
agggccaatcacggatttgtcttccaaggtatataaaaacaacctaaatgcttgttttttgcttcccatttcgctttccccttttttgagcccttctgtccaaagatatctctctctatttatgtgacagtcacttcaccaacatcatggatgttctgctcagtttattcttgggtttggttggtcagttgtttatgttaaacaggaagctgtagggacataggtttcagtatgggtggaaatggcattagagctttggttggagtgattgcatctttgggtttgattgtgtttcttcttgtcggtatcttagcaaactctgcaccaagtgttccatcatcagaaaatgtcaagactttgcggtttagtggtaaggatgtgaatctgtttcatgtaagcaagcgaaaagttcctaatggacctgatcctatccacaacaggaaagcagaaacttcgagacggccaccaagagtatgatattgactgtaatgtttatgtcatgcgggcttcgttcattttcgggtttttctaccgtctcaagacacagtgaagtattcaacctctcaattacgtttccacgtcaagaagctactattttttctgaggcaatcattaacttcagatgttagagatatgctatgaactcatagctttgtgaagtcttgctctgtagaattttggaaggtgaagtctctgctctctctttcgttttggaacattgtgtctaaagattgaaaatcattcagaagattgttgctaagatattaaagacttcttaagagtttttgtaataacatttgtatttagtcattaaaggcttatgtctttatctaactctctgtttcctgttttcctcatctttctttatttgccttttgttttagaatctgttaactttaaagtttgcttttttatgtttcctctggctaaagcaaaaaacccttaaactaaagttgctcccttttc

SEQ ID NO: 439 - DNA, 1668 bp, Arabidopsis thaliana
  Clone ID: ARATH-23APR03-CLUSTER20377_1
gacatcgtcttctttgctgcttctagggttcgactattggttctctaacattgtcgttatgatgtccaacggtggtgattcgtcggaaattgtccgggaactggaagagttaaagctcaagaaggcagaaatagagcaccgtatttcgaccctcgaagctaagctccaggatacggcggcagttgaactgtacgacgccgtatccaacggtgactcttatctgacggcaccggagcttgaacatgggttatctccagatcagatttaccgttatagtcgtcaactgttacttccttcgtttgctgttgaagggcagtcaaatcttttgaagtcttcggtattagttattggagcaggaggactaggttcacctgccttattgtatcttgcagcatgtggtgttggtcagttgggtattatcgatcatgatgttgtagagctcaacaatatgcataggcagattatacacacagaagcatttattggacatcccaaagtgaaatctgctgctgctgcttgtcgctcgataaattcaacgatcaaagttgatgaatatgtggaagctcttcgcacttccaatgctttggaaatcctcagccaatatgatatcatagtcgatgcgactgataatcctccaagccgttacatgatcagtgattgttgtgtcttgttaggaaagcctttggtgtcgggtgctgcgcttggtatggaagggcagcttacggtttataatcataacggaggcccgtgttaccggtgtctttttcccactcctccacctacctcagcgtgccaaagatgttctgatagtggagttcttggagtagtgccaggtgttattggttgtctacaagcgctagagacaattaaactcgcaagcctggtgggagaaccactctctgaacggatgcttctttttgatgctttatcagcaaggatgcgcattgtcaagatcagaggcaggtcatcacagtgcaccgtgtgtggagacaattcatctttcaataagcaaacttttaaagattttgactatgaggacttcactcaatttcctttatttgcgggcccattgaacctgcttcctgcagaatcaagaattagcagcaaggagttcaaagaaattcttcaaaagaaggaacaacatgttctgctcgatgttcgaccttcacatcactataagattgtctctctcccggattcactcaacatccctcttgcaaacttagagactcggttaaacgagcttacttcagctcttaaagaaaagggaaatggccatgcgaacactgaatcttgcacaaatcctagtgtcttcgttgtatgcagacgcgggaatgattcacaaagagctgttcaatatcttcgtgagtcgggttttgattcggctaaggatataattggaggactggaagcttgggcagccaatgtcaaccccaacttccccacctactagagggaaacttttttgaaccaacttggttaaatccatagctcaagatgtttggagcagaaacatgtattattagttatgtcatgtaacaaaaccttatcaaatccatgttgaaacctgtctgaatcagagtgagttttagatgttatgataccatgtactcgtttgattcatatcattcatagattactgaaaaaaaaaaaaaaaacggccgccgc

SEQ ID NO: 440 - DNA, 541 bp, Arabidopsis thaliana
  Clone ID: ARATH-23APR03-CLUSTER203804_1
atatattgaatttgtgggagactttgatcgacaacttattttaagcaatggctacaaaagcatcaaatttagttgtttttcttctctctttgcttcttctgttcttattgatatcctttcaagttggagtcgccgacgccacacgcaacaaacgtcaaggacaagaacagcgtgtggattatgattaccctcgccctcccaccgcccctatatatctgccgccctctaaatcgcgcaaaggaaaaggtccataagccaaagtactttttgacaagtgatggagaagaaactataattgtcaagactcaagagactcgagattaatgttgtattgtgatttcatataattacgttttcggatcatatcactttttaagatattttaacggtatttggttatatatatatgttgtcggttctagtggtttggccatgtatttatcatagctaattttccactactttcagtggctaaatcaccattgcagttgaaagttataaatctgttgccaattaacccaaaaaaaaaaaaaaaaaaaaa

SEQ ID NO: 441 - DNA, 1286 bp, Arabidopsis thaliana
  Clone ID: ARATH-23APR03-CLUSTER20385_1
taatctcttcacaatcccaaaaaatctcacaatcgttttttgcttatctctttcaatggacacctctctctcccaccacggatctctcccgtttcccccatcgcgccgcaatttcgttaaacaaaaccgcggcggcgattgcgtttttctcccctcgcgtcgtaagttccgatacgattcgttggtggtggtttccgctgcgtcttcgggacagagcatcgacgcgcctctagttccacggtcgcctcagggaaggtttctaagttccgtcttggtgaaaaaacggcagctctttcatttcgccgtcgctgatttgcttaaacagctcgctgatgataaggaagcttccttatctcgtatgttccttagttatggttccgatgaagcttccctccacagaaggatagctcaacttaaggagagtgattgccaaattgcaattgaagacataatgtacatgttgatcttgtacaaattctcagagataagagtgcctcttgttccaaagcttcccagttgcatttacaacggaagactcgagatctcgccttcgaaagactgggaacttgagtcaatccatagctttgacgttcttgaactcatcaaagaacatagtaacgcagtcatcagtttaagagtgaattcgagtttgactgacgattgtgcgacaacggagatagataagaatcgtctcagtaaagtatacacagcttcggtcttatatggatactttttaaaatctgcttctcttagacaccaactcgaatgctcattatcacaacaccatggaagtttcactaagcaactgaggcattacatttctgagttcgatcccaagatattgcggagatgcgcaaaaccaaggtcacatgaagcaaaaagcctgatagaaaagcagagtttagctctttttggtcctgaggaaagcagcaaagagagcattgtgacatcgttttctagcctgaagaggttgcttcttgaggctgtggcgtttggtacgtttctatgggacacagaggagtatgtagatggcgcgtttaagctcaaggagaatgagaatgcagaggaagaaacaaatagcagtgtttgaagtatgtatgaaccagtttgctagaagaaaacttgaatatcttttttggtggacattgcatataatatatagattaaatcagggtcaatggctatatgaaattatttttgtctatagtttgagtaatcatatgtatagtgtataatggatgatttaatagagagattggttttgtcaaataaaaaaaaaaaaaaaa

SEQ ID NO: 442 - DNA, 1739 bp, Arabidopsis thaliana
  Clone ID: ARATH-23APR03-CLUSTER20405_1
tcactagtcccccccccccccggacagtctctttccctcgtcttcaagtatttttttgttttctgttattttcgcctgagactgggtccctgagatttcacaaaactcgttattgaaacttaacaaaacagcaacctccgttattaaagttcccttctcgatttccgtgaaaatttcactttagccatggaacctcctagtagcgtagtcgacgatgctgagttttggcttccgacggagtttctcactgacgatgattttctcgttgagaaggagaataacagtgtaggaatcgatgactccttgttcccgtacgagcctcgtcatggatttgggacttttggctctaccgttaagcctaacacggtgaaggaagatgacgaggagagtttcttagccggattgactcggcagatggttatgtcatctctcaaagatgatttctccggtggagtttgcggtaatcacgcttttccggccggtaatgaccacaaggcgtgggaaatgaatcgttcgcctccgtgtgtcgccggaactggctgttgttgcttgaatcagcggtttaaccagaaccttaattcgcgagtttcttcatgggatctgtactgtgctgcggagaggatgagtatcaacgacgaaccataccatagtggcagaggacttctcggatctcccgcaaaactttccgctaccgtcaaaaaccactctaacaacggcaccggttactacaacaatcatcaatctctccaataccagaagctacaagctatccagtttcagcagctaaagcagcaacagttaatgaaacatcgtcgccaattggtgcgtcagaacagaggagtaagagttaatggcaacaaaaatgttggtccagtggatttgtcgtcttctgcatggtctaatcagtttccgaggcgtgatgttatgagagctgtattcatcggggaccataccggaaaacgtggctcaaccggaaccggtgtcttcttacctcgaagtgttaaccatacttcaagaactgagactcgagagaagcctactatatcgacggttttggttccggctagactggctcaggtcctgaatctgaatttaggcgaaccggtccggtctacggctactctcaacgatgtgtcgtggagacagaggagcaacaatggtgggttctcgagccagatggtcggtggcgtgagggcggagcagtcagtgcaagagcctcggttaccatcggagtgggcttattgactgattttatgttcgtaacttttgggtgtgtttagggggaagattttatgatgggtttggtttgaagaaagattagagttgatgacaggtagtgaaatagtggaaaaaaggttagggttaatgtagagatagtggaagatttggaagaagaataaagaaagttggaagtgtggagaggacgaggttttggatcgtttaaccaccattgatggcttgatagatgaagaaaagagctttgagacagacagagataggtgactctcttttctttttttttgggtttttcttttttacttttttactgggaaatgaaatgtcagtctgtcacggggctgttcctttagtgtcatccctctctgcctctcttttgttcacacaactcttaagcaatggataagtaagtaattagtaaaagaaaagtttgttaaaaaaaaaaaaaaaaaaaaaaactttttttattataaattttttaattatttttttcaccatttttt

SEQ ID NO: 443 - DNA, 1514 bp, Arabidopsis thaliana
  Clone ID: ARATH-23APR03-CLUSTER20417_1
ggtggaagtacgagattcactggatttgatggctcgtcggctgtttctcctcctcctcgccgtcacggcagggttgagcttgacgggaacaaccgtcagagcagttggcataaattgggggacagaagcgtcgcaccctcttccgccttcaaaggttgtagagcttctgaaatcaaacggcattgtcaaagtgaagctcttcgatgccgacccaaaagttctccgagctctctctggttctaatattggtgtcactatcggaatccaaaattcgatgctcaagagcttgaatgcatccgtaaaggtagcagagagctgggtacatgacaatgtcactcgttacttcaacggtggaaacagagttcgaatcgagtatgtagcagttggagaagagccatttctccagagctatggcaatcagtataagccttttgtgattggggcagctatgaatatccaaaatgctttagttaaggcgaacttggcaaatgaagtgaaggttgtagtcccctcaagctttgattcctttctttctgaatctggtcgaccttcttcaggacactttagggctgacctcaacaagacgatgattgaactcctctcctttctcacaaagcaccactctcctttttttgtgacaatctctcctttcctaagctttcaccagaacaagaacatctcccttgactttagcctctttaaagaaacagcaaaggctcacaaagacggacgtaaaacctacagaaacagctttgatctaagctatgacacacttgtctctgcattgttcacaattgggttttcggaggtggatatcgttgtgtcaaagatcggttggcctacagatggagcagaaaatgcaacatcactgactgctgaggcgttctttaaaggactgatagttcacttggagaaaaagacggcctctctcccgcgtcctcctgttgaaacctacattgaaagtctcttggacgaagatcagagaaacttatctgctgggaactttgagaggcactggggagtgttcactttcgacggtcaagccaaatacaatttcagtttcaaccataagaatcaggtaaacgcgcagaatgttcagtaccttcctcctaagtggtgtgtggtgaacaataacaaggacttgtcaaacgcgtcagcaagagcattagaagcgtgtgctgttgcggactgtacatcgatacttcctggcgggtcgtgttcaggcatcagatggccaggcaacgtttcatacgcgttcaatagcttgtaccagcaaaatgatcacagtgcagaaagctgcaactttggtggacttggtttgatcactactgttgatccttctgaggataattgccggttctcgattcaacttgacacttctcattcatcttcgcaaactccaaatttctttcagagctggcctctcctcttattgttcctactgtccggactcttttaaagttgtagttatagcaaaattttggtggattttgcctccaaaaaaaaaaaaaaaa

SEQ ID NO: 444 - DNA, 894 bp, Arabidopsis thaliana
  Clone ID: ARATH-23APR03-CLUSTER20428_1
aaaatttgcagacataaccctaacttggtctcttactctaacccgcgagataatggctcctccacaaaatctcttccttgtcgctattgccttcgccgtcattttcacggcctccatcgtacatggtcgtcataatggtgcagaagatattgtgcattcatcctgcgaacacgcgagctatccatcactatgcgtccgtactctttcgtcatactccggtccaaccatcaccaaccgccgcgatctagctcaagccgccataaaaatcagcctctcccacgctcaaagcgccgcgaagaaactcgcggtggtgcgagactcggtggggaagaagaagcaagagaaagcggcgcttgtagactgtgtggagatgattggagactcggtggacgagctaagccgtacgctcggcgttttgaagcacctccgtgtctctggcggttcagctaaagagttccggtggcagatgagcaatgcacagacgtgggctagcgcggcacttacggatgacgacacgtgtctcgacgggtttcaagggatggacgacggtgaaatcaaaacggaggtgaagcagtggatgacgaaagtggccagggttacgagcaacgcgctttacatggtcaaccagctagatgagacacgtggcaaaccccacgacgtacatctttgatgttaatgcactagatcgttttaatggacggtctttattgtgtgtgttggtttttcgttcatgtgttttaagtgtgagattatctatcgctacgatatatagaaatgagtttttgattatggataatgtcgtttttcgtagttctgattatggtctaataaataacatgttattttatcctctatgtcagtatacggtgttatggatccgttgagattcgattg

SEQ ID NO: 445 - DNA, 1630 bp, Arabidopsis thaliana
  Clone ID: ARATH-23APR03-CLUSTER20431_1
ggttcccgttttctctgaaatattccctttcgatacatatatatttgagtctcttcctccaaatctgaaccgtttatacctctgattccaccgcttgttgcttattcatcggaatttctgttccttttgtgccaaatgctcaagaaatcgaaaagtattgtgtaattttcgttgttgattttgactcgataagaagacattagggtgagaattgagttttatcgaacaagatggatttcgtgaacaatcttgataccgacacgtcgctatcaattctctcttgtctagatgatccatcagatattgtccgtgccagtgctgtctcacgctcctggcgacaatttgtggttaagtatagtctctccaagaatctatgcttgaagttgttccatcagctatctaatgtggatcatataattgaaacaagtaatgatagaaatggagagtcatctgaagctgggtcaagcagtctcatggatacaaggctacttgaaaaagagcaccgggcttttgccttgttggctagagggtgcatgtcttcacctattgaaagctgtatagctgatgccattagagcttccagtactgataattacccagtagaaagcatcttaaacacactcgagaagagagatcggattggtcgaaccccttcttattggtcgagtactgggcaacacaaaactacggtgcccgaatcacttctttacaagttgattggtgatttgtgtctcattactgaagtcagcatccatcctttccaagcttattttcagcgcggtcatccgatatactcttcacattatgttcgtttccggttgggtcacgaaaaggacaattcacctcactacaacaattcacaggataaaaaaggtgagccaggaaagagttcaattgaaagcaactatgtatggacttacacttcacaagagttttcgatggctcaggaaaatcgattgcagagctttcagcttccagaacctgttctttgcattggtgggtatctgctagtcgagtttctaggtcgagttcagacacaagaaatggatggccaatactatatatgcgtgtcacatgtcaaagtggagggaagatctctagcaaaatcatttcgagttgagaatgtggatgacaatggaaagtttggattgaaggtgttgagttacaatgatccgaaaaaaatggaggagatggatgcagaggccgggcaggacatggatgcagaggcgggccaaagtcagctgagaaaccttgaacagctcttgaatttgttgcacaggcatcctctcgatgttgtcgactatgtttggcctgatgagtcagacgacgagtatgctgaatcagaagatgaggctgagccttagtcactgaattactactattcccagttatttcttctttttggttttaattttaaagaatctttaggtgttttttgtcatcttttgtgagcgtttttaaaagcttgtactccagccatcgttgttaaacattgtgtgtgttacagaccttaacagaaagttaacagccattttgggctctctcttaaaaaaaaaagattccagagaatcaaagcagtctttcgaacaaaaaaaaaaaaaaaaaaaaaagccaaaaaaaaaaaaaaaaa

SEQ ID NO: 446 - DNA, 826 bp, Arabidopsis thaliana
  Clone ID: ARATH-23APR03-CLUSTER20443_1
gaccctaatttcacaaagtctctcaataaccatgtgtgctccgcagccctccaacgagtttccgctgataccctaatttcacaaagtctctcaataaccatgtgtgctccgcagccctccaacgagtttccgctgatttttcgcaaggatggtaagacatgtgtgttttgggatgtggaggattacccaatcccagctggtctccatcctcgttcgatccggcggagaatcgtaaaggatgtgaagaaatatggttgtgatgcggaggtgttgattcatgcttatgctaatgataatacggtctcggtaacaatgaggcgtcaattttcggctgctggaatcaaattggaagtgttcacccaagcaggggataaatatgcgagacattgttccttgtatggtgacattatgctgtggtcactggaaaatcctccaccatcaaatattattgtcatcgcaaaaataatcgatgacgacttggctgatcgtattggatgtttgactaccgtctggtcatatgggcttctcatatcccaagttaagccagaatggctagaacggctttttcctgttggaagctatccctcgtttttggcagccatatttgatggaggattgccgaaatcatcgaaagcgaacaaggatcgctttcctctcgatgagtccgacgactaacttttgtgtctatgttattgttttgtgcctatagttgatatcaagtttggattgaaatgtttttagtattgtctatctataatatttatgtgattttggacatcgttactgagaaaaaaaaaaagatttgaatcaaaaaaaaaaaaaaaaa

SEQ ID NO: 447 - DNA, 2644 bp, Arabidopsis thaliana
  Clone ID: ARATH-23APR03-CLUSTER20452_1
cagggcctagctcctccgtctttacgctctctcatcaaactcgagaaaaagacgctctctcatcaaattcaagaaaaaaaaaaagtggcgcctctgcaatttcaattttcaaatcctattttttctctcgcttcccggagaacggaaccctaatttctcgacgcagacatgattttgagaactccgcagccgaagaggctcaggtccgacgccggagaaagccccgtccccaccggcgctactggttccggcaatcaggttgttatctacgaagattctcctcttcctgctcctgctcctgctccgctgtaatcatctcatgatcacccggcagatcaacacctttgcctctatcaatgccgccaaatggttaaagctgatgttctagatgccttaagcaaagaagagaaacaagttgacgaatcccaaaccaaatttctgactcttaatgtccactttacctaattagattctgaacgaaagcattttgctagataagttcctatactaatgcctcaggagcagcttcttatggagatcaacaattctcaagagcggtataccaaagaactacaatcttgccatgaactggaggtaaaacttcaaaatgaaatgaaccttcgaaagaaagcggagtcttctgctgcaacagctgaggaaaaagctaaacttttggaggataaactaactgagctatctggaagtgtggacagggagaagaaacgtctcaacaatgatattgctcaactgggtaaagaagcaaagctttctgtggctaggattggtgcagatcttgaaaggatgtaatgtagggcacaaaatgctgagacggaatcaaatcttttaagatcacaactggagcatcttaaactgatatttgacgagtgtttgcaagaaaagactgaagtagacaagaagctatcgtcattcacttcggaggcagcatcttcttcagataacagtgtattggttaaacatcttcaggaagaacttaaacgctatgaagctgaagtgcgagaagctagaaagttaaaatcacggcatttagatgcggagttgttgaatgtgaacttattagaagaacaaagccgtagggagagggcagagtcagagttatcaaaatttcatgacttgcagctaagcatggaaaagttggagaatgaattgtcctcttggaagtcattgctaaatgacattcctggtgtgtcctgtcctgatgacatagttatgagattctcggtgctacagaatgaggtggttcaaagcactatgaagattggggaagcaagtacccgtattaaacaactggaggagacactggaggctatacaacttggcagacagaatgctgtaagtgaggctgcattagcgaaagagaaatctgaggctctcaaaacagacgtgaagagaattgaagtaatgctcactttggtcacggaggagaaagaacagttgaaagctgttgttaatgaattaaggaagtcaaacagtgaaggatctgtgtctggagccgcagatggagcccttattcaggggtttgaatcttctcttgcaaagaaggagaactatattaaggatttagagcaggatctaaatcaactgaaggatgtcaataatcgtcaacgtactgaaatagaacttctaaatgagaaactagttgatgaagcaaggaggaataagtcgctggaaagggatagtgatcgtcttcgctctgagatctctttactggagtcaaagctgggtcatggtgattattctgccgcaaatacaagggttttgcgcatggtgaatactcttggtgttgaaaacgaggcaaaacaaacaatagaggctttacaagctgagttacagaagacaaaagaaagacttcaagctgttgaagaattaaagagccagtctggagatgctgggaagctagttgactctcatataactggaaagattgctcaactaaaagagcaaaatgctacgcttgaaaaacgtgaagagaggtacaaaactgtttttgctgatagaatttccgtgtttagaagggcttgttgtgagctttttggttataagattgtaatggacgaacatcagcgtcccaatggaatcccagtgactcggtttactctccagtctatatatgctcaaagtgatgatgaaaaactcgagtttgaatacgagtcaggaaacaccagtattctaaacaatgagtatgcctctcagggcgacatagcgaagcagatagaaatattcatcaggaaattcaactcgattccagcttttacagccaacttaacgatggaatcattcaaccgtcggacgctatattgagagcactgcgtccttatttccaactctgtgttttgtatatttctaaagcctgctgaatagaaactgaaactcgaaagccgcagcttaaaacactggccttatctatgtctacctctggttcgttatgtctgctataattgtggtgtcagtaactctattttggtatgaaagaaactagtttcgatttactcagaaagaatatctaatgtcattctctgattatgcgtttattactttatagtcaccaaaaacagtaacacttgaatatcaagcaaacagatttttatataaccatgaatttaaaacacgaaaaaaaaaaaaaaaa

SEQ ID NO: 448 - DNA, 1137 bp, Arabidopsis thaliana
  Clone ID: ARATH-23APR03-CLUSTER204538_1
aacggagatatggtaagcgacggcggcggcgagaataacagagcggaggcagatcagttgcttgctacatcggagaagctcttggcttcaagtgactttcatggaccaaagacatttgcgatccgtgcatgcgaagtgacccatcccgaacagacgcagctgactatatcctcgccatcgccgacactcacctcgccggagaaactacaatcggagattccaaagtaccagactggtacgcggtacttcgaatcagccgcctaacccaaagccctgaacacgtcgcgactcagtaccgtagactcactcttctcctcaaactcaatatcaatcgtcttcctttcgccgatcaagcgcttaaactcgtctccgatgcttggtatgtcctctctgatcctccaaggaaatcaatttacgatcgagagttgcagctgagtcaaactggtcaatcggagaaatttcaagattcgccattgcagagccaagctgagaccttggagaatcctacagctacaagcttttggacagcttgtccatactgcttttcactttttgagtacccaaagggttacgaggaatgcacattgaggtgtcagatgtgtaggaaagcgtttgaagcggttaaaacgcaaacgccacctgtggagagtaatggtgaaggcgtttactttggttcttgggctatgttccctgtaggattaacaagtcatcctaacacctctaattggtcgccaatctcacatctttccgtctgcacagggcaaagttcatctgatcagcaatcaaatttgaaggctactccaagaaacgatgatgttgacatatatattgcaatttctgatgatgattaaagatatgatgcgaagagaagcaagtagacaaatgttgtatattataaactcaaggctacttggtgaaaagtaaagctttgtatcttttgttttgtggttcccttagtcctttatgttgtatgtattgctagctaatgtttatgcctagtggaaactgacctaattttgattcgtttgtggaatcaatgttagatggaatccgtttatgtattttggtgcatattacgctttcggtatataatcttttgtatcatataagttcataaccgaaaaaaaaaaaaaaaaa

SEQ ID NO: 449 - DNA, 1387 bp, Arabidopsis thaliana
  Clone ID: ARATH-23APR03-CLUSTER20461_1
gactgaaaacaaacgaccctaatggctcatgaggagaagcgcccatgggagttttctttatctcttccatgggagttgattgaagagatactctctcgtgtcccaccagaatctcttcttcgcttcaaaaccgtatcgaaacaatggaacgctctcttccgcgataagacgttcatcaataaccacaagatgacgtttcgattcatcttagcaaccaaatccaagatttattcggtaagcatcgatcccaagatagttgtgcgtgagttaaccttagatattcccggtttagaatctcatgagatacctaaaaaattggttgattgcgataagttattactatgtgacatggagaaaggagttgtgctttggaacccgtggctgagacatagtacatggatcgaccagggttcaaaccacactcgaatggagtcttatggcataggatacaacaataaggggagttacaagatctttgctttttgtgatcggaaggaaaaccacacccagagattgttgacaatccatgactctgcctctgatgcgtggaaagaccgcgagcctattgataatagtcagggaaaacaaattgttcataacatatacactaaaattagtggtgtatcattgaatggaaatttgtatttggttacttattttgaaacgactgatctcgtgtaccacctaattgaaatcaattcttcgagcgaaagcgtcgtgaagttttgtgatctaccatgtgggacgtcgaactttcttaaggatgctttcgtccttagggttttcgagggagatcgattttcattgttaaagcaatgccatgcaacaaagaagattgagatttgggtgagcaagtacaagattaataataatcttgatagagatgtggaatggataaagttcatggaagtttcaagtcctaacttgccggatttagtagatggattcgactctcagccaagttactttattgaagataaaaggctcgtcgtgtgctcgtgcaacgaaactggtcgggcttggatctatgttttcggagaaaataagttgatcagtaaaactcaaattgattctgtggtggatctttggccttcacactggacctttattcccagtttggtaccggttcctcgagctcaaagagaagaaccagcagaattacaagtttgattttagttacattttagcttcttgtttggttgttgaggaagctaaattttatttggatttcagtatttttattcacaaaccatcttctttgttgctgataattgattaatctccctttctttgttttgtagcttcttttggcaaaataaattcttaataatgtatcctttagataaatctagagagaatgtttaaggacccaaaaaaaaaaaaaaaa

SEQ ID NO: 450 - DNA, 2116 bp, Arabidopsis thaliana
  Clone ID: ARATH-23APR03-CLUSTER20463_1
tcatcgctgtctggaacagcgatgactatctcacggcttttagttttcaccattctgattaaagagaaaccaaacgtttcatttttcaatatctagagagaaagatgcagacttcggtgaccccagatgccatctccaccgttttgtcaaacccatcctttgattcgtcttccgatcgatctgagatcgttgttcaagttgtggatcttaaacctatcggcaatcgctatacatttagtgcaaatgacggaaagacgaaagtcaaagcaatgtttactgcttcactcacacctgaaatcatttctgggaagatccagaacttgggtctaattcgtctcattgatttcactgttaacgacatttcaagcaaatctacaaaatatttccttgtgactaaatgtgaggctgttggttctgtgcttgattctgagattaacttggacagtaagagcggagaggaggaggctcgtgagcccaagaagcagaaactagagcattctcctgtcagtcctctgaatgatgttgtttctactggtatcacattgaaaccgaagcaggaatttgtagccaaatcagcttctcagataatgagtgaacaaaggggaaatgctgcaccagctgcaagaatggccatgactagaagggttcatccacttgtgtcattaaatccatatcaaggaaactggaccatcaaagtccgagttacaaacaagggagtgatgagaaattacaaaaacgctaggggtgaaggatgtgtcttcaatgttgaactaacagatgaagaaggaacaaattcaagcaacaatgtttaatgatgctgcaaggaagttttttgacagattccagttgggaaaggtttattatatatcaagggggtcactaaaactcgctaacaagcagttcaaaacagttcagaatgattatgagatgacactgaatgaaaattcagaggttgaggaagctagtagcgaagaaatgttcatccctgagacaaaattcaacttcgtacccattgaagagttgggtctgtatgttaatcagaaggaacttattgatcttattggagttgttcaaagtgtatctcctaccatgagtattagaaggagaactgacaatgagatgattcctaagagggatataactttggctgatgagtcaaggaaaactgttgtggtgtccctgtggaatgatcttgcaactggcataggtcaggagctactagacatggctgatcagtcacctgtgattgcaatcaagtctctcaaagttggagattttcaaggtgtttcgttgtctaccatcagcagaagcaatgtggttattaacccggaatcaccagaagctaaaaagttgaaatcttggtttgattctgaaggcaaggaaatatccatgtcttctattggctcagggatgagcccttctgccaaaaatggatctcggtctttgtatactgaccgagtgcttctctctcacatcacaagcaatccatctttattcgaagaaaagcctgtatttttcagcactagggcttacataagcttcatcaaaccagaccaaacaatgtggtaccaagcttgtaagacttgtaacaagaaagtgacagaagcacttgactctggttactggtgtgaaggatgccagagaaagtatgaagaatgcagcttaaggtacataatggcggtgaaagtcaccgactcatctggagaaacttggatttcgtcattcaacgatgaagcagagaagattcttggatgttcagctgatgagctcaacaaactaaaatcagaggaaggtgaagtaaatgaatatcagacaaaactgaaagaggcaacatggtcatctcatgtcttccgggttagtgtcacacagaatgagtataacggtgagaagagacagagggtaactgtaaaaggagtagctcctcttgattttgctgctgaaacaagattgttgcttcaagacatctccaacaagaacaaaacatctcagtagtagcttttacttcttttttttctctattggcctaaaaaagtctcaaaacttttccttgtataatataagcctttctgcaatttataaaattagggttttgcttaaaaaagaaaaaaaaaaaaaa

SEQ ID NO: 451 - DNA, 600 bp, Arabidopsis thaliana
  Clone ID: ARATH-23APR03-CLUSTER20484_1
acagagacaacatttgacccttaaaattcacaaactatagatctctccagtccctttcgcaaaccctagcagtcgaaagatcgaaatcgaaaacccctaaaacgatgaaggtgattgctgcatttctcctcgcgaaactcggtggaaacgagaatccaacctcaaatgatctgaagaagatcttggaatctgttggtgctgaaatcgatgaaacgaagatagatctgttgttttctctcatcaaggatcatgatgtgacggagcttattgctgctgggagagaaaagatgtctgctttgtcttctggtggtccagctgttgctatggtggctggaggtggtggtggtggtgctgcttcggcggctgagccggttgctgaatctaagaagaaggttgaagaagtgaaggatgaatcttctgacgatgcaggcatgatgggtctctttgattgatcatttggttagaagtttcgtttaaaggtcaagactttatgtttctgatgttggttttattgatggatctttgtttaatgttgagacttgtgtttctgatgttggtttaatgatctttggtggtgatgactcaaaaaaaaaaaaaaaa

SEQ ID NO: 452 - DNA, 958 bp, Arabidopsis thaliana
  Clone ID: ARATH-23APR03-CLUSTER20495_1
gtggattggcctacgacgactctcatctcccgaagaatctgtaatcttttgattttcttcgtcaaattaaaccacaaaaacctctccatcgattcggataatccacaacactctgcgatgaaacccgacccgaccagacgcagaaacagagccttatcttcttcttctccatcaaagacccgacccgaactatcttccgggtctcccaaccggaataccggtgaagcccgtggtggaaaggtgaaaacttcggccactttactcgaccgggaggagatgggtctttttcccgggtcgggttacggtgacccgaatccagaacctaggagctttccttatagtgtgaagcagcaatgttgggaaaaagcagagaagattaaaggaagagatcctgagcgttggaggagagatcatttagggaacattgtgtttaggaagcttgttggttgtcctggatgcttgtgtcatgattatgatcacattgttccttactccaagggcggcaagagcactctggaaaactgtcaggttttgcaggcaaaggtaaaccgatcaaagggtaataaaaccgatatttctcgatccgagcttatccaaaggagttcttactgtcgagtcgctggccgagatatggatctgattgagctaacagcttacgggaatgtacagcgtgcacctacgtctagcggatgcagaattcagtgatctgttgaagatctattgatggaattgaaaatgatgagtttctcaatatttacttggtcaagaatctgtaaacttgtagttcttctccgagttacttgtgtactcattagtcattatctttcctatattgtggacatgtaagtaagttgtaagttgtaacattagtcatttagtgctcatgcttcttctatattctatcaagttctattcttgttataaaaaaaaaaaaaaaaaaaaagggcggccgctttaa

SEQ ID NO: 453 - DNA, 2538 bp, Arabidopsis thaliana
  Clone ID: ARATH-23APR03-CLUSTER20528_1
ttcggcacgaggtcaaatctaatgtgtgtgtgacatattcttctctctctctctctcgaatctttcgtgttgtttgctgttcaaaattgaaattttaaatattaaaaaaaaagaagaaaacttgactagtcccccccccccccccccccccggaatttctctctctctctttctctcttcctcataaaaatctctgctttaccttttcttttcaaagggtttcattttgattctagggttgttctaaatgcgacattttgactgatgggtctttgttgaatttgaagagagcaaaagagaaagagattgttctaatggagcctccaacgggaatcttggcttctctgtggcaatttatactcttcattccttatttcactggtttactgcttctcggtgtcattaaaggtatcgttttatgcccgcttatatgccttactgtggctattggaaactctgcaatcatcttaggccttttaccagtacacgcgatttggactctatattcgatagcgagtgctaaacagttaggaccaatcctgaagatctttctgtgtttatgcgttcctcttggtgtcattctctggcttgtggttagtatcttaggaagtgttcttggaggagctatttatggatttctttctccaatatttgctactttcgatgctgttggtgaagggaagtctaatccgtttttccattgcttttatgatggaacttggagcactgttcaaggcagtttcaccgttgtttgtgattttaaagatgtttgctttcactcctacttttcttttatggatgatcttcgaacatctactgcgaaccgtcactattatgaaataaggttacttcaaattccaggtgctgtgattgttgcggttctcggaattcttgttgatttcccagtgatttcactcttagcattgtgtaaaagcccgtacatgttgttcaaagggtggcaccgtttgtttcatgatctcattggacgtgaaggtcctttcttggaaacaatgtgtgtcccaatcgctggccttgtgatcttactctggcctttagctgttgttggagcagttttaggatccgtggtctctagtgtcttccttggtgcttatggcggtgtagtctcatatcaggagtcatcgttcttcttcggtctctgctatgttgttgcttctgtttctatttacgatgagtatagcaacgatgttcttgatatgcctgaaggttcttgctttcccaggccaatatatcgaagaaacgaagagggcgctagtacggcattttctggtggtctttcaagaccgaactccttcaagacaactccatcaagaggaggatcaaacaaaggcccaatgattgacctgaaaccgcttgatcttttggaggctctatttgtggaatgtaggcggcacggagagattatggtaacgaaagggattataaattcaaaagacattgaagaagctaaatctagcaaaggcagtcaagtgatcagctttggcttacctgcttattctcttcttcacgagcttttacgctctatcaaatctaactccaccggtttattactcggtgacggtgtaacggagataactaccagaaaccgcccaaaagatgcgttttttgattggtttctgaatccgtttttgatccttaaagaccagatcgaagctgcaaacctatccgaggaagaagaagagtatcttggtaaattggtattactctttggagattcagagagacttaaaagctccattgttgaatctgaatctcctcctctaactgaactcagaaaagccgaacttgatgcctttgctcgcaggcttcaaggattaaccaaatcagtatcaagatatccaacattcagaagacattttgtggaactagtcaagaaactatcaaatgatctagacaataaacataaccgttttgaaggcggttcgagatcagttccacgtcccgggaaaacggtgtctcggattttcagccaaaaatcgttcaagaaaaagacaagtagcaatgggtcagatcaagattcaccaaacagagggttaagagacattgatattgtgtaagtaaatgttatgcgaccagaattagaccgaaacttcgtctgcttttagctctgtaatgataaatttatacagattccaactgaatatgaaactgttttatttatctaacaaatgttttacattcagcttttgcttgatgatgtgttgtttctcagaaacagcagaaccgtttcttcgtaggttcatcttgagatttgttattgtcacggcgttgtgaggcggcacgaacacttgcgtttgtctttttgtcgtctcgagctttagcgaatataaccgtaaatccttcagctgatgctggatcgttcacatcccattctccaaattttggtaatggtcgatcttgttgttgtcgttgttgattattcgatgccattcaaagattgtgtaaaagatgcaaacagaacatgagatgatctttcttcaaacaacaagaaaacttgtttgtcttctcttttagtttttt

SEQ ID NO: 454 - DNA, 759 bp, Arabidopsis thaliana
  unsure (1)..(759): unsure at all n locations
  Clone ID: ARATH-23APR03-CLUSTER205362_1
cggggnttttccncatccncggcgntntaaaaccnccgccnnnggaanttttanacccccnccnnaaggggggaattnggggcccngccccttttttttttttttttcacaatcttccatctattactccactcaacactttcaagactataaatatcaattacttgaacattaatagccaaaattacatatcaataattaagaaatctaatgtaaacaacaacattacaaaacaaaagacaagaataataagatttcacttgcctctagagcatctgagtttaaaactcaaatgtacttaaagaccccaatgttttcaagtcttgatgtcgttagtgtctctagcacacctagtaatgacactacatcctctgttgtaagcattagcctgaccagagcgacaagcgtaataagaagcacctggtttctgacaaggaaccatatctctccttaaagtttcgtagcttatgtactgtttccgcatcatcattactctccgacttatctccgatggcatcatctcctctccttcttcctctccgattacgccgttccggttcagcattgcgtcgatttcgccgtttaccgacggaatcggaactgtgacggagattgagagatgggtttgaagacaaagtaaggataagtaaacgagagctaaggatctagacatgtcggtgtgtgaaaatttggtaagtttgtgatctctgtgtttacgacaactccaagtagctcttgggagttaaaccggtcggtttt

SEQ ID NO: 455 - DNA, 3316 bp, Arabidopsis thaliana
  Clone ID: ARATH-23APR03-CLUSTER20577_1
atccgtcgccttctgcttccccgcgtggggctgcaggtttttaacaatgtcattcttatcattttctcctatttctctggacttattatctagtaatgtctcctcgccctttccagcgctggtctcgtccgcttcacctctcgccggtacgccccggcaacgcaacgcgttccaccttcctcccccgcccccccctccgccggggccggtgatcggaaacttatttcagttcacgcgctccgggaaacagtttttcgagtacgtcctcgagctcgcgtagggccccggtccgactctgactctcgggcctcgtactcggaccatcctctccgacgcaactctagtccacgaagctttgaccctacgcggacgtggagcacaattcgcgacccgacccgttgaaactccgacccggaaaatcttcagctccagcgaaatcaccgccccttccgccgggccagggtggcgatctctgagaagaaacatgagctgcggtccgtgcttgcctcgccccgtcccgctcaaggagtttggttctgttagaaaatccgccatggataaactcatcgagagaatcaaatctgaagctagagacaacgatggactcgtctgggttctgcaaaacagcagatacgctgcgttttgtgttttattagatatctgttttggagttgagatggaggggcaatcgagtgggtggatggctctgtggaggccggcgttatgactcgccgttgatccaaaactccacgattaccttccgatcttaacgccgtttaactacaatgagagaaatcgtgctcttaagcttcgtcgggaacttgtagatttcgtcgtcggattcatcgagaaacgacggaaggcgattcggaccgcaacggtatcgtctttctcgtatcttgatacactctttgatcttaggatcttcgaagcgagggtcgcgacgccgccccatctagcgctgggctcgcgccgctcggcgctgcgcaatgccggtacggacacgactggggcggcgatcgagtggggaggggcagagtgcagcggaatgcccatcctgaaattccatctcggctctacgatgagattaaagctagggtgggagatgatcgtagaatcgatgaggaagaaatggacataatggtatttttacaagaatttgttaagcagcttctcccgacacatccgcttacttttatttctcggacgaatgcagctatggagacgacgaggcttgatggtcccgatagggccgacggtgttattttcgatgcctgtattccgggaattagtgaggatccgagaaatttgaaataacccgaaaaagtttgatccggaccggtttatgttgggtaaggaagatgctgacataaccgggattagtggagtaaaaatgattccgtttggtgtgggccgtaggatctgtccaggacttgcaatggcaaccgtacacgtccatttgatgcttgtgcggatgtttcaggagttcgcgtggtgtcctcatccgccagggagtttgattgatttcgccggaaaattggagtttacggtggtgatgaagaagccagttgagagcccatggtcaaaaacaaagctcagtgaaaagaagaagaaaaacaagaagctaaaaatgtctatcctttcgtttcctcacactttctttaacatctctccttcactcttctacactatccttatatccagtttagttctactgatcctcacgcgccggagtgctaaatcaaagatcgtgaagcttcctccaggtcctccggggtggccggtggttggaaacctcttccaattcgcgcgctccgggaagcagttttacgagtacgttgacgatgtaaggaaaaaatacggtcctatctacacgttgaggatgggaagtcgaacaatgatcataatctctgattcagctctcgtccacgacgttctgattcaacgtggaccaatgttcgcaacccgacccaccgagaatccgacccgaaccatcttcagctccaacactttcaccgttaacgcttcagcgtacggtccagtatggcgatccctgagaaagaacatggtacagaacatgttaagctcgatccggttcagagaattcgggtcgttgagacaatccgcaatggataaactcgtcgagaggatcaaatcagaagctaaagacaacgacggtcttgtttgggtcctaagaaacgcaagattcgctgcgttttgtattcttttggagatgtgttttggaatcgaaatggatgaagaatcgatattgaatatggatcaagtgatgaagaaagtgttgatcacactcaatccaagactcgatgattatctcccgattcttgctccgttttattccaaggagagagcaagagctctcgaggttcgttgtggacaagttgatttcatcgttaaactcatcgagagacgacggagagcgattcagaagccggggactgataaaacggcgtcgtctttttcttatcttgatacactctttgaccttaaaaccgaaggtcgtataacgacgccgtctaatgaagagcttgtgtcgctctgctctgagtttcttaacggtggtacggatacgacggggacggcgatcgagtggggtatagcgcaactgattgtgaatcctgagattcaatctcggctctacgatgagattaaatcaacggttggagatcgtgaggttgaggaaaaagatgtggataaaatggtctttttacaagccgttgttaaggagattttacggaaacatcctccgacatactttacgttgactcattccgtcacggagccgacgacggtcgccggttacgatgttcccgttgggattaacgttgagttttatcttccgggaataaatgaggatccaaagctttggtctgatccgaagaaatttaacccggatcggtttatttcgggtaaggaggaagcggacataaccggtgtaaccggagttaaaatgatgccgttcggtattggccgtcggatctgtccggggctagcgatggcgaccgtacacgtgcatttgatgctagcgaagatggttcaagagtttgagtggagcgcttatccgccggaaagtgaaattgatttcgccgggaaattggagtttacggtggtaatgaagaaaccgttgagagccatggttaagccaagggtctaaatttgtttaattatgaaaacgatgtgtgcttatatattaaagaaggaacctatactcttgaaatttgtcaagtgctttgtgaatttctagtaaaagatttcatttattgtcaaaacacatcaataaatgattttgctttatttt

SEQ ID NO: 456 - DNA, 1623 bp, Arabidopsis thaliana
  Clone ID: ARATH-23APR03-CLUSTER20580_1
aatgagaatcaggattgaagcacttggagaaccttatcatgatgattagggtaaagaaggtgactccttataagtagagagtgaaacaccttgactatccagagcaaaaaaacactagttaagagattcaggggtggtgttttcgtggtggtaaaaggataaaatttcttgagaatgcctgcatacatttctgaggagaagttgttcttcaacaagaaacctttcggatccaaaatctccgacaacaacgaaattgaagaacttgatcaagagaatttggttgtgacaagacaagaagttaatgatgattccaaagtggcaccgagagatgtagtagctacatcaacaaatgtctctaagaaggctttaaccttgggagatattttatcattggaggattcccaaagcccacccaacaaaaacaacactaatggacctgatcaaaataccttcaagttaaaaatagagacaatcttgttcttggtttgatagattaccttctattcttgattgtgttttccgaagattttttagaaccaatccacttgtttttcctaatacaggggtggtgttttcgtggtggtaaaaggataaaatttcttgagaatgcctgcatacatttctgaggagaagttgttcttcaacaagaaacctttcggatccaaaatctcagacaacaacgaaattgaagaacttgatcaagagaatttggttgtgacaagacaagaagttaatgatgattccaaagtggcaccgagagatgtagtagctacatcaacaagtgtctctaagaaggctttaaccttgggagatattttatcattggaggattcccaaagcccacccaacaaaaacaacactaatggacctgaagaaaacatggtccatcataacccacatctggagataacagaggaatcagaagcagacaactcttgtgatgacaacaatctcttgaaaaggaatctcccaaatggtttcggggaaataagtttctgtgaagcaaagtcgagtttagattatattacttactgtggaccactctcaggctccgaaaacctctctattcgttctgatggaaccagcgcaagctcttttgctctcccaatactgcaatcggagtggaacagcagtcctgtaagaatggggaaagctgaggagacgcaacttcgaatggtgatagctgaggagagaaaagttcgaaaggataaagctgagaagacacaacttcgaaaggagaaagctgaggagtcacaacttcgagaggtgaaagctgaggagactcaacttcgaatggtgaaagctgaggagactcaacttcgaaaggagaaagctgaggaaacacaacttcgaatggtgatagctgaggagagacaacttcgaaaggagaaagatgagaagagacaacttcgaaaggggaagaaaggatggagacattactcttctcttctctgttgtagattctgatggattctatcagaggatttttaacctttttaggctttgcattcaatatacaaagaccgttcgaataagaacagaaaatagtggtttttctgtaatgtattatttcgtagacctcaaatactttatattcaattttttgaaaaaaaaaaaaaaaaa

SEQ ID NO: 457 - DNA, 1559 bp, Arabidopsis thaliana
  Clone ID: ARATH-23APR03-CLUSTER20585_1
gtggtaaattagtcagatttcgatttggaaccctaaaaaaattcaaaagacgatcctcttctcgaagaaactcgattcttgtggattcgatttcattaaggaattttgaattgttgcctgtgatgggtggtttggctatggaggaaatgcctttatcggtgctattcgagcaagctaggaaaattcatcttgctgcttcagagtctggtgttgatcaggatgttgtgaagaaaggatgtgagatgtttcagaagtgcgaagatatgatcgggaagctggcgctgttttcgtctaacgagactaaagaagatattagcaccaacaatctcaaatatcttttggtgccttattatcttgcggagttgacagagaaaatcatacaggaggaccggattcagattgtcaaagcctcgtatgctaagttgaaggagttcttttcgttctgtgaggcaatggagcttgttccggatgaggagttggaggcttcttcacgaggaggttctggtgcacctgctgatcgaagggctctcaagatagctcggttcaaacgtcaaaaggctgcagaggcaaagcttcttgaaattaaagagaggaaggagcgacgtggacgttccactaaagcatcagctttgtcgactccggttgaatctggagaagatgatattccagatgatgacagcgaagaagagagagaggcctggctctcctcaattaacttggctatttgtaaggctattgatctgttggaaatgctaaagagagaagaggaaatgctctctgcaataaaggaaagacagttgaaggatggagagggtggattttctcgggatgctcttgatgatcgtacaaagaaagctgaaacctggcacagagacgctgctgcaaggatacagtactctaaaccggcacaaccaatcacttgtgccacatttgcacaagatgtgttagaaggaagagcttcggtatcacaaggtcacgaacacaagaaccaacctcttatattcggtccagcaagcatcgtgggtggaccgctctctaccgagagagaaagaatgatagctcaggtcttccaaccaagtcacaggatgccaacaatgtgcatagaggatgctgggttaacagagatgaacataatgaatgattggcaagagcagacgaaaaaagccattgaagaagcaaccacctcatggtacaatgataaacctctaagaagaaaagaagaagacgaggaagatgatgatgaagacgaagaagctgtgatgaaagctagagctttcgatgattggaaggatgataatcctcgcggtgcaggtaacaagaaactcacaccttgtggctgagactagagaccgagacacacattatttaacactttctccctctcttttgtttcttatttccaaaacctcttcgttcacttattataatgtctgtaatgtaatcatctttctactcttaagccttagacttacagattttggattcacggattcactttcattttcgttgggaatattatttttaaatacgccgactactaaaaaaaaaaaaaaaaaaaa

SEQ ID NO: 458 - DNA, 1610 bp, Arabidopsis thaliana
  Clone ID: ARATH-23APR03-CLUSTER20589_1
gttttttgcactcagaaaagaaacttgtactaaaacctaggagaggaggagctggcaccaccgcctaactcgaccattgacacaacaccaaaaactcttctttacttggtgtgagtagggaagaaaaacagaggagctaataacaattatttctacgaggagtcttctggtgaaactcattggacttcatggctgattccggcgattgtagtggcaaatctcgctgtctttatcgctgttatgttcgttaatgattgtcctaagactaaatctctctctgattactgatactctgtctcaatctcttctttcttctaatcctttatttcttgtaagctacttctcctgaatttcgtatttgatccgtttaatccaagtttcgattttatataacaaacacatagatcctgaggttttgtgataagaaacagagagagagagaaacagagtaatggcgaacagagatgtggagagagtagggaagaaaaacagaggagctaataacaattatttctacgatgagtcttctggtgaaactcattggacttcatggctgattccggcgattgtagtggcgaatctcgctgtctttatcgctgttatgttcgttaatgattgtcctaagaaaatcaccggacctaacaaagagtgtgttgctagattcctcggaagattctcgtttcaaccacttaaagagaatcctctctttggtccttcttcttcaacattggagaaaatgggtgcattagaatggaggaaagtagtacatgaacatcaaggatggagacttctctcttgtatgtggcttcacgctggtatcattcatcttcttacaaacatgttgagtttgatcttcattggtatccgccttgagcagcaatttggcttcataatagtcgggctgatatacttaatatcgggtctcggtggaagcatactttcgtcgcttttccttcaagaaagtatctccgttggtgcttcgggtgctctctttggacttcttggagcaatgttatctgaacttcttaccaattggactatctatgccaacaaggcggctgctctgatcacacttctgttcatcatcgcaatcaacttagcattaggcatgcttcctcgggttgacaactttgcacacattggaggctttttaaccggattctgcctcgggtttgtcctccttgtccgacctcagtacggttgggaagcttcccgcaccagcacttcgcgaaccaaacgaaagtatagcatataccagtacgtgctattcgtagttgcagtggttctacttgtggttgggttaactgttgcattagtgatgcttttcaaaggagagaatgggaacaaacattgcaaatggtgtcattaccttagctgtttcccaacttctaaatggacctgctaatcatcatcatcatcatcataatcatatagtaaaagcttttatatgtgttcatgttaacatttaatctctttgatctctctagcctttgattacttatatatgtgtacattacaaaattcgtcttgtgtaaaaggggatagaaataaaagagtgtataatttggtttatagtacacactttatataatcaaaaaaaaaaaaaaaaa

SEQ ID NO: 459 - DNA, 2899 bp, Arabidopsis thaliana
  unsure (1)..(2899): unsure at all n locations
  Clone ID: ARATH-23APR03-CLUSTER20590_1
gcacgagctcactagtccccccccccccccaaaaaaaattgtcgtttttataaaccagaaaagctgcccaacttcttctcctctcgaaccctaacgagccgggtcatctcaaatttctccgacattgcattcctccgttgccttcagattcttctccaccgttccttaatctcttcgtctccggtcgattccaccttcttcttccccaaaaccgaagtcactataccgtaattttatcaagttttttaccgaaccgatttcttcccgtaaccaacccggtcacaaacctgcaaaccaaaaaaggatggattcagatttggaacctgtagctctaacaccacagaaacaagacagtgcgtggaaacactgtgaagtttacaaatatggagatcgagttcagatgagatgtctttactgtcgaaagatgtttaaaggaggtggtattacaagggttaaggaacatcttgctggcaagaaaggacaaggcactatctgtgatcaagttcctgatgaggttcgtcttttcttgcagcagtgtattgatggtacggtgagacgtcagaggaagagacgtaaatcaagtcctgaaccattgcctatagcttatttccctccttgtgaagttgagactcaggttgctgcttcttctgatgtgaataacgggtttaaatcgccgagttcggatgtcgtagtgggtcaaagtactgggaggacgaagcagaggacttataggagtagaaagaataatgcttttgagaggaatgatttggctaatgttgaggttgatcgagatatggacaatttgattcctgtggctattagtagcgtgaagaacattgtgcatcctacttcgaaagagcgggagaaaacagttcatatggctatgggacggtttctgtttgatattggagctgatttcgatgcggcgaattctgtcaatgttcaaccgtttatcgatgcgattgtttctggaggatttggtgtttctattcctacacatgaagacctcagaggttggattttgaagagttgtgtagaggaagtgaagaaagagattgatgagtgcaaaactctatggaagagaacaggatgttctgttttagttcaggaactgaactccaacgaaggacctttgatccttaagtttttggtttactgtcctgagaaagtagtgtttctgaaatcagttgatgcatcagagatattagattctgaggataagttgtatgagttacttaaggaggtagttgaagagataggtgatactaatgttgttcaagttattaccaaatgtgaagatcattacgcagctgctgggaaaaagttgatggatgtgtatccttctctatactgggttccttgtgctgcacattgcatagacaagatgcttgaagagtttgggaagatggattggataagagagattatcgaacaagctcgaactgttacaagaattatttacaatcacagtggtgttttgaatctgatgaggaaattcacttttggcaatgatattgtgcaaccagtctgtaccagttccgctacaaattttacaacaatgggaagaattgctgatctaaaaccttatttgcaagcaatggttacatcatccgagtggaatgattgttcgtattcgaaggaagcaggtggattagcaatgactgagactatcaatgatgaggacttctggaaggcattaacattggcgaaccatataactgctccgattttgcgtgttttgaggatagtttgttctgaaaggaagcctgcaatggggtatgtctatgcagcaatgtatcgagcaaaagaagcaattaagacaaatctggctcacagggaggagtacatagtgtactggaaaattatagataggtggtggttgcagcaacctttgtatgctgctggtttctatttgaacccaaagttcttctatagcatcgacgaagaaatgcgtagtgagatccatttagcggttgttgattgcatagagaaattagtccctgatgtcaacattcaagatattgtcattaaggacataaactcatacaagaatgctgttgggattttcggaaggaacttagctatcagagctcgtgacacaatgcttccagctgaatggtggtctacatatggagaaagctgcttgaacctgtcacgttttgcgatacgtattctgagtcagacatgcagctcatctattggctcagtgagaaacctgacatcaatctcgcaaatatatgaatcaaagaactctattgagcgacaacggctcaacgatcttgtatttgttcagtacaacatgcgcctcagacgaattggcagcgaaagcagcggagatgacacggtagacccgttatcacacagcaacatggaagttcttgaagactgggtttcgagaaaccaagtttgtatagaaggaaatggaagctcagactggaagtcactcgagttcattaagaggtcagaagaagtagctgttgttatcgacgaaacagaagacttggggtcaggtttcgatgatgctgagatattcaaaggggaaaaggaagcgagttacgaaggcggttattcggagaatctgttcacttgaacttgcaccttttcctgtaatcatcatagggtttgattttgtgattctttcttagggtttgatttgtattattaatagaagtctttaccagctttaagttgtatcccagaaactaatagttactcttcttcttcttcttcctcttcttcttctttactcagtaatgagaacaaaaaccattttagagaaattaaaaaaaaaaaaaaaaaactcaaaaaanaaaaaaaaaaaaaaaaaaccgttgaagtaaatggnannnangnngaaaancaaccacnnncgggggnggcccngnanccnattnncccn

SEQ ID NO: 460 - DNA, 819 bp, Arabidopsis thaliana
  Clone ID: ARATH-23APR03-CLUSTER20602_1
ataaattattacaaccaacaaaaaaaaaagcttcgtgtctctcttctccaaaaatgacgaactacggggcgattccgacgtcgtctcatccatcaccggcgatagatctcgaatacatctcacgcgccaaacaccgtataaaatccggtctagctacgcgccgcccatggaaatcaatgttcgatttcgaatcaatgactctccctcacggtttcttcgacgcgatctcgaggatcaaaacgaatctcggctatttcagagctaattacgccatcggagttctcttcatcctcttcctaagccttctatatcacccaacctcgttgatcgtgttatcaatcttggtcgtcttctggatctttctctatttcctccgtgacgagcctcttgttgtttttggttatcagattgatgatcggacggttcttattggtttatcggttttgacggttgtgatgcttttgttgactcacgctacttcgaatattctgggatctttgttaaccgccgccgtgttggttctgattcatgcggcggttagaagaagtgataatttgtttcttgatgaagaagctgcggcggttactgaagcttcagggctgatgtcatacccttcgtcgtaaatccaaaaatttgttttttttttttgtatgttactgagtttggtgcgatttgagaaaacttgacatgttcttctactttgttcaatttgttgacaacagtacaatttttgagtatgttttgttggttaattacgttattacatgattagcactacaaacactaatcactttggataaagcaaaaaaaaaaaaaaaa

SEQ ID NO: 461 - DNA, 1492 bp, Arabidopsis thaliana
  Clone ID: ARATH-23APR03-CLUSTER20617_1
attcttccacaatggattcttcatcttcagtaaaaatcgtctcgaaaagcttcgtgaaacccaaaaccttaccagaagaatcaaagcaaccatactatttatctccatgggactacgcaatgctctctgttcagtacatccaaaaaggtcttctctttcacaagccaccacttgactccattgacactcttcttgagaagctaaaagattctctggccgtcacactagtccatttctaccctctcgcgggtcgcctctcatcgttaacaacggaaaaaccgaaatcttactctgttttcgttgattgtaacgatagccctggcgcggggtttatctacgcgacctcagatttatgtataaaagatattgtgggtgctaagtatgtcccttcaattgttcaatctttctttgaccaccacaaagctgtgaatcatgatggacacaccatgagcctcttatcggtccaggtgacagaattggtagatggaattttcataggactgtctatgaaccatgcgatgggagacggtactgcgttctggaagttctttaccgcatggtccgaaatcttccaaggacaagagagcaacaaaaacaatgacttgtgtcttaagaatccacccgtcttaaagcgttacatccctgaaggatacggtcctctattcagccttccatatagccatccagatgaatttatcagaacctacgaatctccaatcctcaaggagagaatgttctgtttctcatcagaaaccataagattgcttaaaacaaaggtcaaccaaatatgtggaacaacctccatctcatctttccaatcgctaaccgcggttatatggagatgcataacaagggcgaggagattacctctcgatcgagaaacaagttgtagagttgctgctgataacagaggaagaatgtatccaccgcttcacaaggattacttcggaaactgcctctctgctttgagaacggctgcaaaagctggtgaactattggagaatgatcttggatttgctgctttgaaagtgcatcaagcagtagctgaacatacgagcgaaaaggtatctcaaatgattgatcaatggctaaagtctccttatatttaccatattgatcggctatttgaaccgatgagcgttatgatgggaagctcgccgaggtttaataagtatggttgtgaatttgggatgggaaaaggagtgacgcttagaagtggctatgcgcataagttcgatggaaaggtatctgcttacccgggaagagaaggagggggaagtatagatttggaggtatgtcttgttccagagtttatggaagctttggaatcagatgaagagttcatgtcacttgtttctctttgaaaatttaccaatttcttccaagtttctcaacatttttattttgcacctgatttttcaaaaagaaaagttggaaggtaaagttacaaccctataatccatatatattatttcgaaaaaaaaaaaaaaaa

SEQ ID NO: 462 - DNA, 1165 bp, Arabidopsis thaliana
  Clone ID: ARATH-23APR03-CLUSTER20633_1
tcaccgaaaattagatctgacttatggcgagattctcagtttgcggaggagacgacggagaaggaccaagtaacaacaatcaccaatcccggaaaaggcaacgacttccttcaatcgatgaaaatgaagaagacgccgagacctccgacgccggaagttccggtgaagaagacgaagacgaaactcagaatcaaggaatgagaccagaatctgaggatcgaggatcaacgagcgatgatagcgatcgtgaagttgtgattgaggagagacgatttggtaaatttgtaaatagtcagagttcttcttctagcaaagattcgcctctttctgtaacgttattggatccagatgttcttgattgtcctatttgttgcgagccattgaagattcctatctttcagtgtgataatggtcatctggcttgtactttgtgctgcaccaaagtgaggaacagatgcccgtcgtgtacattaccgataggttatgttcgttgcagagctatggagaaggttatagaagcatctagagtctcgtgtctaaatgccaaatacgggtgcaaggagagtacctcctatggaaaccgttttagtcatgagcaggtatgtgttttcaccccttgttcttgccccatacttgactgccactacactgggtattacaaggatctcaacaatcacgtccgtgctgaacacaaagatgatctgatctcgttcgtgtggaatactcgtttaaccattagcttggacctcaataagaagaccacaattcttcaggaagaaaacgatgggcatgtgattgtagtccaagttttcagggctttgcatgctgtgtatgtcagtgtgagctgtattgcacctttgacaccgggagtgggtaggttatcatgccgtcttgcgaagataaccgttgatagcttactgaagcaaggatttatggtgaagaacatacaaaaagtgacgaatgaacatcccgaagatggtttcatgttgattccttcctatttgttctctggtaatgacaacttgaatctgcagatttggatcggccatggccggatctttgttcattcgtgattatgtaaagaactaaagttgaatcaaaagcttgtcatgaacaagtttaggtgtatatgaaatgtgcatgtttttaagaaaaaaaaaaaaaa

SEQ ID NO: 463 - DNA, 1340 bp, Arabidopsis thaliana
  unsure (1)..(1340): unsure at all n locations
  Clone ID: ARATH-23APR03-CLUSTER20639_1
naaaaagctcactagnccccccccccgagatttctttctttgcctttaataaagcttcgtgctcaataggctgccacggaggcgagcctgaaaaatgccgatgacggttgtttccggtcgattctcaacggcgttgctccctacttgcttttccttgtcgcggttgcattccgtcaagtacgccgctcaaagacgggttgttttcgtttccagatcagctcacgcctcttcagcctccgtctccgttgagacaaattcgaattcgaatgtggattttgttatcgagaagaaggataagaacagaggagagaagaagattctagcttgtcccatctgttataactccttagcatggattagtcaacctaatggattaatagaatctgctgcctctggtattcaagtacaatgcaatacatgtaaaaggagttactcgggtaatgagacgcatcttgatttggctgttgctagtggaagcaagagatacagtgaaccaatgcctctttccactgagttatttaggactccactggtctcgtttctctatgagaggggttggcgtcagaatttcatatggggaggttttccaggaccagagaaagagtttgaaatggctaaggcctatctgaagcctgttttgggaggcaatatcattgatgctagttgtggaagtgggatgttctcgaggttattcactagaagtgatctattttctctggttattgctctagattactcagagaatatgctgcgacaatgctatgaactcttaaataaagaagaaaactttcccaacaaagagaaacttgttctagtccgagctgacattgctagactccctttcctttcgggttcagttgacgctgtccatgctggtgctgctctgcattgctggccttcaccatcctcagccgttgctgagataagccgtgttcttagacctggaggagtatttgtggccaccacatttatctatgacggtccattcagttttatccccttcttgaagaatcttcgtcaggaaataatgagatattcaggttctcacattttcctaaatgaacgtgagcttgaagatatctgcaaagcctgtggtctcgttaacttcactcgtgttagaaacgggccatttataatgctatctgcaacaaaacccagctaagctcaccctctttaaagtatatatacttttctgtaaaaaattggtataaagttataaacattataacaacttgagttccatacagtatacctaatttgtaaagctttttgcaaatgttcctataaactagcttgaaaattggggttaacatggtttcataaggggtcttcttcttgtg

SEQ ID NO: 464 - DNA, 1235 bp, Arabidopsis thaliana
  Clone ID: ARATH-23APR03-CLUSTER206411_1
aacaaacccaacaatctttgaaaacaaatcaccctttcgtttttatttaaatttcttgggtcgtttcttaaatttgtatgtgtttattaatggagatcaacaataatgccaacaatactaatactactattgataatcacaaggcaaagatgagccttgtgttgtcaacggatgctaagccaaggttgaaatggacttgtgatcttcatcacaaattcatcgaagccgttaatcaacttggaggacctaacaaagcaacacctaagggtttgatgaaggttatggagattcctgggcttaccttataccatctcaagagccatttacagaaatatcggttagggaagagcatgaagttcgatgataacaagctagaagtttcctctgcatcagagaatcaagaagttgagagtaaaaacgattcaagagatctccgaggctgcagtgtcaccgaagaaaacagcaatccagctaaagaagggctacaaatcacagaggctttacaaatgcagatggaagttcagaagaaacttcatgaacaaatcgaagttcagaggcatttgcaggtgaagattgaggcacaaggaaagtatctacagtccgttttaatgaaagctcaacaaactctcgctggctactcatcttcaaatctcggcatggattttgcgaggaccgagctctctagattagcttcaatggtgaacagaggctgtccaagcacttcgttctcagagctaacgcaagtagaagaagaagaagaaggtttcttgtggtacaagaaaccagaaaacagaggaattagtcagctgagatgttcagtagagagctcgttgacatcttcagagacctcagagacaaaactggatactgacaataaccttaataaatcgattgaacttccgttgatggagatcaactcggaagtgatgaaggggaagaagagaagcataaacgacgtcgtttgcgtggagcagcctctaatgaagagagcttttggagttgatgatgatgagcatttgaagttgagtttgaatacttacaagaaagacatggaggcgtgtacgaacataggactagggtttaattaaaaaaaaaaacattttactaaagttatataaaaatgttttaaaagaatccagtaatatatatgcgtagatttctatcgattattgtagagattttgtgagtaagtcgtggtgaagaagaacgcatgggaataaaaaaaaaaaaaaaaa

SEQ ID NO: 465 - DNA, 1272 bp, Arabidopsis thaliana
  Clone ID: ARATH-23APR03-CLUSTER20654_1
cacgcaggcaaatgtctcgtaatttaatctatagaagaaacagagctctctgttttgttttaatcttgttctgcttcccttaccggtttggcgctagaaacacgccggaggcggaacaatccacagcaaaagcaactcaaataatacacgtcagcaattccacgtggcatgatttctctcgtcttgtagatgtccaaataggtagccacgtcagcggcgtatcagagctcaaaagatacctccaccgattcggttacgtcaatgatggctccgaaatattttccgacgtgttcgatggtcctctggaatcggcaatctctctgtatcaagaaaatctcggtttaccaataaccggaagactcgacacgagtacagttactctcatgtcgttaccgcgatgtggcgttagcgatacgcacatgaccatcaacaacgatttcctccacacaacggcgcattatacgtatttcaacggtaaaccgaaatggaaccgtgatacgctaacctacgctatctccaaaactcacaaactcgattacttgacgtcagaagacgtcaaaaccgttttccggcgagctttttcacagtggtcaagcgtgattccggtgagtttcgaggaagtcgacgatttcacgacggctgatttaaagatcggattctacgctggtgatcacggtgacgggcttccgtttgacggtgtacttggaactttagcacacgcttttgcgccggagaacgggaggcttcacctcgacgcggcggagacgtggatcgtcgacgatgacttgaaaggatcttcagaggtggccgttgacttggagtctgtggcgactcacgagatcggtcacttgttgggattaggacatagctcgcaggagtcggcggttatgtatccgagtctccgaccgaggaccaagaaagttgaccttacggttgatgacgtggcaggtgtacttaagctatatggtccgaatcctaaactacggttggattcactaacgcagtcggaagattctattaaaaacggcaccgtatcacatagattcttgtcggggaattttatcggttatgttctgttggttgttggtttgattcttttcctataggtttataggcataaaaaatactgtttttattcatttatttttaattaaatgtacatatatttttcaactatgtaaatgtaaatatatagttgaacaaaaaaagatgtacatatatagttaggcttataattaggtttatggtcttgatgaaaaaaaaaaaaaaaaa

SEQ ID NO: 466 - DNA, 1382 bp, Arabidopsis thaliana
  Clone ID: ARATH-23APR03-CLUSTER20703_1
ttttcatcatcatctcagtctctctcgaagtttcaagttcgcgactatggcagcagcgatgtcttcttcttgttgcgcttcctcgcttcgtttaatcccattcaaacggaccttgttttcttcaatccattatccggccaaaacccttcttctacgaccactaaaaccgtcggaagttccttcctttcgccggacgatcatcactttccagaaaatttcaaccgggattgttcctccaccatcggcttcatcatctccgtcgagctatggagaccttcaaccaatcgaagagcttccaccgaagctacaagagatcgtcaagcttttccaatcggtacaagagccaaaggctaaatacgagcagcttatgttctacgggaagaatctgacacctctcgattctcaattcaagacgagggagaataaagtagaaggatgtgtttctcaggtttgggttagggctttctttgatgaggaacgtaatgttgtgtatgaagctgattctgattcggttctcactaaagggttagctgctctattagtcaagggtttatctggaagacctgtccctgagattttgaggataacacctgatttcgctgttcttctcgggttgcagcagagtctgtctccttctagaaacaatggattacttaatatgcttaagctgatgcagaaaaaggctcttcatttggaagtcaaaggtgaggaagattcaagttctggagagagttcagaatccagctttgtgtctattcctgagactaaggacgaagctaatgttccggaggtggatttggagtctaaacctgatctagttgaggatttgggaacagaaaagattgatgattctgagagtgggtcaaatgttgttgctttagggagtagagggatgaggataagagagaaattggagaaggagctagatcctgttgagttagaagttgaagatgtttcttaccagcacgcaggacatgccgctgttagaggtagtgctggtgatgatggggaaacacatttcaacttgcgaatcgtttcggatgctttccaaggtaaaagcttggtcaagagacataggctgatatatgacttgttgcaagatgagttgaagagcgggttacatgctctctctattgtggcaaagactcctgctgaggtttgagggtgtaacattggaagaagtcaggtcctgattcttttacttcttttggtccatttgctttggatattgttctctggaccttctaataatgttaagagctcgatcaggattgtgttaaatgagagatagatattgaaggatataaataatgttttcgccaatcgccacatgattcaccattttcaaactgatttccctttaaaaaaaaaaaaaaaaaaaa

SEQ ID NO: 467 - DNA, 1806 bp, Arabidopsis thaliana
  Clone ID: ARATH-23APR03-CLUSTER207299_1
atcccaaatcacactcaccactctctcttctcaacatttttctccaacaaaaacaaaaaacaatgactccttttgctctgttcctcttcactctccttgccctttcaagttcatgttgctctgccattggtccacaaaacaacagaacagtgttagcacttgcaagcagaattgggatcaactatggaaaattaggcaacaatcttccttttccttaccaatcaatcaacctcatcaaaaccattaaagcaggccacgtcaagctctatgacgccgatccagaaaccctaaagctcctctctacgaccaatctttacgtcaccatcatggtccctaacaaccagatcatctcaataggtgctgatcaagccgctgctgataactgggtcgccactaatgtccttccttttcacccgcaaacccgaatccgattcgtcctcgttggcaacgaggtcctcagctacagttctgatcaagacaagcaaatatgggctaatcttgtccctgccatgcgtaaagtagtgaactctcttagagctcgtggaattcacaacatcaaagttgggacacctcttgccatggacgctcttcgttcgagttttcctccttcgagtggtacattccgggaagatatcgctgttccgatgatgttaccgttgttgaagtttctcaatggaacaaactctttcttcttccttgatgtttacccttacttcccttggtctactgatccggttaataaccatttggattttgctctgttcgaatcgaattctacttataccgatcctcaaaccggtttggtttacaccaatcttctagaccagatgctcgattcggttatctttgcgatgaccaagctcggttatccgaatatcagtctcgcaatctctgaaaccgggtggcctaatgacggtgatatccatgaaaccggagctaatattgtcaatgccgcgacgtataaccggaatttgatcaagaagatgactgctaacccgccactcggtacaccagctaggcgcggtgcacctataccgacgtttttgttctctttgttcaatgaaaaccagaaacccggttcgggaacagagagacattggggaattttgaaccctgacggtacaccgatctacgacatcgatttcagcggtacaagatcgttttctggttttgattcgttgcctaaaccgagtaacaatgttccgtttaaaggtaatgtatggtgtgtggcggttgatggggccgatgaggcagagctagggcaggcgcttaactttgcttgcggaagaagcaatgcaacatgtgcagcgttggctccaggaggagaatgctatgcaccggtgacggttacttggcatgcaagctatgcgtttagctcgtactgggctcagttccggaaccaaagctctcaatgctacttcaatggtttggctcgtgagaccacgaccaaccctggaaatgagcgttgcaagtttcctagcgttacattgtgaggctgcctcgtgactcaggcgtgtggaggaaaggatcaaaagaatcattcgcattaagttgattatatctcttgataattatgattagtttcctttttattccaagtttttactctttgtgtcccattgttgtgcaagatctataataatctatagaaatttgttcctcatcccttctcatttctcatatatctagtagtttattaatgttctgaaggaaattatgagaattttataactaattcaagaacatgttttgcgatcattactatacgagaaatatgaagtttttgatccaaaaaaaaaaaaaaaa

SEQ ID NO: 468 - DNA, 567 bp, Arabidopsis thaliana
  Clone ID: ARATH-23APR03-CLUSTER20758_1
tctccatttttttttgctcatcttcttcaacaatggcggaaccaaagacaaaagttgcagaaatcagggaatggatcatcgaacataagcttcgtaccgttggttgcttatggctaagtggtatctctggttcaattgcttataattggtctaaacctgccatgaaaaccagtgtcagaatcatccacgctaggttgcatgctcaggcgctgacattagccgctctggctggagcagctgcagtggagtactatgatcacaaatctggagccactgatcgaatcccgaaatttctgaagcctgataacttaaataaggactagaaatctccgtaccatggctctgcctattctgttatttgtaggcatcttcgtatccaatgaagacttcatgttttgtaagttcttttggtatttgaaatggctgatacctattctgttatcttaggcatattatagccttgcagattatctgcaacattcgggatgcgaaattgtaagagagattcgtacagaaactaaatgaataaattatatgtattcgatctaaaaaaaaaaaaaaaggccg

SEQ ID NO: 469 - DNA, 1166 bp, Arabidopsis thaliana
  Clone ID: ARATH-23APR03-CLUSTER207654_1
cggacgcgtgggcgaaatcgtcatcttccctgttttgctgtttagtctgcaagagaaatttcagattccggcggagaaagctaacgattcttcaatggatcccacttcttcttcttcctctgctcttagatggaaaattcttcgccaagcgcttctccgtagatctgattctcaatctcaaactgagaccaaacggatttcaaggaaagcaactcaaggattcaacttgattccttgtcaagtggtggactcttctcctcaatcggataagtctcgtgaagcatccgtttgctacacacttcccatcactggctctcccaaactctatctaacacaaagagtggataattgtagtgatctcaatgacttcgagatatctaatcgatacaacattgataatactggacttgtctgtcagtggccctctgaagaagtactagcctacttttgcaagtctcagccagaacgtttcagaggtaaaagagtaattgagcttggatcagggtatggattagccggtttagttattgcagctgcaaccgaggcatcagaagtggtaatctcagatggaaacccccaagtagtcaattatattaaacgtaacatagaaaccaactccatggcatttggtggcacaagcgtaaaagccatggagttgcactggaatcagcatcaactttcagagttaaccaacactttcgacatcatagttgcaagcgattgtacatttttcaaggaatttcataaggaccttgcgagaaccatcaagatgctgcttaaagccaaaaaagcctccgaagcattatttttcagtcctaagagaggtgactccttggaaaagttcatgaaggagattaaggacattggtttacactacattttaactgaaaactacgatgcacaagtttggaagcgccatgagacgcttgtgaaaggagacgaagcttggcctaactatgacaagaatcattgctaccctttacttattcaaattactaatcagatttagtcaagactctcatatttgcggctatggatggggaataaacgcagaggtacacctaatctctcaagctttttttttaacatattgtgttgtatggatatcatatcaagtgggtggacttgaaagttgaaaccttttgacccaaaaaaaaaaaaaaaaa

SEQ ID NO: 470 - DNA, 2104 bp, Arabidopsis thaliana
  Clone ID: ARATH-23APR03-CLUSTER207656_1
acaatcagtctctttctctaaaccttcaccaatttctctctctctctcttgcccttttacacagccatttgttagattcctctctcaataagcctctcttctcttttctattggagtttttgcattagactgattagctcaaagcaaaacccataaaccaaaatcttctctttgtgttcttgtttttttcatttctccaatttttctttgtggaggaggtttttcactttttgtttttctgggtttttattggctttcttctgcaaaaaccataactttattttttctgggtttttcttcgtaaagaagcttcccaaaacccagttttttgtataagctcaattagtagcaaacaagaaaaaacaatcttaaactcaatttcacaaaatctctgattcttgtgaaaatttgtatattgcaaaactttggaaaaaaaagagaaaaaatatggggaagcaaggtccttgctatcactgtggagttacaagtacacctctatggagaaacgggccaccagagaagccggtgttgtgcaatgcgtgtggttcgaggtggagaactaaaggatcattagtaaactacacacctcttcatgctcgtgctgaaggtgatgagactgagattgaggatcatagaactcaaacggtgatgattaagggaatgtctttgaacaaaaagattcccaagaggaaaccatatcaagaaaacttcacagtgaaaagagctaacttggaattccataccggtttcaagaggaaggctctggatgaagaagctagcaatagatcgagttcaggatcggttgtatcaaactccgagagctgtgcacaatctaatgcgtgggactcgacttttccttgtaagagaaggacatgtgtgggacgtccaaaggcagcttcttctgttgaaaagctcacaaaggatctttatactattctacaagaacagcaatcttcttgtctctctggtacttcagaggaagatttgctttttgagaatgaaacaccaatgctgttaggacatggtagtgttcttatgagagatcctcactcaggtgctcgagaagaggaatctgaagctagctcactcttagttgagagcagcaagtcttcatcagttcattctgttaaatttggtggaaaagcaatgaagcaggagcaagtgaagaggagcaaatctcaagtcttaggaagacatagttcactactctgtagcatagatttgaaggatgttttcaactttgatgagttcatagaaaatttcacagaggaagaacagcaaaaactgatgaaattacttcctcaagttgactctgttgatcgtcctgatagcctcagaagcatgtttgagagttctcaattcaaagagaacttatccttgtttcagcaacttgtggcagatggtgtttttgagacaaattcgtcttatgcaaaacttgaagacattaagacacttgcaaagcttgctttatcagatcctaacaaatcccatttgttggaaagctattacatgctcaagagaagagagattgaagactgtgttactacaacatcaagggtctcaagcttgagtccatcgaataataatagtcttgtaaccattgaaagaccttgtgaaagcttaaaccaaaacttctcagagacaagaggtgtgatgagaagcccgaaagaagtgatgaagattagatcaaagcacaccgaagagaacccacgcgtccgcccacgcgtccgcggacgcgtgggctgtggtggacctctggtgtttagctatgaagataatgatatttctgatcaggatcttcttcttgatgtgccgtcgaacggctcattccctcaagcagagcttctaaacatgatatgaaagaagataaagtttctcaaactcattggttaaactcattgtgtttctcagaacaaagacagactttttaagattatatatatatatatatatctctgttgaagagaaaactcttttgctctttaggcttttctgagaaaatgtggccaaatgagatttttatgcattagaaattgcaatttgcagatataaaaaaaaaggaatgatttttatgtaagggctctctttggtggtcttactatat

SEQ ID NO: 471 - DNA, 1502 bp, Arabidopsis thaliana
  unsure (1)..(1502): unsure at all n locations
  Clone ID: ARATH-23APR03-CLUSTER207676_1
aaaaagatatgccacgttatatcgtccccgcgtattagccacaatctatcgaagacgcagcaaagttaaagcttctcttattttccagacgaacactcgtgtgtgtggtggttttgcagccaccacaatggatgagaaagaagaagacccgatttcagttccttctcaatcccaactcaaaattcgtcttttttcctcgcgcgatttcttcttcttcttcttcttcttccgacaacaacaacgatggttcagtttcatcttccagacaaaacaaccgacagatgggttatgatccttcagaggaactctttggtgttgatttcaagcccaggttcatatctggtgattcgcgtgaaccaaggtcatggtttggtcctaacggtcagtacattcgagagcttccttgtccaacttgtaggggaagaggttatacttcatgttcaaattgcggaatcgagaggtcgcgattagactgccctcaatgcaaaggaaagggcataatgacttgtctcagatgtttgggggattgtgtcatatgggaagaatcaatcgatgaacgaccttgggagaaagctagatccagttctccatttagagtaaaggaggatgatgaggttgataatttagagataaagttcagtaaaaggcgaaaatcgaagcggatttatcagtcaccaactcctgaagttggacaaaagatcagccgatctctaaaaagtctcaatgccaaaactggactttttagtaagcgcatgaagattatacatcgtgatccagtgcttcatgctcaaagagtagctgcaattaagaaagctaaaggaacaccagctgctagaaagcatgcatccgaatctatgaaagctttcttcagtaaccctgtaaaccgtgaacagagaagcctatctatgaaaggaactaagttttactgcaagaactgtggacaggaaggccatagacgccattactgtccagaactaggcactaatgcggacagaaaatttagatgtcggggttgcggcgggaaaggccacaaccgtagaacttgtcctaagtcgaaatcaatagtcactaaaagcatttccactaggtatcacaaatgtggaatatgcggtgagagaggtcacaacagcagaacatgccggaagccgaccggagtgaatcctagttgcagtggtgaaaattccggggaagatggtgttggtaaaataacgtatgcttgtgggttctgcaagaaaatgggacataatgtaagaacctgtccaagtaaacaagtttcagacagtgattcttgtttagagcaagaaggttcttgaacctgtttatttggttaggcttggttttgctattgaagctgaaataaccaatcactgacaagtcctttttagcggatggatatttcgggtttataatcggaccaatcacttgagtcccgattggtcttttttgaactatctaaactcaaacaaaaactgaagtgagtttgnccaaaaaaaaaaaaaaaa

SEQ ID NO: 472 - DNA, 1345 bp, Arabidopsis thaliana
  Clone ID: ARATH-23APR03-CLUSTER207692_1
aaaaaaaccgtaaactcttgcgcgtcgtataaaacaacaaacctgaactagaatcgagagatattgttgcccccatttacatttctgcacgatcatcatcatggtgaaagagactgaatactacgagatcttaggcgtcaaaactgatgcttcagatgctgagattaaaaaggcttactacttaaaagcaaggaaagttcatccagacaagaaccctggagaccctcaagctgctaaaaactttcaggttttaggtgaggcttatcaggttctaagcaatccggataagcgagcagcttatgacaaatatggcaaagaaggggtccaacaggatgcaatggttgatcctgcagctgtatttggtatgcttttcggaagcgaagtctttgaagaatacgttggccagcttgcacttgcttatttggcatctatcgaagctgacttagaatcacatgaccctgaaatcagaaagcaaatgcttcaagacaagatcaaagctcttcaaaaggagagggaagacaagctcgccgctacattgaaaaacaaacttgaaccctttgtggaaagacaaacagatgaatttatcgaatgggcaaacgaagaggcaaagcggctttcttctgccggttttggcgaggcaatgatgcatactattggttacatttacacaagaaaagctgctaaagaaatcgggaaagacaagcgatatatgaaagtaccattcttagctgaatgggtgcgtgacaaaggccaccatatgaaatctcaagtgatggctgcttctggtgcggtttcgttacttcagttgcaggatgaagtaaacaagttgaatgaacaccaaggagagaacaaagaggaacatattcagaaagctattgaagctaaaatggatgctttgcttcaatctctttggcaaatcaatgttctcgacatcgaatccacgctatctcgtgtttgccaatctgtgcttaaagatccaagtgtttcgaagcccacgcgtccagctcgtgccataggactgaagaaacttggaacgatcttccagggtgctaagaagccgtacacgagaggaagcagcttgcgtcgggaagccaccaccgtgaaaatggacaccggaggttcttcaaaggcgacgtcttgaaactccggaacttaaaatgctgtttcttttattggttgaagttggatttgtccttcgttttttactttccccagttttgtagagattgctttctatgttaacttttttctcgtgtagatgttacatttaaggtggtgcattactgcattctcattaaaatcttttcgtcacattattcaaatttctcaaaaaaaaaaaaaaaaa

SEQ ID NO: 473 - DNA, 4095 bp, Arabidopsis thaliana
  Clone ID: ARATH-23APR03-CLUSTER20772_1
atgcagccaccatttcttctcctccccctcatcctcctctcttccgccttcggttcgccttccgccctaaaccaccacataagacgacgaagaagaaaacatgcaaccactagttcttctcctcctcttcatcctctgtttttccggtttaggtcaaccgggtatcatcaacaacgatcttcagactcttctcgaggtgaagaaatctttggtcacgaatccacaagaagacgatcctctccgacaatggaactctgataacatcaactactgttcttggaccggagtcacatgcgacaataccggtttatttcgtgtaattgctctaaaccttaccggtttaggattaaccggttcaatttcaccttggtttggccggtttgacaacctaatccaccttgatctatcttccaacaatctagttggtcccatcccaactgctctctccaaccttacttccttggagtctctgtctctcttttctaaccaactcaccggcgagattccgagccagctcggctccctcgttaatatccggtcgctaaggatcggagacaatgagcttgttggagatatcccggagacgttagggaacttggtgaatctccagatgcttgctctggcttcttgtagactcaccggtcctataccgagtcagctcggtcgtctcgtccgagttcagtcgttgatattgcaagataactatctcgaaggaccgattccggctgagttaggaaactgctctgatctcactgtgttcactgcggcggagaacatgctcaacgggacgataccggcggagcttggacgccttgaaaacctcgaaatactcaacctggcgaacaacagtctcaccggagagataccgagtcaattaggtgaaatgagccaactccagtatcttagcttgatggcaaatcaacttcaaggtcttatccccaagagttggctgatctgggaaatcttcaaactcttgatttatcggcgaataatcttaccggagagatacctgaagaattctggaacatgagtcagcttcttgatttggttctagcaaacaatcatctctctggttcattaccaaagagcatttgttctaacaacacaaacttggagcaactggttttgtctggaactcagctttctggtgaaatccctgtggaattaagcaaatgtcaatcgcttaagcagcttgatttgtcgaacaattctctcgctggctcgatccctgaagcattgtttgagctagtcgaactcacagatctttatctccacaataataccttggagggtacgttatctccttcgatatcaaacctcactaatctacagtggcttgtgttgtatcacaataacttggaaggcaagttaccgaaggagatcagcgcactcagaaaattagaggttctgtttctgtatgagaatcgtttctcaggggaaatcccacaggagattggaaactgcacaagcttgaagatgattgatatgttcgggaatcatttcgaaggagagatacctccttcaataggaagattaaaagagcttaacttgcttcacttgagacagaacgagcttgtgggtggacttcccgccagtttaggtaactgtcatcaactgaacatcttggatttggcggataatcagctctcgggatcaattccttcatccttcgggtttcttaaagggcttggaacagttgatgcttttacaacaattctcttcaaggaaatcttcctgattcacttatcagtctgaggaacctcaccagaatcaatctctctcacaacaggctcaatggtacgattcatccattatgtggttcgagctcatatctctcattcgatgtcaccaacaacgggtttgaagatgaaatccccctggagctaggaaactctcaaaatcttgatcgtctcaggttaggcaagaatcaattgacaggaaaaatcccttggacgttggggaaaatccgcgagctgtccttgttagatatgtcaagcaacgctctcacaggaaccattccgctacagctcgtcttgtgcaagaaactgacacacatcgatctcaataacaattttctatcaggtcctatacctccatggcttggaaaactttcacagttaggagagctcaagctttcttcgaatcagtttgttgagtctttacctactgaactgttcaactgtacaaagctgcttgtgttgtctcttgatggaaattcgcttaatgggtcgattccacaagagattggtaacttgggagctctcaatgtccttaaccttgataagaaccagttttcaggttcacttcctcaagctatgggaaagctcagcaagctgtatgagcttcggttatcaagaaacagcttaacaggagaaatcccagttgagattggacagcttcaggatcttcaaagtgctttagacctcagctacaataacttcactggagatataccttcgacaattgggacattatcaaagctggaaacacttgatctttctcacaatcagcttacaggggaagttcctggctcggttggggatatgaagagtttgggatatctcaatgtttctttcaataacctcggagggaagctcaagaaacagttctcaagatggccagctgattcctttttaggcaacacaggtctttgtggaagcccactaagtcgctgcaacagagttagaagtaataacaagcaacaaggtcttagtgccagatcagttgtgataatatcagcaatctcagcattgacggcgattggcttgatgatacttgtaatcgctctcttcttcaaacaaaggcatgatttcttcaagaaagtgggtcatggaagcactgcgtacacatcgtcaagctcttcttcacaagctacacacaagcctctctttcgaaacggagcttcaaatgtccgatatcaggtgggaggacatcatggaagctacacataatctaagcgaggagttcatgattggatcaggaggctctgggaaggtttacaaggcggaacttgaaaatggtgagactgttgcagtgaaaaagattctctggaaggatgatctcatgtcaaacaagagcttcagcagagaagttaagacgcttggaagaatcaggcataggcatctggttaagctaatgggttactgcagcagcaagtcagaaggattgaatctgttgatatatgagtacatgaagtaacggaagcatctgggattggcttcatgaggacaaacccgtgctgcgaaaaaaagaagaagcttttataccgggaagcaagcttaagaatggcattaggattgggtcaaggagtagagtaccttcatcatgactgtcttcctcctatcgttcaccgttatatcatatccagtaatgtgctcctcgattcaaacatggaagcgcattgaggagatttcggtcttgcctaggtctttactgagagctgtgatgccaactcagattcaaaaaatgggtatgcatgctcttatggatacagagctcgagagtatgcttagtggttaaaggctacttagaagacctacgtttactgtatcaggagagtattgatggagattgtgactgggaaaatgccaaccgactcagtgtttggtgcagagatggacatggtgagatgggttgaaacacatcttgaagtagcgggttctgcgagagataaactcatagatccaaagcttaagccacttctgccatttgaggaagacgcagcttgtcaggtgcttgagattgcacttcagtgcacaaaaacttctccccaagagagaccatcttctaggcaagcttgtgatagtcttctccatgtctacaacaacagaacggccggttataagaagctgtaaaaaaactgacacctgcaaatgtctttggagacatgaaaactgccaactttaaattttttcttctgaaattctgtttctgctttgtatagatgacatggtttctttcagtacaaagattgtttcgaacttgatccatctgctacaaaaacacttattgtcttttgcatgtacttgtaatacaacttaaaccaaattttaaacagaatgattctgattctgattcagaaaaaaaaaaaaaaaa

SEQ ID NO: 474 - DNA, 1529 bp, Arabidopsis thaliana
  Clone ID: ARATH-23APR03-CLUSTER20793_1
accgaaaaattcgatattcgccatgagagaagaacaagtctctgattgcggatcgattactcttgaagaatggaatggttcttcttccactaagctattcaaaacagcaaccatcactgcctcctcttctctctctatccaaaggtctgctaatcgctttaatcatgtgtggagacgagttcttcaagcatttgtaccagagggctttcctggcagtgtaactccagattatgtagggtttcagttatgggacacattacagggcctctcaacttatacaaagatgatgctttccactcaggctcttttgagtgcaattggcgttggtgagaaatccgcaactgttataggtgctacatttcagtggtttctgagggattttactgggatgcttggaggtatattgttcacattttatcagggttccaacctggatagcaatgcaaaaatgtggcgcctagttgctgaccttatgaatgatattggaatgctaatggaccttctttctcctttgtttccatctgcctttatcgttgtggtttgcttagggagcctatcaagatcatttactggtgttgcaagtggagcaaccagagcagctctaacacagcactttgctcttcaagacaatgcagcggatatatctgctaaggaaggaagccaagagactatggcaactatgatgggtatgtcattgggaatgttgctagctcggtttacctctggaaaccctatggctatttggctttcgtttctctctctcaccgtgtttcatatgtatgcaaactatagagctgtccggtgtcttgtattgaattcattaaactttgagaggagttcaattcttctaacacatttcattcaaactggccaagttctctctcccgaacaggtttcttcaatggagggtgtattgcccttgtgggccacttcattgaggtcaacgaattcaaagccattgcataagagagtgcagttaggtgtgagagtttcctctctccctcgtctagatatgttgcagctgctaaatggtgttggagcttcttcatacaagaatgctaagtatttattggctcacataaagggaaatgttagtgtgatcttgcacaaagattcaaaacctgcagatgtgttgaaatcatatattcatgccattgttttggcaaaccttatggaaaagagcacatctttttattcagaaggagaagcttggattgataaacactatgacgaattgctccacaagctgagatcaggaggttggaaaacagagcgtcttctttcgccttccattacttggagagctaattggatatctcacacttccgctgctaagttcgactgagctttatcgcctttcaagatcaaaatagtttgttaactcgttgcaaacatacaaaaatatgttagttctaagtcatgtaaaacatgtaaccgataccggtttaaccgtaaaatgtcggtttaacattgtataacgtttgttattaatggaaaattaaagaattataataaaaaaaaaaaaaaaa

SEQ ID NO: 475 - DNA, 1738 bp, Arabidopsis thaliana
  Clone ID: ARATH-23APR03-CLUSTER20823_1
gaaaattgtcttgtttggttctaactttttcttatgtaacccacccacatgcttgttcttctttctatcatcttcttacacgactacgacttgtctttctttaccctttttttttgttttgtttaaagtttctctctttgtgggttcttgttgttagagaaatcagctgcctcagatcagagcttggttttggatttaggattgtttgttaggttttacaatggactccccacaatctgttgtttcaccattcaagattggtgagtcagagaatgagaactcaaattctgtgcagagttctggaaaccaatcgaatggcataaattccaatgggaaagattctaaaagttgtggccggcaagaccttgttggtgctcttgaggtttatgtccatcaggcaagggatatccataacatttgtatatatcacaagcaagacgtttatgccaagctttgccttacaagtgatcctgataagtctgtctcgaccaaaatcatcaatggcggtgggaggaatccggtttttgatgacaatgttaagcttgatgtcagggttctggacacttccctcaaatgtgagatttacatgatgagcagggtgaagaattatcttgaggaccagctgcttggttttactctggttcctatgtcggaactgctcttcaagaatgggaaactcgagaaagagttctctctttcttccactgatctctaccattcgccagctggttttgttcaattgtcactctcctattatggatcctaccctgacgtgatggctattccctctatgccttcgtctgtttctattgatgaaactaccaaggatccagaagggtctgaatcagttccgggtgagttggataagatagagtttccagatcctaatgttgctaatgaaaatgagaagatggtttccgagtattttgggatctcttgttccactattgactcagaaacttctgacagcttggttacttccgatgctgagaatcatgtgactaattctgtcacttctatactgaagcaagattcacctgagagcagcaatgcaacaaatggagctgcttctcctcacgcttcagctcactccgccacagaaacaccaaaccatgaacatctatctgtcgtgaactccaaagcgagttcccaggagtcagagagcgaggcttctggtgagacatctgaggagaagactgtgaaatccgtcctcactgtgaaggttgagccagagtcaaaggtggtgcagcaggatatagtcgacatgtacatgaaaagcatgcaacagtttacagattcactggctaagatgaagcttcctctggacattgacagcccaacaaaatcagaaaattcaagctctgattctcagaagctgccaacaccaaagagcaacaacggatcccgtgtgttctatgggagcaggcctttcttctgagcatctcttttaccaagttcagagaaagaacgcaggtcacccttagacttttctaatgaagaaagactaatcctaatgatgtaattttataatgtactatttcatgttgtatctcccatctggtcagcttgatgctttagttgatgtgagttattattacgtatcactagcctttactctattagaactatgtacgcattatatgaacttctaaaaaaaaatcatgtttgtattttctgagttactgcgttttacatccacaagaatctttaaagcatagtgataaatgcttagattgct

SEQ ID NO: 476 - DNA, 1861 bp, Arabidopsis thaliana
  Clone ID: ARATH-23APR03-CLUSTER20840_1
actcttaatctttaaaaaaaagaaaaaaaaaaacagaacaatttcttcttcctctgggatccataagttttgaggtatgttgttgctgattttgtccttttatctctgcaaataacagagaagataaatgaggattttctcctaggttgaagttttatattctcgtcgttagggcttcatagagtgtattgcgaagccaccgattcaatgggatttcagtaccttgattgaattggacacttattcggccaaaaatactaaaaagataaagtaaaaaggatcacatgtaaatgtatctcagacttttcaattttggtggtcagtgtctgatggagtgtaatgcaaagccaccgtttcaatgggaattggaaaacttgatatcttttggcacttctacagctgaagttcctagaaagctaaagccaatggagtgggaaattgatggatttgattgcacctctctgtattcttcaagctttgatgcagtagcttatggtggtagttcaggttctgatatagctcatgctttctctaaaagctcaaagtcaacttccattagctcttcatcagctgaagttagaacacacaattttacatcagaaactggtgaaagtcttcctggagaatttgcaaaggggattgatacttctccaactcttgaactttcttttggctctggtgatccggttctcggtttaaagcttggtaaacgaacgtactttgaagacttttgggaagtggagaatgctaaaggtttgggacttcccgtgagccttgcttcgtcttctgtttctccggtgaagaaatcgaaatccattcctcagaggttacaaactcctcactgtcaagttgaaggctgtaatcttgatctttcatcagctaaagactatcatcggaaacataggatttgtgaaaaccattcaaagtttcctaaagtcgttgtgagtggcgtagagcgtcggttctgccaacaatgtagcaggttccactgtctctccgagtttgatgagaagaaacgtagctgtcgccgacgtctctcagatcacaatgcaagacgtcgcaagccaaatcctggaaggacatatgatgggaaaccacaggtggattttgtatggaacagatttgcacttatccatccaagaagtgaggaaaagtttctatggcccagttcaaagcctgtaccatcaagagtcttaatgccgcagcctgcaaagaccgagatttccaataagctgttcaccgagcacagtagatttggattgttggaccccaaaacaaaatccgcaagagcggagttattcagtaaagaaaaggtcacaatctcttcacacatgggtgcttctcaagatcttgatggtgctctctctcttctgtcaaattcaacaacatgggtttcttcctctgaccaaccaagacgttttacccttgatcaccatccctcaagcaacctccaacccgtagctaaccggtctgcggctcaactcagttcagtgtccggctattggcagccggacccacccgcagttgaaggcccgaccgctctgcatagaaatggggcaggccagtttaatgaaaactacttcagcttgaaccagttttataactgaaagctgtatgcctttaaatcctatttaggatcaagcaagctagtgataagttaagataggagctgtgaaacttgcaagacaccaaatcctctcttatttctttgtccaaatattttcatgggttagagagctttgacaattgtctttaatatcaactttatcgtgttatacattaggattataaatcttgatggtgtactacgaaataaaaaaaaaaaaaaaaaagtattatatgaaaaaaaaaaaaaaaaaaa

SEQ ID NO: 477 - DNA, 1056 bp, Arabidopsis thaliana
  Clone ID: ARATH-23APR03-CLUSTER20846_1
gcttgaaaatgaaatctggtttaaatagtttctctgtttggtttttctgttttaattaatttacgggcaatggaagcattgagagcgtcctacggcgactcttcatcggattccgataccgatgatctttctccggcgagtcccgttactgcaaattctggagagaaagattcgatttccttgcctcctccaccgcttgcgcttctcgattccattgtatccacaggttcactggatttcttctcaacagagcctggagttcgtgtaagaaactttcctcatgtcgatggaaattacgctttgcacgtttacgtacctgtttgtatacctccactgccaaagaaggagattgtatgttttttaaagaaggttgcatcagttgttcctcatcttcatttggtagaggctgatgtgccactcagcattctatgcaaggatgatcagaagtttgagcgtgccttggggagagagttccacataagcttaggaagaaacgttccactacgtgttcatcagattaactcggtgatttctatgcttcggcaaaagcttcagttgcagaagagatacttgatagatttcaataagtgggaagtctttgtgaatgatgaccatactcgctctttcctttctttggaaatcactacttcaggactatccgagataagtaagcaaattgatgctgttaatgaagtttacaagctccacaatctgccggagttctacaaggatccgcggccgcatatatccttggtctgggcgttgggtgatattagaacttccctaaagggagctgttgacgtggaacttaggaagcttagagcaggtggttgtgtgcagaatcgtatcttcacctctaagttttgtgggatcgagtgtaagataggaaacaaaacacacaaaatatgtaaactcccagatgaataagaaaatcccaaatttctgtgtttgcagaccaatcaggtatgcatttgtaacgacatagaaggatgagttgatctgtgttcttgggtattccataatatatgtctcttcatagaaaaaaaaaaaaaaaaa

SEQ ID NO: 478 - DNA, 700 bp, Arabidopsis thaliana
  Clone ID: ARATH-23APR03-CLUSTER209511_1
aaaacttcttcttccttcttttcgctattaacacctgaaagaaatgagataggagagaacaaaaaaaatggtgggactaagtattgttttggagatgactaacaacaacaacaacaacaacaacaacaacaacaacaaaaaccctcttagtgaaggtgtcttaattagtcctaaagtcgtcaacaaagccaacattattgtcaccaccgccgtgacgacggacacgactaatctccgtcgttgttatcaagattctggatttctcgaacattgttttctctgtagacgaaaacttcttccagcgaaagatatctacatgtataaaggtgatagagcgttttgtagcgtggagtgtagatcgaagcagatgattatggacgaagaagaaagcttgagaagagagtattgttctttaatggatgttaagaagaagaaatttgattctccggcgactgcgccgtcgcgttaccgtcgagatccgagaaaccaagcaggcggtttcgcttactgaagcagagagaatcgcaaaaactgaaaacttatgttttgttgactttgttaccctttggctaatttttgtcgttttgtttaataacgtgtaaagccgaaagggtgttttgggtatttcagagctttctttttgcatatctatgggagcccctagtaaaatatttaatttcattaaaaaaaaaaaaaaaaa

SEQ ID NO: 479 - DNA, 1022 bp, Arabidopsis thaliana
  Clone ID: ARATH-23APR03-CLUSTER209588_1
tttttcttctcgctctggcgtttttctccccaattaaatcctcccaagcaaaccttcttcgatcttccttttgctggtaactccatttccaaggtttttctcgattctatagattgggaatcgaaattcactgtcttagacactgcaaccctaatatctgggggattttatttttgcattttgattttgattacttgaaggtcttgtttttttgaagaatagatagatatttcaattagcttctgttgatgattccgtgtaagatttgaattaggatgaagagaataaagttaggttggaaacgaagaaactatgtcaatggaaaagagaaatcctcccaagcaaaccttctccgatcttccttttgctggatggcacattctttgagtttcatttccaccaacttgaacagtttcgtccaccttaatcatcatcagtgccagagtttcggaacatttgtgtcgtcgccatttaaacgaaagaggagatttgcaagaagcatcagagctttgcaagagactgaaggtccaactccgagaagattgatagacattataagatctgttcctgaaatctctaggaattacttcaagaagccttcaagaagaacgcttttcggaggaatctccttgttaggtggcttctatgtcgcgcagactatctctctgtcgtttggagctttgggagtgaacgatgttatcgctgcggttttatgcgttcttttgaccgagtatgtgactagattctattatagccgcaccacggtcacttttccgattgctctgcttaataatttcaagatgggtttcacttatggtctcttcattgacgccttcaagctggctagctaactgtttgcaaaactgagtcaccagagatcccaagctcgtgtatttacttgttttttctcctcaaatgtaatattttgttgtcataattttgtagtgaagcaaccaaaaactttgaagttaaagagaatctgtagtatgcttaaaaaaaaaaaaaaaaaaaaaaaaaagaaa

SEQ ID NO: 480 - DNA, 1261 bp, Arabidopsis thaliana
  Clone ID: ARATH-23APR03-CLUSTER209687_1
ataaagtttgagaatttgaataaatggggtatgagcctgatccagatgctcttaggtggggtcttcatgatctggaggtttgtacacttacaaatgctggttcttgctctagtgtaacaaggtatgagtctggtggtggtggtactcaaggctatgttagagaaggttacaatcagcctgtgactggttatgttgacaatgatgcggtgattgctcagttttatcaagacgaattgtctagagttgctcgagccgaagcatcggggatcaatagtcttagtcctacttctgttgttgcacaagactggcctcatcctcatcaaggacaggaaaatcaaggggaagccattgatattactcaggaaagtgatattcttcataatcataacggtaacatggaagataagaatgttgcaaggataagatttgaaggagggcaaagttccccatctcgtgatgatgactcagtttgttctgtagaaatagaagaagaatcttggtcagaggttgggaagcgactgaaccaaatgatacctattgctcatgtgccgaaaatcaatggggaattaccgtcagaggatgagcagatttctgatcatgaacggctatttcagagattacagctttatggcttggtggagaacaagattgaaggagatggaaactgccagtttcggtcactatcagaccagctttaccgctctccagaacatcataattttgtcagagaacaagttgttaatcagcttgcatataatcgagagatatatgaaggttatgttccaatggcgtacaatgactatcttaaagcaatgaaacggaatggagaatggggtgatcacgttactcttcaggctgctgcggatttgtttggtgttcggatgtttgtgataacttcattcaaggatacatgctacattgagatcttgcctcattttcagaagtctaatcgccttatatgtttaagcttctgggctgaggttcattacaattcaatctaccctgaaggagagctgccgataccagaaggcaagaagaagaagaaatattgggtattctgagctctctttctgctgatggaggcacaaagttgaagaagtctgcatatcgatatgtttattctttttatctaacttagaataattagttgtagagagcaatattgctcttgtatatactgaacataatctcattagccatagtctgctcattcttttcaataaaagttgtattgatcttataaataagaggtttacattaa

SEQ ID NO: 481 - DNA, 1458 bp, Arabidopsis thaliana
  unsure (1)..(1458): unsure at all n locations
  Clone ID: ARATH-23APR03-CLUSTER209722_1
atatacacaaaccccttagagaaacaaaaagaatacaaaaagaagagagagattagttattaacttattcataataagtgtaattacttcgtatttacttttttttggttagcagtcgactagtaatcaataatgggttactgcgatggtaaatggacaccggtgattattatggttatgatcaattcagcgctgggtttagctaatgctttggttaaaaaagtactcgatggtggtgttaaccatatggttatcgcaacatatcgtcttgctatttcaaccctatttttggcaccaatcgcatttttttgggaacggaaaacgagaccgacactaacgctcaacatcttggttcagcttttcttcagtgctcttgttggggcaagtttgactcagtatttcttcctattggggctatcatacacatcggctacgttggcatgtgcttttattagcatgacgcctgcgattacattcgttatggctctaatattcagggtagagaagctaaacatgaaaagcaaagcaggtatggggatggtgatgggcgcgttgatatgcataggaggagctttattattaacaatgtacaaaggtgttcccttgacaaaacttcggaaactagaaacccatcagttgataaacaataaccacgctatgaaaccagagaattggataataggatgcgtacttctctttgcgggtagtagctgtttcgggtcgtggatgctgatacaagccaaagtgaacgagaaatacccttgtcaatactcgagtactgtcgtattatccttctttggcaccatccaatgcgcccttttaagcctcatcaaatctcgagatatcacggcttggatcctcacagataaacttgatatcgttaccattgtttacgcgggagcagtagcacaaggaatatgtacggttggaacgtcttggtgcatcagaaagagaggacctatctttacttctatatttaccccggtggggcttatatttgcaacactatttgatttcttgatccttcatcgtcaaattttcctaggaagtgttgtcggatctggggttgtaatcttcggactatacatattcttgttgggaaaagtcaggctaatgaaagaagagtgtgaaaagaagttaccttgtcgttttaatgaagatgatcaagaagaagatgatgatgaacaatacaaaaagggtcatcttatggttgttccaatgactccttgataagattagactttttttttttcttcttcttcacttcgtacattatttagtaaaaccattgaccggtgaaaattacatggactagtctaacaacggttcaaaaaactagtcacatgttttttttttttttgctttttcttttctttcccttttttttgttttgcaatgtaaaacttttattgcaataataaaaaaatctcctttgcaaccaaaaaaaaaaaaaaaaan

SEQ ID NO: 482 - DNA, 1675 bp, Arabidopsis thaliana
  Clone ID: ARATH-23APR03-CLUSTER21041_1
acttagaagaaccgcaaagaaaagaccttattcacacaggtcgtctttgcgaagctcatcgtcgacgatgaccatgatggatacagacgaagggaagacagtgatgtgtctgttaacagacccagaaggaactcatttaggttctgccatgtatattcctcaaaaggctggtcctttgcaacttactcagctcgtcaataggttcctcgacaacgaggagatgttaccttacagtttctatgtatcagacgaagagcttcttgtaccagttggaacgtacttggagaaaaacaaagtgtctgtggagaaggttttgacgattgtttatcaacaacaagctgtttttcgaattcgtcctgttaaccgttgctcacagacaattgctggtcacgcggaagctgttctttgtgtttcgtttagtcctgatggaaagcaattagctagtggttcaggtgatactactgtcaggctttgggatctctacactgaaactccattgtttacttgcaaaggccacaagaattgggttctcacagttgcgtggtctcctgatggtaagcatcttgtgagtggtagtaaatccggtgaaatctgttgttggaatccaaagaaaggagaactagaaggcagcccacttacgggtcacaagaaatggattactggtatctcgtgggaaccagtccaccttagttctccatgccgtcgatttgtgacttctagtaaagatggggatgcaaggatttgggatattacactgaaaaaatctattatttgtctcagtgggcacacacttgctgtgacttgtgtcaaatggggcggagatggaattatttatacaggttcgcaagattgtacgattaagatgtgggagactactcaggggaagcttattcgtgaattgaaggggcatgggcattggattaactcccttgcgttgagcacagaatatgttcttcgaacaggagcttttgaccacactggaagacaatatcctccaaatgaagaaaagcaaaaggcgctcgaaagatacaacaaaacaaaaggggattcccctgaaagattagtctcaggttctgatgatttcactatgttcctttgggaaccatctgttagcaaacaacctaaaaagcgcttaaccggtcatcaacagcttgtaaatcatgtctatttctcacctgatgggaaatggattgcaagtgcatcgttcgataaatcagttaggttatggaatggtatcacaggacaatttgttacagttttccggggccatgttggacctgtttatcaggtcagttggtccgcagacagtagattgcttttgagtggcagtaaagactctactctcaagatatgggaaattaggacgaaaaagttaaaacaagatcttcctggtcatgctgatgaggtttttgcggtggattggagtccagatggagagaaagtagtttctggtggtaaagatagagtgttgaagctatggaagggttaaaatggaagaccattttggagtttttgtttactcaaccaacacttattttacacatatttatctatttcgccttgtttggtttctacacatcaatgcttctctatgggcttctttttgatcttatgcttagtaaaacaactcttttttcttacctcaagttgttactgtcaaaaaaaaaaaaaaaaa

SEQ ID NO: 483 - DNA, 1628 bp, Arabidopsis thaliana
  Clone ID: ARATH-23APR03-CLUSTER21046_1
agatttttgttttgtttttaatcgggaaagatgaaggcggagacgatgacgctgcttctggtgaatctagccggaataatggaaagagccgatgaatctctgcttccaggtgtatacaaagaggtcggtttagctcttcataccgatccaaccggactcgggtcattaacgttgctacgatccatggttcaagccgcttgctatcccttagctgcttacatggccattagacataaccgagctcacgttatagctctgggtgcatttctctggtccgctgctactttccttgtcgctttctcttccactttcttccaggtagcagtgtctagagctctgaatggaattggtcttgctcttgtggctccagctattcagtctctcgttgctgactcaactgatgatgctaaccgtggtactgcttttggatggttacaattaacagcaaatattggttcgattttaggcgggctttgctctgttttaatagctccattaacctttatgggcatacctggttggagagttgctttccatatcgtaggtgtgatcagtgttattgttggtgtgctagttagagttttcgccaatgatccacattttgtgaaggatggtgttgatgtttcgaatcaaccaggttcgaggaaacctttttgtacagaggtgaaggatttggtccgggaagctgatactgtcataaagattcggtcttttcagatcattgtagctcagggagtgacaggatcgtttccttggtctgctctttcttttgcacctatgtggttggaactcattgggttctcacacgggaaaactgcattcttgatgggtcttttcgtggctgcatcttctcttggtggcttgtttggaggcaaaatgggagattttctgtctactcgtcttcccaattccggaagaatcattctcgcgcagattagttcagcctcagcgatcccgctcgctgcaattctcttgttggtcttaccagatgatccatctacagctgcaatccatggtctgatcttagtcctattggggctatttgtttcttggaatgctcctgctaccaacaacccaatcttcgcagagatcgttccagagaaatcaagaacaagcgtctacgcactggacaaatcgtttgagtctatcttgtcatcgtttgcacctcctatagttggaatcctggcacaacatgtttatggatacaagccaatccctgaagggtcatcgaggtcaacagagatagccacagatagagagaatgcagcatctctggcaaaagctctttatacatctataggactcccaatggcggcttgctgcttcatatactcctttctttaccgttcctatcctctagacagagatcgtgctcggatggaagcttttatagattctgagatgcgtgaacttcttccagaaagttccaatcgagacattgagttttcacaagaagaagacccctttgcaaaccatgttaaccccaatttacaagctagataataggaacatttgcaaaaagctttacaaattaggtatactgtatggaactcaagttgttataatgtttataactttataccaattttttacagaacaagtatatatactttaaagagggtgagctt

SEQ ID NO: 484 - DNA, 1644 bp, Arabidopsis thaliana
  Clone ID: ARATH-23APR03-CLUSTER21058_1
aaaaagcagaataaaccagcaaataaagattcagattgtgttcataccatcgcctggaataggtcatctccggtcaaccgtcgagttagcaaaagcgactcgtccgcagcgatgaccgcctttcgatcaccgtaatcatcatccattacccttccacttagccacgacgacgttgaaaccacctatatagcatctctcacgaccgcatctcaagatcgtctcaactacgaagccatctccgtcgcaaatcaaccaaccgacaatcaagagccatctcaagtctacatcgagaaacaaaagcctcaagttagagatgttgtcgcgagaatcttccattcaacaggagttaactcgccgcgagtagccggattcgtggtggacatgttctgttcatcgatgatcgatgtagctaacgaatttggagttccgtgttatatggtatacacatcaaacgctacgtttttgggaatcacacttcatattcaacgaatgttcgacgagaagaagtatgacgtaagcgagttggaagactcggtcaacgagttggagtttccatttttgactcgtccttaccctgtgaaatgtcttcctgatttcttcacttccaaggattggttacctttctttctagctcaagctagatgttttcgaaagatgaaagagtagaagataaacgcctttgcgatggtggaggagttgggattggcggttcagatacggaagttctttagaggagatatgttggtcggagggatggagatagtcacgacggtggatatagagagagcggtcaggtgtgtgatggagaatgatagtgaggttaggaatagagtgaaggagatggctgagaagtgtcacgtggcgtcgatggacggtggatcctcgcaggtggctttgcaaaagtttattcaagacgtgacagagaatgttgtctgatggtaggaagatggaaaatcacaggttgactctgagatacgagtgactgtttatgtatgtcatgtcacaaaatttcatgaatttgtcccataatactacgataggtgtatgtgtgtttttcttggggtcaaactatgtctatgtgtaagttctttagttgatgtaatgtatgtcgcgtttcttgaatttgtgtcataaagtgataataagtacgatggtgtggtgcgtctaacaaacacatgtaaccaaaaataaaaacttgtatcagaaagagaaaaaaggattggcggtggagatacgtaagtgcattagtggcgagtgaagggtcttccgccccaccgccaccccgccccccccgcagatggagaggcctacacggtgttgcagaacgcaagccaagcaggcaaagagccggttgagggactcgcccgcgaagtgtcacgtggccttgatggacggtgatcttccaagacggctttgcaaaagtttattcaagacgtgatagagaatgttgcttaaattggatagagagactcgcatggaattccagactcgcatgttgagagttcactatgagatcgatgactcaggtccatgtgttattatgtatgttatgtcgttttcgtttttctttttttgttggaatttgtatacgttgtgtacttgtggtttgtgtgtctttttaaaatgtttacgtaataaaatttg

SEQ ID NO: 485 - DNA, 1130 bp, Arabidopsis thaliana
  Clone ID: ARATH-23APR03-CLUSTER21059_1
aattattaagagcgtgaggaacgttgaattattttttaatgggtaatgcccaaacccctgggtttttttaaccatcgttatcccttcccagccctccaagaaggataaattcaatttttggtggtcttttcaaaagtggaaatacaacaaaacaatgtcgggacttagaagattggatggcaagatcgcaattataacaggcggagctagtgggattggagctgaagcggttaggttgttcacggaccatggagctaaagtggtcatcgtggacatacaagaagagcttggccaaaacctcgccgtttcgatagggctagacaaagcaagtttttaccgttgtaatgtaaccgacgagacggatgtcgagaacgccgttaagttcaccgttgaaaaacacggaaagcttgacgttctgtttagtaacgccggggtcttggaagcgtttggaagcgttcttgatttggatcttgaggcgtttgatcgaacgatggcggttaacgttcgcggtgcggctgcgtttatcaaacacgcggcacgttcgatggtggctagtggtactcgtggctccattgtatgtacgacgagtattgcggcagagataggtggtccgggacctcatagttacacggcttctaagcacgcgcttctcgggctgatccgatcagcgtgtgctggactggggcagtacggtattagagtcaacggtgttgcaccgtatggggttgccacggggatgactagcgcctacaatgaggaagcggtgaagatgcttgaagaatatggtgaagccctagggaatctcaaaggtgtggtgcttaaagctcgccacatcgcagaagcagctttgtttttggcttctgatgattcggtttatattagcggtcagaatctggtggttgatggtggttttagcgtcgttaagctcatgaccacgtgagaaacaactaaaaaatgagggcatagactctcttgacactttcattttatttcttgaataaaaattgaatttataagtactttcgatcattgtgttgtatgttaggctcttgagtttatataaaccttgagtttaatagtttactttttcttttagtttctcaattctatatatatactcttgttgtttt

SEQ ID NO: 486 - DNA, 812 bp, Arabidopsis thaliana
  Clone ID: ARATH-23APR03-CLUSTER21061_1
agtactcgccgtccatcccaaagcaaaagcttctccgatcttcctcgtttggtctcgaatattaagtttgcagtgaaatatgggtttcataatggaattcgcggagaatttggtgttaaggttaatggagaatccagaggaacgagacaggcctgccagatttttgttttcttcttcatcaacactcgctctgcgctgcgttcgaatccagaactctctgaccatcccaaagcaaaagcttcaccgatcttcctcgtttggtctcgaatattaagtgaaatatgggtttcataatggaattcgcggagaatttggtgttaaggttaatggagaatccagaggaacgagacaggaaagcgagggaacacatatatgagatgcatgagaggtgcaagaagattaaggagatgtgggcattgcctattcgtccttatggattctggacatttgagcgtcacaatgctcagcttcgttgggatcctcagatcagtcaggttgctggtcgaagggatccttatgatgatcttctcgaggacaactacactcctccttcttcctcttcctcatcttcagactaatcaaacaatgaaagaagatgtgttatgctgtctggatggatgcatgtttgttttcaagctatttttctcggagtttgtcctcttctgtttctatttgttcttaaggtgtctgggagcttggtacaaaactcaaataataacttcaaacttgtttacgaacgagaaagaaataatgctcattggttcttagtaaagttgttttgattctccatctcctccatttttgatactgat

SEQ ID NO: 487 - DNA, 841 bp, Arabidopsis thaliana
  unsure (1)..(841): unsure at all n locations
  Clone ID: ARATH-23APR03-CLUSTER2107_1
gaaagccgcttagcttcgtctgaaaaaactacttctctccgcctcgtcctcgcatctcctccaaatcgaaatcgctctctgcctctcttcgtctccgtctccgtctccgtctccatctctgtctccggtaagtcactgaaagatggggcgtgttagaaccaagaccgctgaagaaatcttctcgtcaagtcattgagaagtactactctcgcatgactcttgactttcacactaacaagaagatccttgaagaaggttgccatccatcccatccaaagagacctccgcaagcaagattggctggattctccacccacttgatgaaacgtatccagaagggacccagtccggtgggaatctcactcaagcttcaagaagaagagcgtgaacgccgtatggactttgttcccgatgagtctgctatcaagactgatgagatcaaggtcgacaaagagactcttgagatgcttgcttctctaggaatgtctgacacatccggcatctctgcagtcgagccacaacaagctatggcaccaatcgctgctttcgggcgggccacacggggcactctctacgatcactaagatggactcaactgacaatcatctacgattggctctcttttttggcaagttagggacaataaaatgcttgagtggctgttttttgtctcttctgattatgacttaaactttgtgtgatagtctatcgtatttttggtttataagttaaactgaatgtgagactctttcgtattaatggtttttgagttatgtggaaccaaaaatggagttcaaacaaaaaaaaaaggcangtatattatggaagaggaagggagaga

SEQ ID NO: 488 - DNA, 1014 bp, Arabidopsis thaliana
  Clone ID: ARATH-23APR03-CLUSTER21085_1
tcattgctcattggtgaagacaaagccgtaattcgtatgtcagattctgtggccggcgatttccctcccgatccacttctcgcctccggagccttcatctcctccgccggtgacggaaccctagacagtagtgcgaaacgacgaccgattcagggaggaatcggaatttctggttcgggagagagcgtacgcatcgggatggctaacggcactgatcaggtgaatcatcagacggaatcgaagtcgcggaagcgtgcggcgcctggagataattggttgcctcctggttggagaattgaagataagattcgaacttccggtgccacagctggttcggtggataagtactattacgaaccaaatacaggacgtaagtttcggtccaggactgaggtgctgtactacttggaacatggaacttctaaaagaggcaccaagaaagctgagaatacatatttcaatccagacgtgagtttacatgcttaaagattaaacctttcaccctggtttcaaacctgtgatgtgtattgaattttgcatttgcagcattttgaaggccaaggaagcaatagagtcaccagaaccgctacagtgcctccacctccgccaccgccattggactttgattttaagaatccaccagacaaggtaagctggtctatggcaaacgcaggagaagaaggttggatacctaatattggggacgtcaaggttcaagactcagtgagacgagattggagcactgcgtttacctttatcacaagccgaaaccctagtaaagtgtcggcttgaagactatgatgacctggtggcgatttttgggttgttgcatctatggtaagatacacagatatgttagggttacttaattggataattcttgtttagtcttcattcatcaatcatcaagttatgtgtactataatttttgtagcggtttttggaagaatatgataaggggatatgcaccaaaaaaaaaaaaaaaaaaacgtgataaccattcgacttttgact

SEQ ID NO: 489 - DNA, 1540 bp, Arabidopsis thaliana
  Clone ID: ARATH-23APR03-CLUSTER21102_1
ttttttgtcttttttttgcttttttttttttttttttttaaaaaagtcaaaaagttactacaaatatctttttgcctatttcaacaactataaaatactaggtgacttaaattttgattaccaatcgtattaaaaaaaaaaaaaaaaaaaagcgatcatgatgctataatgcgttacggtaatatacaaagcaatgggcaaatggccctcaaatccactcattgactaaataattcaatacataaatacaaacatcacataacctctcatcttctacttgttcatcttccattccaatctcaagatgcacgcgaagaccgactccgaggtgacaagcctctcagcttcatcgccgactagatctccccgtcgaccagcctacttcgtccaatctccatcacgtgactcccacgatggggagaaaacagcaacatcattccactcaacaccggtactcaccagcccgatgggatctccaccacattctcactcttcctcaagccgcttctccaagatcaacggctcaaaacgtaagggccacgctggagaaaaacagttcgctatgattgaagaagaaggtcttcttgatgatggagatagagaacaagaagctttgcctcgtcgatgttatgttttagctttcattgttggattctctctactctttgctttcttctctttgattctttatgcagctgctaaacctcagaaacctaagatctctgttaagagtataacgtttgagcaacttaaggttcaagctggacaagatgctggaggtataggaactgatatgatcactatgaacgcgacactgagaactgatatgatcactatgaacgcgacactgagtgttcatgtcacttcttctccgactgtctttggtgttcatgtcatctcttctcgcattggccctagcttctcgtttatcaatattggctctggctctgtaacagtggtggtgaatgtacttggagacaagattccactctatggaagtggctcaacattagtcccaccaccacctcctgcaccaattccaaaacccaagaagaagaaaggacctatcgttatcgtcgaaccaccagcgcctcctgctccagtaccgatgaggctaaacttcaccgttagatctcgagcttacgtgttggggaagttagttcaacctaagttttacaagagaatcgtgtgcttgattaatttcgaacacaagaaactcagtaaacatattcccatcacgaataactgcactgtcacatctatttaaaagaagaaaaaaatacacatgagagtgcggacggtctcgtattgggtagtgcgcctatggccctatacatgttacaaggtattgcgtgtggcctaccccaaagcagaagaatcatcatcagtgggtttcataaatttaatttacgtaattggtttgagagattttgttaatgatacacagtaaacgagaagattcacattttgttttctttttttaatatgttttttcacgcaaagtatcaaattcttatttaatggagaaataccttatagt

SEQ ID NO: 490 - DNA, 510 bp, Arabidopsis thaliana
  Clone ID: ARATH-23APR03-CLUSTER21128_1
agagcgacggcgaccggagattgatattgatcggcggagacagttataaatcttgcaaaatgtttcgaaggaacaggtttctgtctttgccaatggtgaatgtttcgaaggaacaggtttctgtctttgccaatggtgatcggtgcacttgtgattggtgtggtttcagggaaagctattttcgggcctccgcttgatcagtaactggaaagagaagctcgaacgagaacgagtggttgttgccaaggaagaagtcattgaaaagagctcagattcatcgtcaacctaaacatgtttgtactattttatgagcagagtgatgtaaatcataccgtgatttaattacggattacaacgaagagcttggacaaaatgtttgcacggaagcattgttaatttattgtacaaggtgtgatacttacagaaaggcaaaacagtgtaacaaatgtagtaagtgccttgcatttcacggttttgcaaattgttggagaataatacgaataatgtaac

SEQ ID NO: 491 - DNA, 550 bp, Arabidopsis thaliana
  Clone ID: ARATH-23APR03-CLUSTER21185_1
acatattgctttgttctataattaaacaaaactcataagaagaagaaaaacgatggctctctctggttcgcaaaagaaggttttcctacttgttatagccattgcatgtctctcctcttctcttgcagaggcgtggagctggagttctagtgacggaaacggctggggatggggatttgatggctctagcacctctacctcaggcccaggttcaactcctggtgattcaaactctggcggttcaaaccctggaggtccgaattctggtggttttagctccccttggggatcttgggggtggggttggggatcccacggctctggcagcccggccccatccgatgctttatttcttttagtgataataaagaagaagaatttgagtgattttctattctactatataatgtagaaagaacttttctactagaaaaataaaaattgctttcgtaataaatatgaggtggcagttagattgagtgtaatatttgcaatacccaaacttatgaaaaaataaaataaatattttaggtaaaaaaaaaaaaaaaaa

SEQ ID NO: 492 - DNA, 615 bp, Arabidopsis thaliana
  Clone ID: ARATH-23APR03-CLUSTER21201_1
actaatttcttaaaccctctcaacaatacgtaacaatggcctccaaatccgtcgtcgttttcctcttcctcgctctcgtggcttcctctgtcgttgctcaagctcccggaccagctccgaccatatctcccttgccagccactcctacaccgtctcaatcgcctagagccaccgcaccggcaccttcaccatcagccaatcctcctccctcagctcctaccactgctcctccggttagtcagccgcctactgaatctccaccagctcctccgacgtctacttccccatccggagctccgggcacaaatgttccgtctggagaagctggacctgctcagtctcccctaagtggctctccaaacgcagctgcagttagcagagtctccctcgtcggaactttcgccggagtggccgtgatcgccgctttgttgctgtagaggctattgacccatcgaatagattcactaggaattatttttgggttcattgtttgtccttttgttactatttaattatgtagtttatagtgttttatatgatgctttattatcgtgttaagaaaaaaaaaaaaattgttacaatttttttatagtttccttgattattggcattctt

SEQ ID NO: 493 - DNA, 905 bp, Arabidopsis thaliana
  Clone ID: ARATH-23APR03-CLUSTER21205_1
aaaaacaaggtctaaaataccttgtgaagaaaatggcgacggcgtttgccaacacgacttcaagctccaacctttacctccatcgctgccgtaaaaaccatcctcttccatctccgtcgttcttttcaccgttccggtcgtctccacttccttctcagacccttttcctcgtccccactccaaaacctgtacgacgcatcgcggtcgctcctctcggccctccaacgccgcctagtcccgacccacctccgcctaaaaacacgactgagctcacaagtcttgtgggagtagcgtcgatgattcaagaccgtgtaaagatctttctttcagtactaatttggatctctctcttcttttgggcttcggctttacaaggaagaggcagcaaaggtaatggtaaagggaagaagggttcacgcttcaaatagtattagttagattggtgtggtgatgatgatgatgattgatgaaaactcctctacacgtttgtgtatatatacagaggaaatattcttccaagtaaagcaaatttcttgtcagactacagttttatactagaaactagattgttctcttcttacgatatctctagcttagagctatagagattactctactgtgatgaaactaaagtagtttgcatttaagtcaaaatgccaaatcaatatcattgtttattgaaagctgtttcagattgtaaatgactagatgtgtttggtgtgtgcttgattcagccaaacggtaaaccgcaccgtttctttgatttgaatgtttgttgtataaaatgggcctttagatatgttatataacttgtttgggcttcaacatactcttttattgggcctctctatataatataatatttccaaagttgtattttaaaaacaaacaaaaagggcggccgc

SEQ ID NO: 494 - DNA, 1245 bp, Arabidopsis thaliana
  Clone ID: ARATH-23APR03-CLUSTER212148_1
actttggatttttgttatctttcccagaatcagacaaaacaagaaaaacgatgcgtcggtttgctgtaatttacatttttgtcttcttaatttcattttctggtaatgtaaaagcggccaatgcacccgctcaatcgccgagactcgccgtgaaacatcatcctccggcaaaatctcatcttgttatttctccgttaaaggctccgacaaagtctcctcaaacgcccactttacatccgccggcaaaatctcatcgtgttatttctccgtcgaagtctcctttaactcctactttacatcctccggtgatccaaaaatctccagaggcaccatcttcgacgaagcaaacatcgccttcaaagtctccggagaaatcctctgtttcctctccggcggcctttgtgactccatcgatatcccctgttctttctccggcgacttccccatcttggaccactgcatctccatcgaaatcacctgtttttactccgacgaattcccctgtttcctctcgaaccattgcttctccattgaaatcccctgtttcgtctccggcgacttcccctgttacatctcgtaccattgcgtctcctctgaaatcccctgtttcatctccggtgacttcccctgtttcctctccgactacatccacgactcctgtctctacgcctgcaacttcccctgtatcccctcccactacaattccagggaagtctccaatctctgctccaatgataagtcccaccacctcaatagaatcgcctgccaccaccccatcaaaccaaccaccagtctccgccgatgctccatatatcgcagcaacatcgccagtaacaacccctgatattccatcaactccagcgaatacgccggacatatttccttacggacgaggtccggtgagtagttctgcaccagcgacggcgaatctggctccagagactgctgaggttcccgccggagccaagtcggcttctaaattcgttcaacatgatctcctatgcatatttttgatcttagtagccactttggttcttccagctaactagctttttgtcagactataagaagactcttcagtatatcttgtaattctaatgaacaagatacttacttgttttgtattgattactttatagtatattaatgttggtagactatatttgttagtacaatatgttttcgtaaaaacaccattttcttattccatgatatagctatgaaaaaaatcaacaaacttaatag

SEQ ID NO: 495 - DNA, 543 bp, Arabidopsis thaliana
  Clone ID: ARATH-23APR03-CLUSTER21224_1
atatagctcaaagcataaataaacatcaatcatggagtactacacatttaccgaaaacgacgaagaacgtgtatcgagaaatcatcacgtgaagaacacgtgggtgaaagaacgttacgagagcgatgaagaagatggagaggtgaacaaactcatcctaaaggaagatgaagaaactaaagatatggtgacatcaccgagtggtgagaggatgatgttaacaagtaaggtgaggtatctcacctatggagctctcaaacatgacacggcggcttcggcagcttccggtggtggaggaagagccttgcctcatccgtcgaacaagtacaaccgtggccaccccaagtactacagatgcagaggttgaagtgaaaactctctgctgataaaataatttcgaattaattaattgtaataaccctatattgtataataagtttgttgagtatgtatactccatgcaacgtgtgttatctatgtgcttgcaattcctattcttatatatatctaggactaattagataagcaaaaaaaaaaaaaaaa

SEQ ID NO: 496 - DNA, 695 bp, Arabidopsis thaliana
  Clone ID: ARATH-23APR03-CLUSTER21232_1
gttattgaaaaaaaattcccagattctataaaaaagagaaatgcaaacatttgctcctggaacaagagtctaccacctcatcatcatcgtcttcttcttcttcttcttcttctgcttatcatcgttcttcgcttcaatcgtcatggctgatgaatataccggagaagcaacgggatcgtcggaagcaaaggttcacatcatctacaccgagaaacctaccgatgaagaacctaaaacctatcatctccgtaccctttcctctgctctcggcagtgaggaagctgcaaaagatgctttgatttacagttacaaggaagctgcttctggtttttcagctaagctcactcctgagcaagtcgctgagatatcaaaacaaccaggtgtgattcaagttgtgccaagccagacttatcagctgcacaaacctggtggtggtggtggtttcaagttgacctaacttgactttgtgtattctctacttctcaactaaacctgttgctttacagaaactagtctgttgttgtattgttgtgactttgaaccaagtatctaactaaaataatgttatgaagttgctttgattccattggttctgtgttgttgagtaactgagtttttgtcaatatattattctaagataaaaaaaaaaaaaaaaaaaaaagggcgcgccgcgtctataggatctccaagcttcg

SEQ ID NO: 497 - DNA, 916 bp, Arabidopsis thaliana
  unsure (1)..(916): unsure at all n locations
  Clone ID: ARATH-23APR03-CLUSTER21262_1
angncctnnggcccnnttacattnacagtnagtngngattnngaancattccnggaagntncntnntcccacaccgcctctgctctcttcccttcacgtcggagtggacattcctcggcgtatgacaagaacgtgaaggatgaattgcatgaaactcatcatacattactgactaaaagaagcaaaatcttgagtagaaacaaattttcctgtatctctctctcttgtaatctccgacgaagaaacacagttttatggcaaccaccagatcgaagagctttcagttgatcaccagcttaaggaaacacctagttaacacacgcgcttccacacgcgccaccgcctctgctctcttcccttcacgtcggagtggacattcctcggcgtatgacaagaacgtggaggatgaattgcatgcaagtgcagtacctgacgaagttataaagccagattctgataaatattggtctcctcaccccaaaacaggagtcttcggtccctctacgactgagcacagcgccaccgccgagggtgcacaccaggacacagcagtgctggaggagaccgcctggtttcgcccaacaagtctcgaggattcggacaagactcaccatgtttgagtctctctttctctctgctttttactggcgtaatgttgtaataaagttctacgtaaacaaactgtaatgtcaaatagcgtcctcctgctatgtttgaacgcttatgtttaagtgattgattacgttgcccaaaaaaaaaaaaaaaaaaaaacctccccgggggccggaccaattcccctaagggggcggttaaattcctggcgcgtttaaccgtggatgggaaacctgtgtaccacttccggctgggcaattcctttgcatacggngaaaccnaaggccnccnntgcctcccnagg

SEQ ID NO: 498 - DNA, 1153 bp, Arabidopsis thaliana
  Clone ID: ARATH-23APR03-CLUSTER21274_1
caagaatttttgctctcctctctctttcttctgccatcgcctaaaacttcttgtttgcttcttcgttggtcgcagctctgttccgtagtgttcactctttcctttaccgacttgattatttcttgtctttggaggttttgttgttggttcttctccacttgttcctttggcgtgtagaaactacgttctcattgtgtccgtttgcaggcgtttgggtgtttgttgtttctatctagcatgttatcggccacttctttcacttaatcctttgcattatcctaatctatcttctggtcttatctactctctcacttcttctatcttctggcatcgcccaaaacttgtcgtttgcttcttatttgctctgatcttttgattcaacggctcccggagacgacggaagcaatgcagttcttcggtggatctgagattagtccgtcgccgccagttccgacggcgagtggaaacaacgcgcacatgatgtacgttttcaatcgtaacggtgtatgtcttctctacaaagaatggaatcggcctcttcatacacttaatcctcagcaagatcacaagctcatgtttggtcttctcttctctctcaaatctctcaccgctaagatggatccagtcaatgcggataaaggaaatcttggggttccacagttgccaggacaaggttgctctttccatagtttccgtacgaatacttacaagctaagtttcatggagactccctctggtattaagattatcttagtaactcatccaaagaccggagatttacgcgaatccttgaagtacatctacagtttatacgttgaatatgtcgtaaaaaatcctatatacagcccaggatctccaatcaagtcggagttgttcaacactgcacttgaccagtacgtaaggagcatctcttagtgtgtgcattacagatttgtccattggaacttctctccttcaacagaactatcgtctgaacaatctctgaaaagaagagagaattgtagtagagagatttatcttgagttcgactgttttctctgcaaatctatgtttcgtttaccctttttattaactccactgtattggcttgctatcaatgatgttcatggtttactcaaaaaaaaaaaaaaaaaaagaaaaacgaaaaaaaaaa

SEQ ID NO: 499 - DNA, 2392 bp, Arabidopsis thaliana
  Clone ID: ARATH-23APR03-CLUSTER21281_1
aagaaaggttctgtgtttagggttctggttctgggaagctcgttctcaccggaaaaccgaagaatatgatcggagtctggaaaatgaaacagtactccaacgtccttgacaagcctctcagcaaaggcaagcaagaggtgagcttgaccgcatttgctttccaaaagcatcttcagattctttcaccggaaaactaagaaaggttctgtgtttagggttctggttctgggaagctcgttctcaccggaaaaccgaagaatatgatcggagtcgggaaaatgaaacagtactccaacgtccttgacaagcctctcagcaaaggcaagcaagaggtgagcttgaccgcatttgctttcttattctcggagctcgttcagtacaatcaaacccaggttgacaatatagctgaacttgaaagaagactagaggatgctgggtatgcagttggatctcgagttctagagcttctttgcaaccgggaaaagggaaacagaagagagacacggttactgggaattctgtctttcgttcacagtactgtgtggaaagtgttgtttggaaaggttgctgattcacttgaaaaaggaacagaacatgaagatgagtacatgatcagtgaaaaggagcttcttgttaacaggttcatttcgattccaaaagacatgggaacattcaactgcggagcgtttgttgctggcatagtgaagggagttctggataacgcagggtttcctgctgtggtaacggctcattttgtacccattgaaggacaacaacgtcctcgaactactattttgatcaagtttgctgatgaggtgcttaagagagaggcacggctaagccaatgagagtactatggtcacgagtttccacgatctggaaactattggctttatgtgaactgcttgtgcaaatctgctatctgtttttggatgactatataacattttgaattgagctgcaaagccattgacccgtgcattgatgtaaacaacatacatatcctcttgttacaattgcagcttatgatacaacacttttactagttttagcatagtggatgcaaacatgtttactgtttttaccaattgcaaaaggaaaagaaaaacattatattatccagtaggcgaaattacaaaagcaagttgatatatcaatataatcaaaacagattacagagcaaatgaagcaagcaggtaaacaacattgatccaacaaatcaattcctgccgagaggaagtgacctgcaagagtaagtctccctgaaatcagacttcttcttagaggaagtaaagagagaagcatagacttccttagtagcattaaccggcactttatccgccgccttgaatttcttcacagttataccattgccattgacattcccatcctctatctgtctctttgcgaccttcgcacctgtatcagccaccacagcagcaccgttcttactcttctttgagacacctttcttctctctcagcttagctttctcctcctccatcttctccctcaacaaatctacttcctcctcagtaccattgatcacaatcttatcagaatctttgacatccgcatgacacaccaaacaagaagaagacttcacttccttcaacgcctttgcgctcatcacatgtccacatcccctcaaagcgaaaaacttgtactttccattgaattcaagccctgagaccggacactgaaactgtgcactagtcgtatcttgcgatgaaccatcagaaccagcaacaggcgtaagcttaatattcaccatatctttcaaacccttaatgtacgagaattgtttaggcaacctcttagacaacaaagcgtgcaccaaaacttctttattgaacaaattcccaaggagatcaatcacgcacggctcagccaaaggctcgttagacaaagcacaattcaaccatttggagagcctctgctcattaggatcaaccttgtcaggtttcttctccgcgtacatattgagatagcaatcgcgagactcggctcccgttgccccaccatctcctccacctccacggaggcgagggaaaagagtgagcatggatacagaaggaagcttcgatacttggatccgtgtagagccattcaaaagcttcccatctagagtaatcgagcaagccgaaaacgatatacgctgcgacgattcgagtaaggaagtgatacccgaaagagttaatagagattgcgcaggatccaattgcagagcgacgactttttgacagtcaggagatttaacgaagatctggcgccggatatgcatggtggcggagcaatacgaagagctctaggtttccgatcaattttggtcggtgattagaaattaaagggtcgaggagagaggtttcgcccacgcgtccgattttccgga

SEQ ID NO: 500 - DNA, 948 bp, Arabidopsis thaliana
  Clone ID: ARATH-23APR03-CLUSTER21285_1
gactccctctttgcactttcttcttcccgtcgctaccgaaagcttctgtctctctcactcgcagggttctctggaactttctgaacgatgccgaggtattactgtgattattgcgatacttatctcactcacgattccccatcagtaaggaagcagcacaatgctggttacaaacacaaggcgaatgtgagaatatactatcagcaatttgaggaacaacaaacccaaagtttgattgatcagagaattaaggaacatcttggccaaactggagggtatcaacaggttggtgctgtgtttaatcagcatatgcttgcaagacctcgccctcccatgatgctaccacctggaagtatgcctatgggtatgcgacctcctgttctgcctagacccatgatgcctcctcaaggttatatgcctcctccaggagtaccacagatgatggcaccgcctggtgctcctctacctccacctccacaaaatggtattctgaggccaccaggaatggctcccataccaggtcaaggtggcggaccaccaggaatggctcccataccaggtcaaggtggcggaccacctcccaattataatggactacctcctcctcctccttatcatacaaatccagctgctccaccaagtggtaatttcaacaatccaaacctcaacaatccgaatcccagtgctgaatctcctgaaagcaatgagtagagttagtaggtctgaatgaatcatttttctcctgccaaaaaattctcagagctcttgtttaacacaatatcctaccttttctactccaatttttatgaagaggtttagaactaacgtatgtgaaatgagttttatgtgttagatgattgtatccattagagtcatgaaaaggaaaatctgaggtttcttatctctacaaaaaacaaaaaaaaaaaagatttattaaaaggcttcatt

SEQ ID NO: 501 - DNA, 1352 bp, Arabidopsis thaliana
  Clone ID: ARATH-23APR03-CLUSTER2128_1
ggacgcactttagaaagaaaccctagtccgacgacctctccttcgccgctgaatcctcatcgctgattcccgctgaatcctcatcgctgattcttggcggcttatggctggatatcctactaatggatcagtctacgtttcaaatctccccttaggaactgacgagaatatgttggctgactattttgggaccattgggttgcttaagagagacaaacgaactggtactcctaaggtatggctgtaccgggataaagaaactgatgagcccaagggagatgctactgttacctatgaggatccgcatgctgctttggctgctgttgaatggttcaataacaaagattttcatggaaacaccattggagtttttatggccgagtcgaagaataaaaatgctggtgatgcagttgagtttgttgaattcgatggaggtgctgaggaaacaaatggaggtgctggaagggggaggggtcaggctgattcttcggcaaagccatggcagcaagatggtgactggatgtgccctaatacaagttgtacaaatgtgaattttgcattccgtggggtttgtaaccgctgtggaactgctagaccagctggtgcatctggtggcagcatgggtgctggtcgtggaaggggtcgaggtggaggcgctgatggtggggccccggggaagcagcccagtggtgctcctactggtctctttggtccaaatgattgggcttgtccaatgtgtggcaatgtcaactgggcgaaacgtctaaaatgtaatatctgcaacaccaataaacctggtcagaatgaaggtggtgtgaggggaggccgtggtggtggttacaaggaattagatgaacaagaattagaggaaacgaagagacgcaggcgtgaggctgaagaagatgatggtgaaatgtatgatgagtttgggaatctaaagaagaagtaccgtgttaaaacaaaccaagctgacaccagacctgctgttgctgctggtcgtgctgggtgggaagtcgaggaactaggtattgataaagatggaagagagagaagcagagacaggcaaagagaccgtggtagagatcatcactacgataaggatagacgcagaagcagaagccgagagagggaaagaggcaaggagcgtgactatgactatgaccatgatcgggacagagacagagactacggtcgcgaacgtggaagcaggtaccgtaactgagagattactcataagtgttagggtttagtttctcatctgttttgtcgacttacttttacaacggtatcattacaatgtcttcgccttttgtttacttattgtgtgaagtgaaactcattttggtttgaat

SEQ ID NO: 502 - DNA, 1004 bp, Arabidopsis thaliana
  Clone ID: ARATH-23APR03-CLUSTER21292_1
atgatatatacaaatgtaaaacctgattgggtattcgtctccgacttcttaaaatcccaattctttcataacaaaacactgctcttccttctctccgccgccgcatcgttaaatctctccgtcatctgtaaccggttaaagtatttccctcaggtcgacctgaaaacgatgggcaaacgaggaccgaagaagcttacaaacactcaaggaggaggaggacctaatctcaaatctgtactgagacatgagcacttgaagaatctcgctctctggtcttccaccggagatactcctatcccgtctcttgcttcattactcggtcgacgtctcgctgccgacactgaatccaccggaatcactactgatcccgatctcgtctcttgtcaaaggtgtgagaccattcttaagcctggattcaattgcaatgttagaatagagaaggtttctgctaatgtgaagaagaaacgtaataggtgcaagaagtctaacaacatctgtttccctcagaacaatgtagtttaccattgcaatttctgttctcaccggaaccttaagagaggtactgctaaaggtcagatgaaagagctttacccgttcaagccgaaaaccgctcgttcgtcgcgtccgaagatcaagaaagagatgacgatgcctcaagaattccaaagtaacatgctttcttcaccggagagaagtgtgaaagatcaggtggaggagaagagtgttggggatacaccgaagccgatgatgcttacattggagagggataggagaatacgaaaacccaaaacttcgtatcccagtcgtcctcatcttgttcccgtcatcccggttcgcggaccgaattagaccaagtgtaaagcgcctcgggctggccttaaccagtcagccccgacactctcccgttctgaagctgctaccgtccaaagccccttgctcttgttctctctgtgaggttccccaccggcccttcgtgcgtaactaataaaacctcacgaatcacg

SEQ ID NO: 503 - DNA, 1203 bp, Arabidopsis thaliana
  Clone ID: ARATH-23APR03-CLUSTER21297_1
aaaaagtaaaacaacaatatttattataaagaaggctgagatgcagaccccatcgatggctgcctccactacttcctactacccaatccccaaaagcttccttctttctcctcctcgtcacaaacgaaaccctaatctcatctcctgctccaccaaacccatttgctctcctcctcctccttcgtcttcttcttcgtctcctctgcaaacgacgacaacccatcgaagccaaaagcagaatctgcgtctacccacgtttgaagattcgtttcttctttaccaatttagctctcccaccgaagacccaggattctctaaccggatcccggaacaattcgacggagagccacgcgaattggtgttgccgagagtagaagacaacaacaaagggttggcaatttcgtcgaacatgtggtgggcagatctgaaagcggctcttgggcaacgaatcaatattgagggtatcgtttcttcggtctccgttgttgttaaagatcgtcaatttgttcttccgcatgtttctgtgaaagatttaagatacattgattgggaagtgctgaagagaaagggcttcaaaggtgtagtgtttgataaagataacactcttacggctccttattctctagcgatttggccaccattacgtccttccattgagcggtgtaaagccgtttttggccatgacatcgccgtgtttagcaattccgctgggctcacggaatacgatcatgatgattcgaaagctaaagcattggaggctgaaataggaattagagtgttgaggcatagagtgaagaagcctgcaggaactgctgaagaagttgagaaacactttggttgcacatcttcagagctaatcatggtgggtgatcgacctttcacagatatcgtttacgggaacagaaacggatttctaaccgtattaaccgagcctttgagtcgagctgaggagcctttcattgttagacaggtgaggagattagagttggccttgttgaaacgttggttgagaaaaggtttgaagcctgtggatcatagtttggtatcagatataacacagtttgttaaagttccatcagatttgtaagaaggattctcattttgctattgcaacaacaactttgttccttgttttttttttgtaattgaaattttgagtttgggtcaaaaaaaaaaaaaaaatgataaaaaatgccatttttg

SEQ ID NO: 504 - DNA, 1485 bp, Arabidopsis thaliana
  Clone ID: ARATH-23APR03-CLUSTER21304_1
tttttggtcggatgcggaagtatccgtcctgatgatgatgaagccagatagattttttctttttcagatggagtaaattaacacagtcgggaagcaatcggtggaaaaggaaacagctttggaaggttgattccattacagattcgattcgaaactatggttcagatttccgatcttccacgggatttgacagaggaggtgctctctaggattccggtgacatctatgagagcagtgagatttacttgcaaaaagtggaacaccttatcgaaagatcggagctttacaaagaagcacctgcgtggagcaagagcagcagcaaagaagaagcagacgaaggagtttcaggtgatcatgatgattcaatttagggtttatttatacagcgtcaacctccttaatccatcaatagagcgtataggtaaacttattagcctagacgttgaagatcatgtcgacatatctaaaatctttcactgcggcggtttattgttatgtatcaccaaagacatatctaggcttgtggtttggaacccttattctgggcaaacaaggtggatcaaacctagaaattcttaccacagattggacaggtacgctttaggatacgaagagaagaacaagtcgtgtcgttgctacaaaatcttgagatttatggatgattacgaggatgacagggcactgcgcctaattcgtgagtttgaaatctacgacttaaactctgattcatggaaggttgttaatgtcactcccgactgggatgtagagttttatcaccgtggcctgtctctcaaggggaatacttactggtttgctcaagagaagcttccaccattaccacgcggaagagtgataacaatatcagatatggctgatttcttactctgttttgattttacaagggagagatttggaccgcgcctgcctctgcctttccactcttttgttgaagatactgtgactctatccagtgttagagataagaaacttgcagtgttatttcagccatgtagtgcatctaccgtgaagatatggattagtcgcaagattgagcccaatgcagtgtcgtggaggaaggttttcttagcggttgatatgaaatcactcactggttttcagtttgacattaacgctgcaagtttctttgttgacgagaagaaaaaggtcgccatggttctggataaagacaggttcagttataaatttactcgcaacatagcttacatcattgggaagaaggggtacttcgaaaaagtggatcttggagaatctacagtttcaagttgtgcctcacttgtgtgctcttacgttccaagctcagtgcaaatctagcaagcttcaccacgaggcaaccaatcgattcaattgttttcttttcttatgtatctgatttgtcttggagattttttatctttgtctagttgttgtgcccagaactctaagttccgccacatagtttttccagactaaaaaaaaaaaaaaaaa

SEQ ID NO: 505 - DNA, 1203 bp, Arabidopsis thaliana
  Clone ID: ARATH-23APR03-CLUSTER21311_1
gtagcgattctctctgcggcgcgtgtaaacggtgacggggctctaatggctaatcttcctcctccgctctccatgaaatctgtcgccctctcaggagcttcttctccttcttcttcctccaacaacgatcggaagctatcatcggcggagcagttaattctcgatctcagcaatcccgaactcagagaaaatgcacttcacgagttgtctaagaagagagagatctttcaagatttggctccgcttttatggcattctgttggtaccattcctgctcttctacaggagattatcgcagtttaccctgccctatctcctccaaccatgactcctgctcaatctaacagggtgtgcaatgcacttgctcttcttcagtgtgttgcttctcatactgatacgagaatgttgttcctaaaagcccatctgccattgtacctgtatgctttcttgaatacatcaagcaagtcaagaccgtttgagtacctgcggctgactagcttgggggttattggtgcacttgttaaggttgatgatactgaagtgatcagattccttcttcaaactgagattgtcccattgtgcctccggacaatggagaatggcagcgagttatcaaagactgttgctactttcattgttcagaaagttttgctggacgatgttgggcttgagtacatgtgcacgacagcggagagattctttgctctgggtcgggttttgggaaatatggttacttcacttgcagaaggaccgtccgctaggctactaaagcacatcatacgctgctatcttcgcttgacagataaccccagagcatgcgatgcacttggaagttgccttccagatcttctgagggatgctactttcagtggttgtctctatgatgacccacctgcaatgcaatggctgcagcaactgctccacaacgttaacgttggcgggagagcacctcaagggttggctcatatgtttgtgaattaaatcgaacccttatagtctgggcagaaactgttattcattggacaaaaaaagttagttggaaacagaattacagatgagaaacagaaacccaaccaaagattttgagtttgatggatatatgtatttggatttcttgaccgtcttatgatgttgcaatcaatataactaaaattccattgaaaaaaaaaaaaaaaggaggccggctctagaggaaacaagctt

SEQ ID NO: 506 - DNA, 1417 bp, Arabidopsis thaliana
  Clone ID: ARATH-23APR03-CLUSTER213147_1
aagaacaagaagaaaaaggtttgtgaaaaaaaaacaaaggcaaacatggtggagggcataccaaagagatggaaggtgctaagtggccaaaacaaatggaaaggcctgcttgatccacttgacccggatcttcgccgctacatcattcactacggcgagatgtctcaggttggttacgatgcctttaactgggaccgtaagtccagatacgccggtgattgttattactccaagaaccgactgtttgctcgaaccggcttccttaaagccaaccctttcaggtacaaagtgactaagtacatctacgcaacagcttccataaagttaccaatctctttcatcgtaaagtctttgtcaaaggatgcatctcacgtgcagactaactggatgggttacattgcggtagctacagaccagggaaaagcgatgttagggaggagagacattgttgttgcatggagaggaactctacagccatatgaatgggctaatgatttcgattttccgcttgagccagctatctcggttttcccagtaactgaccccaaagataaccctcgtattggaagtggctggctcgacatctataccgcttctgattctcgctcaccttatgacacgactagtgcacaagaacaggtacaaggagagctcaagaggttgctagaactttacaaggatgaagaaataagcatcaccttcacaggccatagcttgggcgcagttatgtcagttctatcagctgcagatcttgtctatggcaaaaagaataatatcaatataaatcttcaaaaaaagcaagttcctatcacagtttttgctttcgggagtcctcggattggagaccataacttcaaaaacgtagtcgactcactccaaccactaaacattctaagaatagtaaatgttccagatgtcgcaccacattatccactcttactgtactcagaaattggcgaggtgttagagatcaatactttgaactcaacatacctgaaacggtctctgaacttcaggaactaccataacctggagatatacctgcacggcatggcagggatgcaagatacagacggggtattcaagctggagattggccgggatatttcgttggtcaataaaggattggatgctctaaaggacgagtacttagtgccaagtacctggaggtgtctggcaaacaaagggatgcttcaaatggatgatgggacatggaagctggatgtccacaggagagatcatgatgatgatgttgatgctgatgacaatgacgactcctcaactagtaaccaactacaagagctaaatacagattagttacaaaaacttatataagattctgcacaatatgtttgtacacaaaaaaaaattcatttagaagaacaaagaatctgggaaccaaaaaaaaaaaaaaaaa

SEQ ID NO: 507 - DNA, 2452 bp, Arabidopsis thaliana
  Clone ID: ARATH-23APR03-CLUSTER21321_1
cgaattgggtaccgggccccccctcgagttttttttttttttttttttcttttaaatatggaatatgcttaatattaaaaaaagaacgataagggctaagacgacttggtaaatgtactaataagtaatttactccgacaacgaaagccggcgacgaccggcgtgttctgtaagaaatacattagaaatgacagaaaccgtgtttcaaagaccaaaccaaaccaaaccccaacaaaatgtttcttcattttctttaaaattaagatcaacccgtttttgattttcttgatcgtaaccagtttcgttatccatgggtgatctagccaagcagatattgtctcgcccgattcaacttgcagaccaagtggtgaaagccggagatgaagccacaatcaacaaacaagaatgtgccgatatcaagtccaaaacggaaaagctcgctgctcttctccgtcaagcggcccgtgcaagctccgacctctacgaacgtcccacgcgccgtatcctcgacgacactgaaaacgttcttgaaaaagcattgacgatggtccaaagatgccgtgacgatggctacataatgcgacttttcaacataatccccgccgcagcattccgtaaaatgatttctcaactagaaaactccgtcggcgacgtctcttggctcctccgtgtctcaactccagccggtaacgatgacgacgaagggtttggttacttaggtctcccgccaatcgcagccaacgaaccaatcttgtgcttaatttgggaacaaatcgcggttctgatgaccggttcgccggaagataaatcagacgccgccgcgtcgttggcttctttagcaagagataacgatagatacgtgaaactgatagttgaagaaggcggagtcaaccctttgttgaaacttgtaaaagaaggtaaaatcgacggtcaagaaaacgcagcgagaacaatcgggttactgggtcgtgacccggaaagtgttgagcatatgattcagcttggtgtttgttcagtgctttcaagtattcttaaagaaggttcgatgaaggttcaagccgttgtggcttgggctgtttcagagcttgtttctggtaatcacgccaaatgtcaagaactgtttgcgcaaaacaacgtgattaggcttcttgtgagtcatttagcgtttgaaacggttcaagaacatagcaaatacgcggttgttgcgggtagagcaacgtcgatgcatcacgccgtcgtaatggcgagtaaaatcagtagtagtaaagagaatttaccggcgttgaacgaggaggaggacgacgataatcatatcggagtctcgagtccgatgacgaatcagatgcatagcatcgttgcaacaacaatggcgatgaaagcggttggatcaggatcgaaatcgaatctttctagccgatttgttaccggcgacgacgataaacccccggaaaagataccggagaagagttatagtatgagttcacagatcaaggcttacggtagtatcgcacatcaatcgcgaaacgcgtcggtgacgagagggagagagcttgaagatccggtgacgaagacttatatgaaagcgatggcggcgagagcgttatggaaactcgctgtaggaaactcatcgatctgccgagtcatcaccgagtcacgagctttactctgttttgcggttttactagacaaaggagacgaagagactaagtataacacagctatggctatcatggagataaccgccgtggctgaggaaaacgcagatctgagaagatccgcgttcagacgcacttcaccggcgtgcaaagcggtggttgaccagttattccgaatcgttgaaaacgccgacgccggatccgatttactcatcccctgtgtaagatccatcggaaacctagcgagaacgttcaaatcagcggaaacgcatatgatcgtgcctctggtaaaactcctcgacgacggagaaccagatttagcggcggaggtagcgatcgcgttagcgaaattcgcgacggaggataactttttagggaaagaacactcgaggacaatcatcgaagctggaggatcaaagcttctggttcagttagcgtatttcggagagaacggagcacagattccggcgatggttttgctgagctacgtggcgatgaatgttccagacagtgaacagttagcgaaagacgaagtgttaacggtattggaatggtcatcgaagcaagctaatgtacttgaagatgaagatatggaagctttgttgtatgaagctaagagcagactcgagctttaccaatcaagaggatctagaggctttcacttgtaattttcccattgaatgaattattagaaaatactaggatttgatttccacgtgtgttccaatgattttttatgtaggtgactctgttttttaaccactatcaaaaagttgtataaagttttatttttcaat

SEQ ID NO: 508 - DNA, 2602 bp, Arabidopsis thaliana
  Clone ID: ARATH-23APR03-CLUSTER2133_1
acacagttgtataagtgaggcctctcccgccccccccccccagcgaagcgaaaaatgtcagatctggtcgcgacgtcgccgtcgccgtcgtcagcgccgagatccgccacagacttcttctccgatccttacgactctcatcctctatggttcaagccttccctcttcctctcccctaacttcgactccgagtcctacatctcagagctccgtacatttgttccctttgacactctccgatctgagctccggtcacaccttgcatccctcaaccgagaacttgtcgatctcatcaatcgagattatgccgatttcgtcaatttaagcactaagctcgtagatatcgatgcagctgtggttcgtatgcgtgctccgctccttgagctccgtgagaagatcactggatttcgtggatctgtggaggcagcactttttgcactaaggaatggattgcagcagcgttctgatgctgctgctgccagggaggttctcgaattattgctcgacacatttcatgtggtatccaaggttcccacgcgtccgaaagttctaccaagtactccttctgattggcaaaacgaggatgcaaattccatgggaaggagttctatgaatgatgagaattcaacgcagcaagatggcacaaccatgagagaaacccagagcatgctattggaaagaatagctagtgaaatgaatcggctcaagttctatatggctcatgcacagaacctgcctttcattgagaacatggagaagaggattcagagcgctagtgtgttattggatgctagcctaggtcattgcttcattgatgggctaaacaacagcgatacaagtgtcctttacaactgcttacgtgcatatgctgccattgataacaccaacgctgcagaagaaattttccgtacaacgattgtagctccatttattcagaaaattattacacatgaaacaacaacgaatgctgctggaacatcggaagatgaacttgaaaacgattacaagcagatcaagcattttattgctaaggactgtaaaatgctgctagaaatatcttcaactgacaaatcgggtttacatgtcttcgacttcttggcaaattcaatcctgaaagaagttctttgggcaatccagaaagtcaaaccaggagcgttttctcctggaaggcctactgagttcttaaagaattacaaggcaagcttggatttcctggcatatcttgaaggttattgtccgtcaagatctgctgtaactaagtttcgagctgaagctatatgcgtcgaattcatgaagcaatggaatgtgggagtatatttttcactgaggtttcaggagatagctggagccttggattctgctcttacttctccttctctggttttcattcaggattcagataaagagagttcgctcaacttaattctcagacagagtgatactcttttggagtgcttacgatcgtgctggaaagaagatgttcttgttttctcggctgctgataaatttcttcgcttgaccttgcagcttctttcgagatatagcttttgggtgtcatctgcgttgaataatagaaagagtaatgccagcccgagtcctggatgtgaatgggctgtttcagcaactgcagaagactttgtatatgttatacatgatgtaaattgtctagtctcagaagtttgcggcgattaccttggacatatatcacagtatttatcttcaagctccactgaagttcttgatgtggtgaggatcagcatagaacagggtggggtatcattagagaaagtcctacctttacttaccaagacaataattgacgtcattgttgataaatctgttgaggacctaaggcagctcagggggataaccgctacatttaggatgactaataagccactgcctgttaggcactcaccatatgtcgttgggctattgcgtcctgtaaaggcttttttggagggagataaggctagaaactacttgacccaaaaaacaaaggaggagttactgcatggcagtgtcagtgaaattaccaggcggtattatgaattagctgctgatgttgttagcgtggcaagaaaaacacagtcatcgcttcagaaattgcgtcaaaatgcacagagacgaggaggtgcagcatcaggtgtttctgatcaaaatgtatctgaaacagacaagatgtgtatgcagttgttccttgatattcaggagtatggccgaaacgtttctgctttggggctgaaaccggcggatattccggagtactgttccttctggcaatgcgttgcacctgcggataggcaaaactcaattagtgtttgaggacgctcgcttccatacatacatcattgtggtatcatatatctgataataagaaatcgctgcttcttcttttctatagcttgtgtttgtttgctttaacagtgaagataagaggaagagagttttgttgaagagagagtgtttttttttttccgccgaagttgcattatgtgaggtctgagtttagtgccagctttggccatttaatcttttatgtaggactatttcatcttcagtatataacacgcaccaaagggaatgaaacttttaactctta

SEQ ID NO: 509 - DNA, 964 bp, Arabidopsis thaliana
  Clone ID: ARATH-23APR03-CLUSTER21394_1
tatgctttgacattcctctctttcttctgctctcggaattggtgttgcagaagttgcaaatttgggagaaaagttaacaggactggtgaagtatcaaaatttggggttttgctacgatgacgctaggtgctcggcttgttgctcccatgattatacttctcctttttataccgattgaattagttaaagcggaagtcattacactgacaccagaaaccttttctgacaagataaaggagaaggatactgcgtggttcgtaaagttttgtctcccttggtgtatacactgcatgaaactggggaatgtgtgggaagacgtgggaaaagcagttttgggttccttggtgtaaacactgcaagaaactggggaatttgtgggaagacttgggaaaagcaatggagggagacgatgaaattgaggttggttgaagtagactgtggtactagcagagctgtttgcaccaaagttgaaattcactcgtatccaacatttatgctattttacaatggagaagaagtttcgaaatataaaggaaaaagagacgttgaatcgctcaaggcttttgttgtagaggaaactgaaaaggcagcagaaaaagcacagcttgaagacaaggaactgtgatacaactagtcggtgattattagaacctgatacattgttccctttggttttcattttgcctatgcagttgtgtgactcttaccgttagttagataggcatggttttcagcacgatggaggagcatctttgggtttaaaggtttttcacaccactgttttgctaaaatattcagtttccattttattcagagtcagataagcaaagacgtaagtgtagttagtcgagatttcttacaagtttgtgttgtatgttcgttttaagagcagctgcagaccaaagttcttgctttaaaatttcatattcagtgaaaaaaaaaaaaaaaaaaaaagggcggccgc

SEQ ID NO: 510 - DNA, 1483 bp, Arabidopsis thaliana
  Clone ID: ARATH-23APR03-CLUSTER214060_1
actttttttctttctttctgagtgaaaaacactttagtctcccactctttatattttgtagcttcacagcaaaaattctctttaacttatcagacagataagatcatatagcaaatatgttgcaagatagagtttcttgttctttgtctagttcgaaaatatctcgatgtgttttgtttctctcactcttttgtttcttcctcttgacgatgcatgcttcagcaaaccgcttacagcgagttccaaatccagggccttccccggcaccagagcctaagccatgtccgagtccagggccaaaccccgcaccagcgacaactaagaggacacataacactacgtttccggcgatcttcgcctttggggattcgatcttagacacaggaaataacgattatattttgaccttgatcaaagctaattttcttccatatggcatgaattttccagataaagttcccaccggcagattttgcaacggcaaaatcccttcggactttatcgcggattatataggagtaaaaccagttgtaccggcatatttgagaccgggactgacccaggaagatttgctcactggtgtatcctttgcttcgggtggttctggctatgatcctttgacaccaatcgtagtaagtgcgataccgatgtcaaaacaattgacatactttcaagaatacatagagaaagtgaaaggctttgtgggaaaagagaaagccgagcacataatatccaaaggcctagccattgtggtagcgggcagcgacgatctggccaatacctactatggtgaacacttagaggaattcttgtatgacatagatacatatacctcttttatggctagctctgctgcaagttttgctatgcaactatatgaatcaggagcaaaaaaaataggatttattggtgtttctccgatcgggtgtataccgatacagagaaccacaagaggaggacttaaaagaaaatgtgctgatgaactcaactttgcagctcagctttttaattccaaactctccacaagtttgaacgaattggctaaaaccatgaaaaataccacattggtgtatattgacatctactcttctttcaatgatatgattcaaaaccccaaaaaatatggatttgatgagattgatagaggatgttgcgggacggggctactcgaattaggtccgctttgcaacaaatatacatcactgctttgcaagaatgtgtcttcttttatgttttgggactcttaccatccaacggaaagagcttataaaatcttaagccaaaagtttgtagagaatgacatgggccctttctatgacaattcaatgtaaaatttaagatgacacatttgagatgaaatttggctaaataaaagctgtatctcatttggattagtgtcttcaaaaacatgtttattgtattatacatataaattgacatggagcgataaattgagttgtttttctaaaaaaaaaaaaaaaaa

SEQ ID NO: 511 - DNA, 1275 bp, Arabidopsis thaliana
  Clone ID: ARATH-23APR03-CLUSTER214348_1
atagctcccaactaataggaatctcaagcttctcactctctcttgtttttccattggacttttggaccataagctatgcaaactgaggagcttttgtcgccaccacagactccttggtggaatgcttttggatctcagccgttgactacagagagcctttccggcgaagcttctgattcattcaccggagttaaggcagttactacggaggcagaacaaggtgtggtggataaacaaacttctacaactctcttcactttctcacctggtcgtgaaaagagttcaagagatgtgccaaagcctcatgttgctttcgcgatgcaatcagcttgcttcgagtttggatttgctcagccaatgatgtacacaaagcatcctcatgttgaacaatactatggagttgtttcagcatacggatctcagaggtcttcgggccgagtaatgattccactgaagatggagacagaagaagatggtaccatctatgtgaactcaaagcagtaccatggaattatcaggcgacgccagtcccgagcaaaggctgaaaaactgagtagatgccgtaagccatatatgcatcactcacgccatctccatgctatgcgccgtcctagaggatctggcgggcgtttcttgaacaccaagacagctgatgcggctaagcagtctaagccgagtaattctcagagttctgaagtctttcatccggaaaatgagaccataaactcatcgagggaagcaaatgagtcaaatctctcggattctgcagttacaagtatggattactttctaagttcgtcggcttattctcctggtggcatggtcatgcctatcaagtggaatgcagcagcaatggatattggctgctgcaaacttaatatatgatcagcagataggggacaagacatgatttggttcaccagtcttttgtcttgtcccttatctttcagccaaacggaaagagaacttgtgtcttggaaaaaagacattgagtttccttggtttataagattggtccttttaccatccgtttggctgtaaacaggcaaatcatctttggctcatgcttcatcaagttcttatcttcgtctgttttcttctacgcatcttcataagatctctgaactagtgaataacatttcctagcatcatgtttcaactagtgtgtgttgtaagaaactctgccttatttccagatgatgtattgtgtgtaacgtgtttatgaaacaaacgtaagacttccaagttaaaaaaaaaaaaaaaaaaaaaaaaaaa

SEQ ID NO: 512 - DNA, 682 bp, Arabidopsis thaliana
  Clone ID: ARATH-23APR03-CLUSTER21439_1
actgtgttcgataataatgtcgacaggagaagcgataccaagagtcgccgtcgtcgttttcattctcaacggaaactcaatcttattaggtcgccgccgttcctcaatcggcaactccactttcgctcttcccggtggccacctcgaattcggagagagctttgaagaatgtgcagcgagagaagtaatggaggaaacaggtctaaagattgaaaagatgaagcttttgactgttacaaacaatgtcttcaaagaagcaccaacgccatcacactacgtctctgtttcgatacgtgcggtgttggtggatccaagtcaagaaccgaagaatatggaaccagagaagtgtgaaggatgggattggtatgattgggagaatctaccaaagcctttgttttggccacttgagaaattgtttggaagtggtttcaatcctttcactcatggtggtggagactaatagatgtaagagttaatgattgatttgggattgaatgttgcaaattgggcatttggtctagtggtatgattctcgcttagggtgcgagaggtcccgagttcaattctcggaatgcccctctcttttactcttttttattgtatttttggtttctgttttcctaattagtaataaacttatcatgtgtcctatcgattttatttctcaaaaaaaaaaaaaaaa

SEQ ID NO: 513 - DNA, 1781 bp, Arabidopsis thaliana
  Clone ID: ARATH-23APR03-CLUSTER21475_1
aaagctaagccaaactcagtggctctccggtgaagctttgagatggcgatccttattccggcgagtttcgggcgattaacaattacgtcgcgtgcacaagttagagtgagagtttctgcttctgctaaccaacgcactattcgtcgcgattcagtggattgggttaaggaaacttcaagctttttcgaagaagataaaaggccgatcatgttgttcgacggtgtttgtaatctctgtaatggaggtgtgaaatttgttagagaccatgatcgaaacaggagcataaggtttgaagcattacagagtgaagcgggcaagaaactgttattgcggtcaggaagagctcctgacgatatatcgagtgtcgtactagtcgaaaacgataggtcttacataaagtcagaagcagttttgaagatcatgaaatacattgacttaccatttccacagcttgcgttcttcttgcagtttgctcctctgtttgtgagagactttttgtatgaaaatgttgcaaacaatcgatatgcaatgtttggtcgatctgattcatgtgagctctaagaatacatatgtgatcctactttgccacaaaaaaaaaatctagatatgtaatcctacagattaatataagcttttatacagatgtatagtttacaacagccattaaacaatagatacatatgtactacttttcgaatcatgtactcgtcaaatgtataacctttccgacgttgatatttgtgttatatatatggaaaaaaacttgggattgtgtgaaattgtcttttttcagagaatgtctcactggtctgctggctacaagctgctaattgaaatctctgaatggcatgctctgtatggtatgttctctaagaagcttagtgtatcccgcaatgaatcccgcaagaaggatagctagagatgtaaatctgaagatgtgttgataacacttgtgttttgatttcttgtgtttcatgtcataaccaggaggaatgtattttgggttcacgtatccgtactgcggacggagaagaaggacgaacccgaggaagaaaccagctaggaatcctccaaaatgagcagaattgtccacacgtggtaagaatccgacgcttagattcagtacaatgatcaggattaatgtcataagtgcggtgcacttattttcatagattgtccagtttgtgatgagctctgagagcattgcaccgagtaatccgaacaaagcaccagatgctccgactgatacccgttctccttgggaatctgttaagcaagacaccagggcttcctccaagcccggagatcacatacaaagctccgattctcatgaatccaaattcttgttcaaggcgcattccgatacacatgaggctgatcatgttagccatcaagtgaaggaaaccaccatgaagccatatgcaagagatgagacgccatctctcaccttcctccacaagtctcctttcgagagctccgagttttctcagcgtgggaatagaaggaccgagtagcatattctccttaatcggttgaaacgaaagccttccaaggacatcaaataagagacactcatctgatcttgcagggcaatcgttcacatacatggtggtagcgaatgtgacgaagttggctgctaaaatgagaggcacaagccacgcaacccatggcacgggaatgggcgggcgaaaatgtggtcgcgctggtggtggtggtccgttttcgatatctggtggaatcggcggtctcttccccattgacccggaagagcggacgcgtgg

SEQ ID NO: 514 - DNA, 1444 bp, Arabidopsis thaliana
  Clone ID: ARATH-23APR03-CLUSTER2147_3
ctaatttctcaaagagtctaaagagacggagagtgagagaagagagaaacatttcgagacaaatggccgccgccgctgctcgtcctctcgtcaccatccaaaccttggatggtgacatgtccaccgatcaatcctccaccgtcgtacttcccgacgtcatgacggcgccagttcgaccagacatcgttaacttcgttcacgcccaaatctccaacaacagccgtcagccatacgccgtatcgaagaaggccgagtcctggggaaccggacgtgccgtgtctcgtatccctcgtgttcccggtggtggtactcaccgtgctggtcaagctgcgttcggtaacatgtgtcgtggtggtcgtatgttcgctccaaccaagatctggcgccgctggcaccgtcgtgtcaatgtcaacatgaagcgtcacgcaatcgtctcagctatcgctgcaactgctgttcctgcgcttgtgatggctcgtggtcacaagatcgagaatgttcctgagatgcctcttgttgtgagtgactccgccgaagctgtggagaagacctcagctgcgatcaaggttttgaaacagatcggtgcttatgatgatgctgagaaggcaaagaacagcattggaatccgtcctggtaaaggtaaaatgaggaaccgtcgttacatttctaggaaaggtcctctggtggtttatggaactgaaggatctaagatagttaaggcgtttagaaaccttcctggtgttgagctttgtcatgtggagaggcttaatttgttgaagcttgctcctggtggtcaccttggtcggtttgtgatctggaccaagtctgcctttgagaagcttgagtctatctatggttcgtttgaagccatcagagaagaaggggggtatgtgcttcctcgtgcaaagatggtgaatgctgatcttgccaggattatcaattcagatgagattcagagtgttgtgaatccgatcaagaaggatgcgaagagggctgttcttaagaagaatccattgaagaatctcaatgtgatgttgaagttgaatccttatgctaagaccgcgaagaggatgtcactgttagctgaagcacagagagttaaggctaagaaggagaagctcgccaagaagaggaaaaccgttaccaaggaggaggcgttggcaatcaaagcagcaggcaagtcgtggtacaagactatgatctccgacagtgattacaccgagtttgataacttcaccaaatggctcggtgctagccagtaataatctcgtctgctttggaacactttccatattttagtcaaaagattttggtttttttaatctgttttgtctttgggtgtctggatatcaagttgaattatgaacaagtttcacttttttacatctccatttcttaaaaaaaaaaaaaaaaaaaaaaaaaaaaaaaaaaaaagggcggccgc

SEQ ID NO: 515 - DNA, 1399 bp, Arabidopsis thaliana
  Clone ID: ARATH-23APR03-CLUSTER21496_1
aaaagaatgggttctcttcttcgtattcttggaatcatgggttctcttcttcctcttcttggcatctcagtagtctccgccattttctttctggttcttcaacaaccagaacaatcttcttcagccattatactgagcttgaagaaacgccatggaagctcctctggtagtagtggtaaccagtacagttcaagcagaccatcagctggtttccaagggaacaggagcacgtgctctctcttcctcggcacgtgggttcgtgataactcttatcctctctataaaccggcggattgtcccggcgtcgttgagcctgagttcgattgtcagatgtacggtcgtcctgactctgactacctcaagtatcgatggcaacctcagaattgcaatttacccacgttcaatggtgctcagtttctgttgaaaatgaatggcaaaaccatcaatgggagtctttgatctgccttattgtttcatctgcaccgtccactcggacagaaatgaccagaggcttgcctctctccaccttcagattcttggattatgggataacaatgtcattttacaaagctccgttcttggtggacatagatgctgttcaaggcaagcgtgtgttgaagctggatgagatctctggtaatgccaatgcttggcatgacgctgatctcctcatcttcaacactggtcactggtggagccacaccggatctatgcaaggatgggacttgattcaatcaggcaattcttattaccaagacatggaccgttttggtggcaatgtagcaagcacttgggtactttgggcgtattggggaaaaaccttcgttcatgggcgccttaggccaaaactctcgttcttagatcccgaacacaagtcttgttcctctccatttctccaacacacgacaacccgagtgactgggcggcatcatcgtcttcaggatccaagaactgctacggagaaacagaaccgatcacaggaacagcttatccagtgagctcctacacagatcagctaagatcagtgattgttgaagtgcttcacgggatgcacaatccggcgtttcttctcgacataacactcctctcttccctaagaaaagacggtcatccgtcagtatacagcggcctcattagcggttcacaaaggtctagaccagaccagtctgcagattgtagccattggtgtttgcctggtttacctgatacatggaaccagttgttgtatacgcttctcatctattagcttctttttaaatctctttccatcaaattattcggttagtaatattttaacacattcgaagagagaatcttaagattaatcacggaatcagtcaattgtataaactttttgaggaaattttctttcaaatgaattataatttttattccatgc

SEQ ID NO: 516 - DNA, 885 bp, Arabidopsis thaliana
  Clone ID: ARATH-23APR03-CLUSTER214_1
caaaaattctgtgtagaaaatgcgcgagtagtggagctatcatcgccgggagaaatcaggatgattcgcggcagaggctcgtggtccggattatcgacccggttgaagctttacaggacccgacgtttctgcacaaaaggagagaataaactcgagaagacggaatctagcgttgcgcatcacagcgacactgaatctagtgtttctcgctacgatgagacctataagaaactcgataagctcgatttcgttaccgctgcgaagatcttgttcactgaaccacccaagaagaacaaatttgggtttgattggcatgtggtgcaattcatcatcgtctgcttgccatctgtagctgtgtatctggttgctcaatatgctcgccggaaaatgaagatcatggatgctgaacttggagagaagaaaaggaaagaagaagaaaagaaagagaaagaagaagctgaacaaaaggcattacaagtagaggcagcaaccaagtctcacgaagagctaatggagatgagacagagactgggaaaaatcgaagagacaataaaagaaattgttttggaaaccaagaaaccttcagggaatgctccaaccaaaacccaagaagatcaatctactaaactctccccaaaagaagtatcacagccagaaaaagaacacaagggcaatgtacagaaaccaggtgatggacctcactgagatgattagaagggaaacttaggtggtagatgacgaagaatgtacccttctgtgggttattattcttttggaactgatacactagttgatgcagttctctcattttacttttgtttgttgaatcacctttataattaatatagattacaaggatttgcaagccaaaaaaaaaaaaaaaaa

SEQ ID NO: 517 - DNA, 1893 bp, Arabidopsis thaliana
  Clone ID: ARATH-23APR03-CLUSTER21500_1
ggcaaaacaactttgtaatcgccacaatctcaacaagttgtgccggaaacggaggtggctggacaagttaagacaggtttgccagctatatactcagctgggtcacttactcctggccgaattagcccatatttggaaatctggtcgcacttgatgggactggtagatgtttatgcaggggacctggtagagccacaccttgtatagtagttgtttccccatatacacagaaacagcgtcattttgaaagctgagttttttttgtgaagcgagcgagcgtgagaaggtgtgacggggaagagaatggcgaaggaagcggtcaagtatgtatgggaaggagcaattcctctgcagattcatctccacaaatccgacgtcgcttctcaccctgctcctcctcctgctcttgtgttagcaccaagaataggatatttgcctctgttgattcctcttataaagccttatttcaaggattcacttcctcctggtgaagattcaatttggtttgattacaaaggatttcctctaaaatggtatataccaacaggtgttcttttcgatctcctttgtgcagaacccgaaagaccatggaatctcacgatacactttagaggatatccttgcaacatactgataccatgtgaaggagaagattctgtaaaatggaactttgttaattctttgaaagaggcacaatatatcatcaatggaaattgcaagaatgttatgaacatgtctcagagtgatcaagaggatctatggacctctgtcatgaacggtgatcttgatgcctatacaagattatcacccaagcttaaaatgggaacagtcgaagatgagttttcaaggaaaacaagtttgtcatctccacaatctcaacaagttgtgcctgagacggaggtggctggacaagttaagacagcaagaattcctgttcggttgtatgttcgaagtctaaataaagatttcgagaatcttgaagatgtaccggagatcgatacctgggatgacatctcgtaccttaatcgccctgttgagttcctcaaagaagaagggaaatgctttacgttacgtgacgccattaaaagtctcctccctgagtttatgggagacagagcgcaaaggagtggtgaagaaagaagcatagatgatacagaagaagcagatgggtcgagggagatgggtgaaatcaaattggtaaggatacaagggatagaaatgaagctagagataccgttttcgtgggtggtaaataacttgatgaacccagaattctatctccatatctctgtccttgtgaaagctcctcaaaggtgaagtgtaaggttctctgcagttacaatccatctgtgaattgaatcaaattgctttctcgttccatcttacaaatccgaaagaatcaatgatttgttgtatacagctacttcttctatttctgatagaagcaagaacacagaatacagaaaagaaagtagaaatattttgattgaaaaaaaaaaaaaaaaaaactcgagggggggcccggtacccaatagttcgccctaatccgctccggcgcggggggccaattacacttgaggcgccggttctccaaccctcgtgaactgggtaaaaaacctggccgcttaccccaaactttaaattcgcccttgggaagcacaaaatcccccccatttccccccaggcttgggcggcatataacccgaaaacagggccccccccacccgaatctggccccttttcccccaaccaaatttcgcccccaacccctttgaacagggccctgaaattggcccacaaaatttggcaaacggcggccaccaccacaacttcctcggagtataaaaaaatttcacgggcgggacaacaaaaattcttcttttcagcgcaaaa

SEQ ID NO: 518 - DNA, 2520 bp, Arabidopsis thaliana
  Clone ID: ARATH-23APR03-CLUSTER21505_1
aaaagttggccactaagtggtgtaagaataataaattgtcaatatcaattgactgattcttattgttcatatacggacacaaatcttttcgttaagtgagtgttttgatcaaaaaaagttgaaaactttaaagccatgccatcactttggtctaacgaatccgatggatcattacgagagcatcttgtggatgttgttgtgtctggttcagaaccaaagattcgggtacatgatctgacccgagtcgccgatgatggatctcggatcttgaaaggagttacgatagatataccaaaaggtatgatcgttggtgtgattggacctagtggaagtggaaagtcaacgtttttgagatctctgaatcgtctttgggaaccaccggagtcaactgtgttcttggacggtgaagatataaccaacgttgatgttattgctcttcgtcgtagagttggaatgctttttcagcttcctgttctttttcaagggactgttgcggataatgtgagatatggtccgaatttgagaggggagaaactaagtgacgaagaggtttataagctgctaagtcttgcagaccttgatgcttcctttgctaagaagactggtgcagagttatctgtgggtcaagctcaacgagtagcacttgcaaggactctagccaacgagcctgaggtgttgctgctcgatgaaccaacaagtgctcttgatccgatatcgacagagaacattgaggatgttatagtgaaactgaagaagcagagagggattactactgtgattgtttctcacagtatcaagcagattcagaaagttgctgatatcgtttgccttgttgtcgacggagagattgttgaagttcttaaaccaagtgagctttcgcacgctacgcatccaatggcacagaggtttcttcaactcagttcttgagaccattttctcattgatggttcctgcaagttatttgctattttgcttgaatcttaataatctctttcaagagaggaacaaatgctggttgaatgtaacaacacctttcatggtttatgtctttttatcttctctttagcatacgaaagcatatatatgaacaacaaacctatcaaagaatttagtcgagatccgattggtttgatgagatctgcatcaaccgagcttaacaggaactacagcaggaactttgggtgaagagggatcaagtgtgatgatctcctttcttccttctcctccattctcaactttctctttaaccgcctttgtcactgcgccaaacgcgtttgaaaaccacgaagctccacttgatacataagggtttgccattaaagccgttcttgcactgattgctgtctcttcagcagctgctaaagcagatttcgttatctccctcacctgatatcgctcatcgatatctctcaacttctcattaaccacagttgttcctatgcttagcttttcgctcagacccatcttatcgtcaagcgatgcaatggttgcagaagcgtttgagatcaagttgtgtctgtcatcaaatgctttggctttctccatggcgtcttttccaagagcataacctcttcccaccatgatgttcaccacatcttcagctttcttgacagaaaaaccattaaacgaatgttccgagtcaagtgcaagggcttctggtggtagctgatagttaacagcaggagttatactaacacgaagatctgcaatgacagctcccgttaagagcattgcagtttcagctccttgtgaatccttaaaagtaacatatgcgacctgactctcttgtgtctcacttcgcatctcgacgtattgaatgtcaccagagaaagaaaagaactctttgacatctttcttagaaacaattagtgaaacattgctaatcttgacagttttcacaccggagacagttgattgggaatccataagaatgttgtgctgagtttgatccgaatcaatgaaagcagccgttaccgacattgtcgaagtgattctctcaagagcgaaaaatctcgagtacgcgtaaagaatagggatttcaatatttcaagtcctttttagtctcaaaactgacaatattcttttttatatttagagtctaaagcatcaatctttgataattaaattttttaacatcataataagaatttaattatccaaacgatataacatttgttcttcaaagcaaccaaaaacaatttgcaaagagaatcaacgaagtcttctagcttctctctcggactccagcaaggtgagaatatctccctctctgacaggtcctttaacgttcctcatgatgtaacggtccgagtcagtgaacttcactctaacctgagtcacttgaccccttgatccagtccttcccatcactttcactacaacagcgtgcttgatctgagaatccattctttagagaggctctgcgatgggtagagagttttagcggcgataagagttttaagagcagagatcctagaaccctaattcgagagacgcaccaataattaactgagaaccgac

SEQ ID NO: 519 - DNA, 834 bp, Arabidopsis thaliana
  Clone ID: ARATH-23APR03-CLUSTER21507_1
aagaaaaatcgatcgaaacggttagcgaatcgaagcagagagagcttcaatggctgtcacttcttcctctatgctgctgcttcggaacttctctacggtgggaagagttgctcaatctgttcgtgtgacttcgaggatcttcttctccaccggagaattgattagggttcttccttatactcgttctaaaagattgatctgttctactcgtgctgctcataatgaagaagccgccgcgaaagctgcggcttctgttgctgacaccggagctccgaccatatttgacaagattatagcaaaagagattccctcagatattgtctatgaagatgaaaacgttttggcattcagagacattaaccctcaggctcctgttcatgttttggtcattcccaagttgagagatggcttgacctcgcttggcaaggctgaaccaagacacgtagaggttcttggccaacttctacatgcatcgaagattgttgctgagaaagaaggaatccttgatgggttccgtgtggttatcaacaacggtgttgaagcctgccaatctgtttaccatcttcatctgcacgtcctcggaggccgacagatgaaatggccacccggttaagaagaaagattcatgtcaacccaaagccaacgtgctccaaaattgtcaactacaatcctttcttatatggtttatgagtttttaccactatcggattttatccagttgtgaattcctagagattagatagcttccatttccaattgttatcgaattctttttcttttttcattgttagaaataaatactaacaatttatatgatatgagtagtttctctcc

SEQ ID NO: 520 - DNA, 831 bp, Arabidopsis thaliana
  Clone ID: ARATH-23APR03-CLUSTER21547_1
ccaccatctcagattccccggcgaagattttgttcacagtttccggtgatcttctcctgtccgcccaaatttcagtatttctttgaagtaaagctttgttaatcagcaaaaaaaatatgaagccagtgataggcacagtggtatcgaacaagatgcaaaaatctgtagtggtcgccgtcgatagactcttccacaacaaaatctacaatcgctacgtcaaacgaacttccaaattcatggctcacgacgacaaagacgcctgcaacatcggcgatcgagtgaagttagatccatcaaggcctttgagcaagaataagcattggattgttgcagaaatcatcaaaaaagctcgaatttattctcctaaagctgctgctgctgctgtttctgcttctgcttctgcttcctcagcctccactactgactcttctgctcagtctcagattcctccatcatctacttcttaagttgttttaagagaaacgttgcatagcgaagcgagaaagttgctaggagttgttactatgagcatattgcatcgaagcttttggatcatgtctgtgatatttgatttcctgagatgataatgagttatatgatggtactagattatctggtgaaagtagatgaataacacatgttaagatactctgtcttcttatgttattttggcaaatcatcagtgcattgccttttaagcagaagtgtgagatagtgatgagttgttattacattcgttattttgggtatggaacaatgagtgaaaatgtatctttggctctacgagttgtgacaccagtatgacaaactaaagatcagtaccaacaccca

SEQ ID NO: 521 - DNA, 1577 bp, Arabidopsis thaliana
  Clone ID: ARATH-23APR03-CLUSTER216027_1
atcgaattttctgccacaaagaattttttgaaaactcagattttttattttgttttcagaacatgattggtgaggcaattgctaaaattaattagtacttatgtgttttatgtttgattttttgattagaaaatggacatttagtccgattcttatttgtttgtgttttttttttgtagacgcaataagctatcttcagcctaaactttctggaaattttcatcattagcaacctgaaattatcttaatttgtatataagcaaaactataaatattagtaaagatggaggagatgtcacctgataatatacatggagtcattttagctgtgtcttcgagtatattcatcggttctagcttcatcatcaagaaaaaaggtcttaagaaggccggtgttagcggcgccagagcaggtgaaggaggatatggatacttatatgaaccttggtggtgggctggaatgataacaatgattgttggggagatagccaattttgcagcatatgcatttgcaccggctattctagtaacacctttgggagctttaagtattattttcagcgcagtgctagcacattttattttggaagagaagttgcatatgtttggtatacttggttgtgtcctctgtgttgttggatctacaacgattgttttacatgctcctcacgagcaaggcattgaatccgtcaagcaagtatggcacctggctactgaaccaggtttccttgcatattctgctgtggtcttggttgtggtgcttgcattgatcttctactacgagccgcgttatgggaagacgcatatgatagtatatgttgggatttgctctttaatgggctctcttacagttatgagtgttaaagctgtggccatcgccataaagctgactttttcagggatgaaccagttcaagtactttcatgcatggatattcatcattgtagtgaccatatgttgcattttgcaaatcaactacttgaacaaggctctggataatttcaacacagcagtcatatctccagtgtactatgttatgtttacaacattcaccatcttagctagtatgatcatgttcaaggactgggcttctcaaagtggattgcaaattgctaccgagctatgtggctttgtgaccattttgtcaggaacttttcttctccacaagacaaaagacatgggaaacagtaccagcttacgcggctccacatcacactcgcctagagacactcctgtcttcataaactcaggttccagtcgcagctcccattccactagacctgcaatactataatcacacggctacgatagtagatcatctaacggtctagaacgaggcaacacgacttcaaaagcctcaaagagaactttttttgggtgacaaatgagaaaaaaaacagagcaaatggggtttaattaaggctataatttgttttctggataacggaaggtttagtgaatgatttgttagggatactatttgattgattgcttcatgttgatttgtttctaatattttttgtttgtttctcatatgagatataaagaaagttttaaaacaaaaaaaaaaaaaaaaa

SEQ ID NO: 522 - DNA, 1608 bp, Arabidopsis thaliana
  Clone ID: ARATH-23APR03-CLUSTER21652_1
acattttcgtcttcgtctccaatgattgctctctcactctcagtctcactcacatcattaccattctccttcgcgctttcatcgactccgtgcaaatcacgcgcctctcctccacgtagcaccgtctcgttgagttcttccaggagacgacaagatcgccggcgatcaattgaggctatgtctcaggtgatggaattggaagatgaatccgatttcgagaagcttctctcatcggataatcggatctcgatcactggattcggttctcttctctccgagagaagcgcgaggagtacattcccagatttggagaatttcagaatcgcgaaattgcaaggattcagaagagttttcgctcattctgctccgatcttcttcgagcgtggcatcgcgaatcctgaaactaaggagatctcaagcttgagtgttgagccatgtgaaggagagagccttgtggttactgtcttcgagatcaaaagctcagagattccggcttttattggaagggagcttgagttccggtttctcgctgttgttcctgaaacattggaaggcaaaccttacaccaattctgcggtactttgtggtcgatacagtgatgaggagtttttccagattagatgcaaaggaaacaaagagatttactttcaacattatggaagattcaagatcgataagatatggcgggacgacatcttaccttgtcgtctctatctaagacactgtgtgttggctgctaagaatctgggagatgaagcttataataactttctggatcatacattcttgggagatcgaaaaacaaccatcagagagtatttaagcagcacagggtctggtatcatggaagaagaaccaccggaggctctaaagtctagatatggaggttgatcaaaaaccaacaaaaaaagttaaactgatttttatcaagcttcaaacgttatcgaagctagttataaaattaagaaaacaaaaatcaacaaatgtcccacatcgggagtcttagagaagggtagcgtttctttgggctatataagagaatgagttttgtcatattatgtaacccgtttctgtcagaggtgaaggatgatccgtcaatgatcgtttagagacggcggatcgtgccgacacagaatttgacgaacataattttcaaggcgagtgggccttgccttaaaaaaaaaaaaaaaaaaaaaaaaaaaaaaaaaaaaaaaaaaaaaaaaaaaaaaaaacccaaaaaaaaaaaaaaaaggtttcccgaccccccccccctcgggggggccccccgccccaatccccccatagcgtcttgaattacgcgagcatccgggccgtaattttataatgacgggaagggaaaacccctgtgggcacccaaataagtcgccttgtggcactgccccctttcgactcttggagaaataccagagaggcccgtacggatcgcccttaccaaattttctacatccgatatgttaatgggaattggtaaccgtatttatttagaaaaaatgcccgataaatttttgaaaatgcgattcatttatttatccaaatgtccgagatctgaatcatgcctattaatccgaagataaccagaaaataggg

SEQ ID NO: 523 - DNA, 1332 bp, Arabidopsis thaliana
  Clone ID: ARATH-23APR03-CLUSTER21694_1
atacataattttggccaataagaaaagcgtaagttaagagagagagagaaagagtctctgcctctcaagctccgccgtcggggaaaaaaaattatggaagcatctactgttcagaggtttcagtactcatcatggaatgatttgagaaattttgaagagaggccacgttgtgcgctgaagagaaagagtctctgcctctcaagctccgccgtcggggaaaaaagaatatggaagcagctactgttcagaggtttcagtactcatcatggaatgatttgagaaattttgaagggaagcctcgtggttctctgaggtataatacacagcgaattaaggaagataaaaggtttagagttgttgctttaactcttgacaaaagaagggatcatcgacttagatcagtttctgataagaactcctcagcattgttggaaactggaagtcttcttcattctccatttgatgaagaacaacagattttgaagaaaaaagctgaagaggttaaaccgtatttaaatggacgatcgatgtatcttgttggtatgatgggttccgggaaaacgactgtagggaagattatggcaagatcgcttggttatacattctttgattgtgacactttgatcgagcaggctatgaagggaacttctgtagctgagatatttgagcatttcggtgagagtgtcttcagagaaaaagagactgaagcgttaaagaaactctctttgatgtaccaccaagttgttgtttcaaccgggggaggggcagttataagacccatcaattggaagtacatgcataaaggtattagtatttggcttgatgtacctctagaagccttagcgcatagaatagctgctgtaggaactggttcaagaccattgctacatgatgatgagtcaggggacacatacacagcggctttaaaccgtctttcaacgatttgggatgcacgtggtgaagcatacactaaagccagcgcaagagtttccttggagaatattactttgaagctcggttatagaagtgtctcagatcttacaccagctgaaatcgccattgaggcctttgagcaagttcagagctatttagagaaagaagatggtatggctagaccagatggactctagttccagaaagttatgtttccccgcaacatctcatgaatttgtgcctagttttgaatgttgtatataaatgaataatactctgtttgagcacattgtcttcttttcaaattgacccaaaaaatgaaaaggagccatttgcatttttataaaaagaaaaaaaaaaaaaaaaaagggcggccggtcatagcatcaagcttacgta

SEQ ID NO: 524 - DNA, 1361 bp, Arabidopsis thaliana
  Clone ID: ARATH-23APR03-CLUSTER21695_1
gaaaatttcactggttttgttttttttagaacaaaagaaaaaagcgagttgcttttgaccaccagcttttgtgtttcttgtcttaaagatcagatttggctagggtacagtcctcaattaggagactactatctgcgcgtattttgcttatagatgtgcaattacatggatttatttgaatcaacaaagaagaggaatgggatttagaggcttgcatagctcactctctaatcgcttatcagctgggaatgcgcctgatgtctctttagataactctgttactgacgaacaggttagagattcttcggattctgtagcggctaagctatgtactaagcctctgaagcttgtctcggggtcgtgttatctaccgcatcctgataaagaggccactgggggagaggatgcacattttatctgtgctgaagagcaagcattaggtgtggcagatggtgtggggggttgggcagagcttggtattgatgcaggttactattctcgggagcttatgtctaactcagtgaatgcaatccaagatgagcctaaaggttcgattgatccagccagagtattggaaaaagctcatacttgcacaaagtcgcaagggtcttcaacagcttgcatcatagccttaaccaaccagggacttcatgcaatcaatttaggcgacagcgggttcatggttgttcgtgaagggcatacggttttccgttcccctgttcaacagcatgacttcaacttcacctatcagctggagagtggaagaaacggcgatttgccaagctcaggtcaggttttcactgttgctgtcgctcctggagacgtcataatagctggaacagatgggttgttcgacaacctgtacaacaacgagatcacagccatagtggttcacgctgtgagagccaacatagatccccaggtaacagcgcagaagattgcagcattggcgcgacaaagagcacaggacaaaaacagacaaactccattctcgacagcagcacaagatgctggcttcagatactacggtggtaagcttgatgacattacagttgttgtctcttatgtggcggcttcgaaagaagaaggaaaacattgatgaagagacaaatacagatgtgtcatgtgttgagttataaagtttgtgttttgcagagacctctcttgttttgcttaatggtttgtgagcattctcatctgattatatttgatttttttgatatatattgtaaataaaagataaagagaacttgagttggattagtctttgattgacacccacggactcactcaatctgttaacacgcccacagttaaaaaagccagtggagtttgtcaaaaaaataaaaaaaaaaaaaaaa

SEQ ID NO: 525 - DNA, 1466 bp, Arabidopsis thaliana
  Clone ID: ARATH-23APR03-CLUSTER217000_1
aaccactcatctcaatttctcccacggtctagattctctccgcttctatgtctttcccgagaaaattcgggacagcgattcacgccgctctatcttttatcgtcttcttcttcttcgacctcattgacgcgattctctgtgtcgtttacgagttcgtcgatgagattttggaagaaaactcaacaggctgttactgcacggcggcggctcctcaaagtctaaccaccgacgaaaatgagttgtcgtcggagactttattcgggaggagaaacagtttccgggaaatgtggtttctgggattcgcgagagaattcaaatccaagctttcccggaaactgagaaaatctaagattcatcaagagtcagtgaatcgatggtcagattgtggatgcaaatcttgcaagtcatggactaagaacgaagatgggaatcttcacgtcgtggtcaaagattctacttctcgagaaacagagtactctgttcaagaaccgtccgagaatgtaatattcatacacggttttatggggtcatcacatttttggacagaaactgtatttgaacacattcaaaaagatgattataggctcctcgcgatcgatcttttgggattcggggagagtcctaagccaagggatagtctctatacattgaaagatcatgtggatacgatagagagatctgtcattaagccataccaattagattcttttcatgtggttgcacattcaatgggttgcttaattgctcttgctttggctgctaaacattccaacattgttaaatccgttactcttgttgcaccgccttattttccttcatcggtagatggatcggtcttgaaccgaatcgctagaaagcggttgtggccaccgcttgcgtttgggacagcggtgatgtcttggtatgaacatattggtagatgcgtatgtttcataatctgcaagcatcataagatatgggagtggctaatcaagctatgtataggtaaaagggagattcattggaagatcaaggacataacaaggcacacacatcactctgcatggcatagtatgcacaatgtgatatgtggtggctccaaagtcgctgatgaacatcttgaaaccctaataaagtctggcgttaagattcacttgatgcaaggcgactgtgaccaaatcgttccttcacattgctctggcaacatgaagaggacttttccggcggtggaagttgatatcattactggtgctgatcatgatagtatgataagcggaagaggagaagagtttgctgagaaattggagagcatttggtgttcatttaaagagtctggttagttttttcaaactttataggtaggaggcactgtagtcgatgtcgactgactacaagtttgagtccgattgtaagatcaagtctattgttaatgagccatctaatggacgcctatatggagtccaattatcgaaaaaaaaaaaaaaaaa

SEQ ID NO: 526 - DNA, 2044 bp, Arabidopsis thaliana
  Clone ID: ARATH-23APR03-CLUSTER21718_1
aatatatccaaacaaatgaatgtgttaaaccttcactcttctctccacacaaaattcaaaaacctcacatttcacttctctcttctcgcttcttctagatctcaccggtttatctagctccggtttgattcatctccggttatggggagagaatgaggagttaccgttttagtgattatctacacatgtctgtttcattctctaacgatatggatttgttttgtggagaagactccggtgtgttttccggtgagtcaacggttgatttctcgtcttccgaggttgattcatggcctggtgattctatcgcttgttttatcgaagacgagcgtcacttcgttcctggacatgattatctctctagatttcaaactcgatctctcgatgcttccgctagagaagattccgtcgcatggattctcaaggtacaagcgtattataactttcagcctttaacggcgtacctcgccgttaactatatggatcggtttctttacgctcgtcgattaccggaaacgagtggttggccaatgcaacttttagcagtggcatgcttgtctttagctgcaaagatggaggaaattctcgttccttctctttttgattttcaggttgcaggagtgaagtatttatttgaagcaaaaactataaaaagaatggaacttcttgttctaagtgtgttagattggagactaagatcggttacaccgtttgatttcattagcttctttgcttacaagatcgatccttcgggtacctttctcgggttctttatctcccatgctacagagattatactctccaacataaaagaagcgagctttcttgagtactggccatcgagtatagctgcagccgcgattctctgtgtagcgaacgagttaccttctctatcctctgttgtcaatccccacgagagccctgagacttggtgtgacggattgagcaaagagaagatagtgagatgctatagactgatgaaagcgatggccatcgagaataaccggttaaatacaccaaaagtgatagcaaagcttcgagtgagtgtaagggcatcatcgacgttaacaaggccaagtgatgaatcctctttctcatcctcttctccttgtaaaaggagaaaattaagtggctattcatgggtaggtgatgaaacatctacctctaattaaaatttggggagtgaaagtagaggaccaaggaaacaaaacctagaagaaaaaaaaccctcttctgtttaagtagagtatattttttaacaagtacatagtaataagggagtgatgaagaaaagtaaaagtgtttattggctgagttaaagtaattaagagttttccaaccaaggggaaggaataagagttttggttacaatttcttttatggaaagggtaaaaattgggttttggggttggttggttggttgggagagacgaagctcatcattaatggctttgcagattcccaagaaagcaaaatgagtaagtgagtgtaacacacacgtgttagagaaaagatatgatcatgtgagtgtgtgtgtgtgagagagagagagaagagtatttgcattagagtcctcatcacacaggtactgatggataagacaggggagcgtttgcaaaagatttgtgagtggagatttttctgagctctttgtcttaatggatcgcagcagttcatgggacccttcctcagcttcatcatcaaacaaaaaaaaaatcaagttgcgaagtatatataatttgtttttttgtttggatttttaagatttttgattccttgtgtgtgacttcacgtgacggaggcgtgtgtctcacgtgtttgttttctcttcaaatcttttattttggcgggaaattttgtgtttttgatttctacgtattcgtggactccaaatgagttttgtcacggtgcgttttagtagcgtttgcatgcgtgtaaggtgtcacgtatgtgtatatatatgatttttttttggtttcttgaaaggttgaattttataaataaaacgtttctattatatgaaaaaaaaaaaaaaaaaaaaaag

SEQ ID NO: 527 - DNA, 2093 bp, Arabidopsis thaliana
  Clone ID: ARATH-23APR03-CLUSTER2172_1
tgattcccccgggcttgcaggaaatcgggccgagagagagagagagagatctctagcacgaactttcctgagacgccccaaaaaaaaacagaacacgaattttcaaagttttccacacgatgtcttccataagatcgttaccacgtccctaactcttctccttcagacaaaagtactttagttattcttctttcttttgccatacttctctgaaaacagaataaatcttttgtattcggtcaaactgattcaaatactgtacagtcaagtcaaagctacaagatcgtgttccaggtttagagaaaatcttctgaactcaaaagattctcataactgagtttataaatggataattgaagttgtgtattttgttgataaaaccaaaaccatgggtggagatgatttgagcttcacaagattggtgattactgctttgtttggtctgttaatgttgttacaaatcaaggaaacttctgcatcaacatcctttgtaagctcgagtgtttgtaagtctgatcacttgacctacacaaagccttatcaacaagggagtttgttcacaattaacggtaatccggtggagaaactccggttttgcgaagctttacggtttcacaaagccaatggttgtatctttgaggattcttttagtgatgacttctgcacaattcactctctactagggagaaggtttttggaagaaaaaactgtaaaagattccaaaaatagtaagcctaaaactgaatatagccatgttaaagttagcatagcaggaagtgggtttcttctcttgtgttgcgctctttgttgtccttgctttcataaagagaggaaagcaaatagtcatgaagttctacctaaagaatctaactcagtgcaccaagtttcttcttttgaaatgagcccttcttctgagaagattccacaaagtccattccgagcaccaccaagtccatcccgcgtaccgcagagtccatctagatatgctatgtccccaaggcctagtagactgggacctttgaatctgaccatgagtcagattaatacagcaactggtaattttgcagacagtcaccaaattggtgaaggaggctttggtgtagtctttaaaggcgttctagatgatggccaggttgttgccataaaacgagccaaaaaggaacactttgagaatctgcgaacggagtttaaaagtgaagttgaccttttgtctaaaattggccaccggaacctagtgaagcttcttggttatgttgacaaaggagacgagcgacttatcataactgagtatgtcagaaatggtacactccgcgatcacttggacggtgctcgtggaactaaacttaatttcaatcaaaggttggagattgttattgatgtctgccatggcttaacctatctccattcttatgcagaaagacagataattcaccgtgacataaaatcgtcgaacattctactcacagatagcatgagagccaaagtagcagacttcggctttgcgagaggcggtcctactgactcgaaccagactcacattttaactcaagtgaaaggaaccgttggttatctcgatcctgagtacatgaaaacttatcatctcactgctaaaagcgatgtttactcgttcgggattttgcttgtggagatactcacaggccgtcgtccagtggaggccaagcgacttcctgatgagaggattacggtccgatgggcattcgacaagtacaatgaagggcgagtttttgaactagtggatcctaacgcgagggaacgagtagatgagaagatactaaggaagatgtttagtttggcatttcaatgtgctgctcctactaaaaaagagcggcctgacatggaagctgttgggaagcagctttgggctataagatcaagttatctcaggcggtcaatggaataagacaagtgttcacacgttacaaccaccaaaatgctatagtctctctgttgttagataatatcacctcttttacattttgctatccaaccacttcttcttcagatttgaaatgagatgtcttattcatgaaaaaaaaaaaaaaaaactcgagggggggcccggtacccaatcg

SEQ ID NO: 528 - DNA, 1703 bp, Arabidopsis thaliana
  Clone ID: ARATH-23APR03-CLUSTER21756_1
gttagcctcctgctaatctccatctcagatcgcaatttctcccttttccggtcactgctccggcttacgactatagcgttccgagataaagttcggctgtgttaattaaattcgccgtcggagggattttacggatatggctgttgttgaatcgcatggggatttaggttattgtcgattgaggtaaatggatgtcgagggtttgctcaactcttcgctctccttatctttgaagctggttctatagattggttagtagatcttacaaattgcaaagattggagatttgggggatttgaataagctacatgttattcgggtatgtttaggctcgagggaggccctggatcatgctatctctgcgacacattcgcagattctgccattttccttcctctgcagccactggtattgcatatgtttcaacagagtccaatcagatccagggtttgaaaccgctcgaggaacctgcccttgtgaagcttaaatctgagcgagaccctgagaagctatacaatctctttaaagctaatgccactaaccgtttggtgattgaaaatcgatttgcttttgaagatacggtctctagattagctggggcaggtcggcttgatttcattgaggatctgcttgagcatcagaagacacttccacaaggtaggcgtgagggtttcatggttaggattataatgttgtatggcaaggctggaatgacgaagcaagcacttgatactttcttcaatatggatttatacggttgcaaaagatctgttaagtccttcaatgccgctcttcaagtcttatctttcaatcctgatctccacaccatctgggagttccttcacgacgccccatcgaagtatggcattgatattgatgcggtttcttttaacattgccattaaatctttctgtgagctgggtattcttgacggggcctatatggcaatgagggagatggagaaatcagggttaacaccagatgtagttacatatactacacttatatcggcgttatacaagcacgagaggtgtgtgattggaaatggattgtggaaccttatagtcctcaagggctgtaagccgaacctcaccacttttaatgttaggattcagtttttagtgaataggagacgagcttgggatgcaaatgatctgttgctgttgatgcctaaactccaggtggaaccggacagcataacatataacatggttatcaaagggtttttccttgcgaggttccctgacatggcggaaagagtttatacagcgatgcatggtaaggggtacaaacccaatttgaagatataccagacgatgattcactatttgtgcaaggcaggaaattttgatttggcttatacaatgtgcaaggattgtatgagaaagaagtggtacccaaacttggacacagttgagatgttgctcaaagggcttgtgaaaaaggggcagcttgatcaggctaagtcgatcatggagttagttcacagaagagtacctcctttcaggtcaaaacagttgctctcccttaagtccattttgtaatgtttacatgaaatggaacaaatttgctacatgtacacgacaatgcggccaaaagaattctttctttccttctcctcagatacttttgtatccctcaggtggaactggaaatgggatgtagcaacatattaggaggcacacttatccggacgcgtgggt

SEQ ID NO: 529 - DNA, 1079 bp, Arabidopsis thaliana
  Clone ID: ARATH-23APR03-CLUSTER217581_1
ctaatcagtaatcagaagtaaaaaacacaacatgaagattatgtgggaaacagcagttgtgttctgtctctgttcattgtctttggtttctgcacacagcaggaaattcacaacaccaaacgtgacacgcctcacagatcaattcagtaagatcgccattgaaaatggcttctccagacgtttcggagctcacaatattcaggtcaatggctccctcgctaagctcactctcgacaaatcctccggagctgggttggtgtcaaagaacaagtatcactatggtttcttcagtgcaagactcaagcttcccgctggatttgcctctggtgttgtggttgctttctatttatcaaacgcagagacttatccgaaaagccacgacgagatagacatagaattgttgggtagaagtaggagagatgattggacgatccaaacgaatgtatatgcaaatggaagtactagaacgggaagggaagagaagttttatttttggttcgatccaacgcaagcctttcacgactataccctcatttggaactcccaccatactgtatttttggtagacaacattccggttaggcagtttccaaaccggggagccttcacaagcgcgtacccgtctaaaccgatgtctctatacgtcaccgtttgggacggttcagagtgggccactaaaggtggtaagtaccccgtcaactacaagtacgcccctttcgtggtttccgttgctgacgtggagttaagtggctgttccgttaacaacggatcctctaccgggtccgggccatgtaccaagtcgggcgggtcgatttcgagtctggaccctgttgatggtcaggattttgccacgttgtcgaagaatcagatcaatgccatggattgggctaggagaaagctgatgttctattcttattgcagtgataagccaagatacaaagtcatgcctgctgagtgcaactgattttttttttgttaaaacacacattgttactttctattgttttatgatataattttacgtaggatattagaggtttaaagtatgtttcaaacttcgccaaaaaaaaaaaaaaaaa

SEQ ID NO: 530 - DNA, 1621 bp, Arabidopsis thaliana
  Clone ID: ARATH-23APR03-CLUSTER21779_1
tgatattacacaatcccaaacaagacaggcaaacattctcatctcactcacaagaaaacagcacacattcttttttctgcaaaaccgatcaaaatcgaaatggcccgttgttgcagacatcttgctgttttcttatgcgttcttttgatgctctcgttgtgtaaagctttgagtagcaacgttgatgatggatatggtcatgaagatggaagttttgaatccgatagcttgctcaagctcaacaacgatgatgttcttagcttgataagctcagacgaaaccactttggaagcatcaaccgttagtgtttcaaacttcggagccaaaggagatggaaaaactgatgatactcaggccttcaagaaagcatggaagaaagcatgttcaacaaatggagttactactttcttggttcctaaaggaaagacttatctccttaagtctactcgatttagaggcccatgcaaatccttacgtaactttcagatcctaggcactttatcagcatctacgaaacgttcagattacaaagacaaaaaccattggcttatcttagaggacgttaacaatctatcaatcgacggtggctcgacgggaattattaatggcaacggaaaaacctggtggcagaactcatgcaaaatcgacaaatctaagccatgcacaaaagctccaacggctcttactttatacaatttaaagaatttgaatgtgaagaatctgagggtgaaaaatgcgcagcagattcagatttcaattgagaaatgcaacaaagttgaagttagtaatgttgagatcactgctccgggcgatagtcccaacacagatggtatccatatcactaatactcaaaacattcgagtctccaactcagatatcggaacaggtgatgattgtatatccattgaggatggaacgcaaaatcttcaaatctttgatttaacttgcggccccggtcacgggatcagcattgggagcttgggggacgacaattcgaaagcttatgtctcgggaattaatgtggatggtgctaagttctctgagagtgacaatggagttaggattaagacttatcagggaggatcaggaactgccaagaacattaaatttcaaaatattcgaatggaaaacgtcaagaatccgatcataatcgaccaggactactgcgacaaggacaaatgcgaagaccaagagtcggcagtgcaagtgaaaaacgttgtgtacaagaacatatctggtacgagcgctacggatgtggcgataacgttgaattgcagcgagaagtatccatgtcaagggattgtgcttgagaacgtgaaaataaaaggaggaacagcttcttgcaaaaatgccaatgttaaaaatcaaggcaccgtttctcctaaatgctcttaactgagctaattatgtaatgcacatacacatatttacatagatatgcatatttatatatagcatgtatattgtactacatgcattgcttcttaatacatgtagtaaagatatatgcaaaaatagtcgaaagatttgtttacatataaaatcaccaatatttattgttattgtattttcatgaataaagtaataagattatttgtctaataaaaaaaaaaaaaaaaaa

SEQ ID NO: 531 - DNA, 1578 bp, Arabidopsis thaliana
  Clone ID: ARATH-23APR03-CLUSTER21790_1
aagaaaatctcaaatagatataacaagtattctggaagaaagaaaagagagagaaaatgtcgtccagtaaaatccaggtacgagggcagccacttcttagggttccggcaagaaaccaccgtatgacacacttggttgtttgcggcgtttccacaaaacgccaccaccgtgaaatcaatgcactcagcagtaatagtggtccatcgttggattcggtcccaacaagaaccgacaagaggcagtttcttcgtggtgacggtaacggtaaattcgggaggttcggtgggaagtttgtaccggagacattgatgtctcgcctgatagaacttgaagacgaatttaactttgttaggtgcgatcacgaatttcaggaggagcttaccacagcgttaagagactacgtaggaagagaaacgcctctctacttcgccgaacgtctaaccgaacactacaagaacatagttccaaccatcgaaggtggaccagagatatacttgaaacgggaagatcttagccactgtgggtctcacaaaatcaataatgctctcgctcaggccatgatttcccggcggcttggttgcagccgtgtggtggcggccactggagccggacaacatggagtcgccacagcggctgcatgtgcaaagctctccttggagtgtactgttttcatgggagctgctgatatagagaaacaatcctttaatgtactttccatgaaactccttggtgctcaggttatatcagtggaaggaacattcaaagatgcaagttcagaagctatacgaaactgggtcgaaaacctatataccacatactacttatcgggtacggtcgtaggaccgcatccgtgtccgataatagtacgtgagtttcaatctgtgatcgggaaagagacaagaaggcaagccaagcaactatggggtggtaagcctgatgtgttggtggcctgtgtgggaagtggctcaaacgcattgggtttgttccatgagtttgttggggatgaggatgtgcggttagtcggtgtcgaggctgcggggcttggtctggattcggggaaacattcagctactttggcctttggagatgttggtgtataccatggttccatgagctatttattgcaagatgatcaaggacagatacttaaaccacactccgtaggtgttgggttagagtatcccggagttggaccggagattagtttcatgaaagaaactggcagagcggagttctatacagcaacagacgaagaagcaattcaagcgtgcatgcgattaagcagattggagggaataataccggcattagaagcgtctcacgcgctcgcgttcctcgacaaactcgtgcctactcttcgtgatggagccaaggtggtagtgaactgcagtggccgtggtgacaaagatttagatactctcatccaacgaggcatgccttcttctttttgttgactcaccaagatgccacattacacttaactcttttagaaaacgtatggtccaatcacaaccatcattatagatgaaatactaatatatcaatcattatttaatttttcgatttactaatcaccct

SEQ ID NO: 532 - DNA, 1741 bp, Arabidopsis thaliana
  Clone ID: ARATH-23APR03-CLUSTER21812_1
aagatcatcctctgatttttcagacacatatttgtaatttataaagtttgtagctttttccttagcttgagattacacgaagaagaagaagatggatgacgttaaagataagctaaagggattcatgaaaaaagtcaatctctcttcttcttccggcaaattcaaaggccaaggtcgggttctcggatcttcttcttcttcctctgcaccacccgttaacccgattcagaaccggtttaactcttcccaagctcccaatccgactcctagacccaaacccaatccaaatccgttgcctgagaaacccttatcctcctccgatcagaagattagtgggtcaacgagaaacccggatcatgacccggttcgtgctccacaagatgggtttgacccgtacggtgctttcataacgtcttcgaacagatctcagaacggatattctctgagcatgttcgagtgtccgatttgtaaaaatccattcacgtcagaggaagaagtctctgttcatgtcgagagctgtcttggggacactaatggagacgaatcttcatttgagaaggataataatgataacgataaatccgaaatggagaaacttgtggttgtgtatctctctgggaagccaagtgagagctctattgatgttttgcttaggttgtttaagaacatagtgaaagaacctgagaatgctaagtttagaaaagttagaatgagtaatgctaagattaaagaagctattggtgatgttgctggaggtgtcgagcttcttgagttggttggttttgaattgaaagaggaaaatgatgagatttgggctgttatggatgttcctagtgaagaacaatctatattgatcaataaagttgtcggatatctagaaaagagaaagacagagagttcaggatcttcagctcaggttatggaacctgtggctccaaagaagattgatagagagattcgtgtctttttctcggtttctgaaaacgtagcatcgagaatagaggtacctgattcgttctatagtctctcggcggatgaaataaagagagaagcggatttacggaggaaaaagattgcggagtcacagcttttgattccaagatcttataaggagaaacaagcgaaagcagctagaaagagatacaaaagaagtatgataagagtgcagtttcctgacggagttgtgcttcaaggtgtgtttgctccatgggaacctacttttgctctctatgagtttgtgagctctgctttgaaagaaccaagtttgcagtttgagcttctggatcctgtgctggttaaacggcgtgtgattccacatactccagccccgggacagaaaccgataacgttagaggacgaagagcttgttccgtcagcgctcatcaggttcagaccgatcgaaacagactctctcgtctttacaggactccgcaatgaactcctggagatcagtgaaccactctcgtgatcatttgtgttccactgatgatttagcttgagcccatgaaataagtttacaaatttaggtttctctcttatatggtgtgatttgatgatgatttgtgtttgtgattcgagcacattttataggtttataagaaatttgtgtcatttgcacaataagaagaatcataaatttgaaggtccaaaaaaaaaaaaaaaaaaaaagggggggccccattgatccaaccttgcgaagcggcatgggcgcgaaccctcaaaattttttttttggggcccc

SEQ ID NO: 533 - DNA, 1614 bp, Arabidopsis thaliana
  Clone ID: ARATH-23APR03-CLUSTER218252_1
aaaattctcgattttttttttcttctaaattctggagttttcttttccatatgtggcaaaatccgtgatcctcacgtttcaaaattacctaaaacccctaacaattctacaattcttcttctatgtcgattctatttagtaatctcgaagaatggttcgtggattgatgaaattcccaggaatctcaacgaagttattaaacataagcgttaattctctctgcaaatttcgaaacttggagagagcagaaacattactcatagacggaatcagattaggtgttcttcctgatgtgatcacttacaacactctaatcaaagggtacactcgtttcattggaatcgacgaagcttatgctgtaacacgtcgtatgagagaagctgggatcgaaccagatgttactacttacaattcattgatctcaggagctgctaaaaacttgatgttgaatcgtgtactccaactgttcgacgaaatgcttcactcaggtttgtctcctgatatgtggagttataatactttaatgtcttgttacttcaaattagggagacatggagaagcgtttaagattcttcatgaggatattcatttagctgggttggttcctgggattgatacttataacattctgcttgatgcgctttgtaaaagcggtcatacggataatgcgattgagttgtttaagcatctgaagagtcgggttaaacccgagcttatgacgtataatattctcatcaatggtctttgtaaatcgagaagggttggttctgtggattggatgatgagagagcttaagaaatcgggctatactccgaatgcggttacgtatacaacgatgcttaaaatgtattttaagactaagaggattgagaaaggtcttcagttgtttttgaagatgaagaaagaagggtatacgtttgacgggtttgcgaattgtgcggttgttagtgcgttgattaaaaccggaagagcagaggaggcgtatgagtgtatgcacgagcttgtgagaagtggtacaaggagtcaagacattgtttcgtacaatacattgttgaatttgtattttaaagatgggaacttggatgcagtagatgatctattggaggagattgagatgaaggggttgaaacctgatgactatactcatacgattatagtcaatggtttgttaaatataggcaatacgggaggagccgagaagcatttggcatgtatcggagagatggggatgcagccgagtgttgtcacttgtaactgtttgattgatgggttgtgcaaagcaggtcatgtagatcgtgcaatgaggttgtttgcgtcaatggaagttagagatgagttcacttacacttctgttgtgcataatctatgcaaagacggacggcttgtttgtgcttcgaagctgctcttgtcgtgttacaataaaggaatgaagattccgtcatcggctagacgagcagtgttgtccggcatacgggagacggtatcttaccaagcagcaaggaagacacatatcaaaatcaaagcagctattgagtgtaatacactaatgtacccttaagacattgaaaagtatctaatagaaaaattattgaattgcaaaaaaaaaaaaaaaaa

SEQ ID NO: 534 - DNA, 828 bp, Arabidopsis thaliana
  Clone ID: ARATH-23APR03-CLUSTER21828_1
aatcttttcatcctgctcgcgcgccggctttaatcataaaatcgaaattcaattcgtcggaaaattgttcagatttcgaaatcaaccgagaaaatgtcgctgattccaagcttcttcggcaacaacaggcgaatcaacaacaacatattcgatccattctcactcgacgtatgggatccattcaaggaacttcaattcccgtcaaattcttcgtcggcgatgcttcttgggcatcaacaggcgaaagaacagcatcttgcgcacggttctcactcggcgtttgggatccattcaaggaactgcaattcccgtgatcgctctccggagaaactgctgcgataacgaacgcacgtgtggactggaaagagacagcggacgcgcacgtgttcaaggccgatctagatgggatgaagaaagtagggggttaaagtggagatagaggacgacagtgtgctcaagatcagtggagagagacacgtggagaaagaggagaagcaggacacgtggcatcgtgtggagaggtcgagcgggcaattctcgaggaagtttaagctgccggagaatgtgaagatggatcaagtcaaggcttccatggagaacggagttctgactgtgacggtgcctaaagtggaagaggctaagaagaaggctcaagttaagtctattgatatctctggctaaagccaattagcttatgggtttcatgtttatgcgtaaagactcttctgattatggctcttgatttgaatatggctctgtgttttggtaatgatgtattataactgttaatcctaataattaagcaaggcctttatattaaaaaaaaat

SEQ ID NO: 535 - DNA, 1063 bp, Arabidopsis thaliana
  unsure (1)..(1063): unsure at all n locations
  Clone ID: ARATH-23APR03-CLUSTER21832_1
ggattgctttgccttggcgtatctgctttgggtgataaagaatgaagctaagcgagtcaagaggcgaaacagagaagcacaggcgacaacaacatttcgagcacgagcttaagaacatgatctcttccttaacccacatgggaggagataaggcaggacctagccaatacgatgaagaggaagatggtatcagagtcatcacactttctggatccaaccttggagccaccatgaagaccgagcttgacaacaatcatggagacagagaccaaaatggcgaccacgagcttgatttcctaagcacttatgttaatagcaacttccaagctgtgaacaactcgattatgataggggccaagtacgagactcatgatcctggcgttcatcttgacatttcgggcgatgtggagaaaccttcggtgaagatacctgcgaggagttcaaggggaaagaagggtaagactcctgccagaagtgaccgtcgagaatctgaacatactaattgaatggtatggtatattcatggatcagtgttaattctctttttttattttcttgtcttgccttctctaaataatcagagaagtggtgcatgccaaagcactttactttctcttcgaggttgttgttttcgcttgcgcttcttattatcaaacatgttctatatatagtctattctcaatataaataaatgtatgaagcatggtgtggtcgatcctcattgatatgattatttggttctcgagggcatctaaaggccgttcccgctccccaaagaagccaacgcttgccctcctcgattgtccgtcactggagttcattgatcctcggctgcgcgtcgcgcttctccgtggttccaaggagtctntgataantcgncgncntngtntngtnanncnntnnctngctgttcgccccncnnccgtgcncngcngcnntcgncnncntgtncnntncngcacnctcggttccnntncncanntcnangnctgttgatatnatnagatnaaaaanccnccgngggnggntgccnnnnnnnnccccacantttganttcngctcg

SEQ ID NO: 536 - DNA, 931 bp, Arabidopsis thaliana
  Clone ID: ARATH-23APR03-CLUSTER21833_1
aattcctctgagaaaccctaagaaaaaccctgcctgaaaatctctgttttttttgacgattctttctttgtgatcggaaaaaatggtggctggtctaagagatttcacgctcagaaccgaagatggctccgggaaaccggtactggatgaatctaacggcgaggaacttatgcacgttcagacttccgtcgccgtcgctctcggaaaccgtcccattgagtctcccggaactctctacatcacttccaggaaattaatttggctgagcgatgtagacatggctaaaggatacgcagttgatttcttatcaatatcgcttcacgctgtttctagagatcctgaggcttattcatctccttgtatatatactcagattgaagttgaagaagatgaggatgatgagtctgattcagaatccactgaagttttggacttatcaaagatcagagagatgaggcttgttccttctgactctacccagttggagacgctgtttgatgtattctgcgagtgtgctgagctgaatcctgaaccagttcaagaagaagaagaagaaagcggacataattgggtgtttagtgctgatcagatggatgttcgtggaggagatgatgatgcagagtggcaaatatctcagagtccgactagtgtaattggtcattccaatggagatgaaggtcttaatcagcctatgcttgagctccaaatcaatgatcagaggtttgaggatgctgaagagatggttcatgaaagtgagaccaaagatcactagactcttcacaattgtactcgaaaacatagtagttgtgttattttaacgatgaaagagttgtattatgttcaacgataaagtattatgttcgtgatacttagcttttcaatttatggctgattaaactttaatctttctcgtaatagatctctcaatttg

SEQ ID NO: 537 - DNA, 1435 bp, Arabidopsis thaliana
  Clone ID: ARATH-23APR03-CLUSTER218475_1
aaaatagaacattgttcacactctcaattcaccaaccttttgtttcctgaaatgtacaaacactagaaccagatccaaaaagacacagttctactatatggatgatggccctggcttcttcaaaccatctgtgtgtttagtcttctcatttgtgcacaactcaaagacaagtccactaagtttgaagcaaaatggcgatatggtttcagagaattttcctgttgcttctcgtttcctgttgcgcctcttcagattttttggaaaatccagacttcgaatctccaccgttaaacttacctacaaactcaaatgctagctctgtatcgctggatcagaacagtacactcccgggatggacattccaagggacagtgctttatgttgaactgcctgataccggacacgcggttcagctcggtgaagatggcaagatcaatcaaacattcattgccaaaggtgatgaattgaactacatcctcacattcgcactgatccacgcaggccagaactgtacaagctctgctggtctcagtgtctcggggccagacagcaatgcggtcttttcttacagacaaaactacagtaaggtttcatggcagagctacagtcataacttgggtagttgggggaatggtgagcctattaacttagttcttgaaagtcaggcaatagattctgattctgatacaaactccacatgttggcctatcattgacacattgcttatcaagactgttggtgtaacattggtccaagacagtggtaacctcttaatcaatggtggatttgagtctggacctggtttcttgcccaactcaaccgatggagttctgattgacgcggttccaagcctgattcaatcaccattaaggcagtggtctgtcataggaacagtcagatacatagactcggagcacttccatgtcccagaaggcaaagctgcaatagaaattctgtctaacacagctccatctggcatacacagcaacaaaaggcacaagtgaaggttcaagatacaacctcacatttaccttaggcgatgctaacgatgcgtgcagaggacatttcgtggtgggtgctcaagctggctccgtaactcaaaacttcacattggagagtaatgggactggctctggtgagaagtttgggttagtgtttgaagcagacaaagatgcagcacagataagtttcaccagctactcagttacaatgacaaaagagaatgttgtttgtggtcctgtgattgatgaagtgatggtacatcctcttggtggaacagcctcagtaaaacccacttggctgctacttattttcgctttgttgtatgttgcagttctctgattgaaactgtttgggagagaggtcataaagaagatatttttgcaaggagatgtgataatcattctagcttcatgattaaaaaaaaaaaaaaaaa

SEQ ID NO: 538 - DNA, 1687 bp, Arabidopsis thaliana
  Clone ID: ARATH-23APR03-CLUSTER21857_1
gatttacccccctaaaagggcaaaaaaaagggggggctccccccggggggggcccctttagacttagggattcccccggggctcaggaatttccccggacccctttcctaggacctccttattggaaaatttgtgttatgtctgctcaaagacagcctttgtaaccaaaaccaaagtgtctctcttttcttcttcctaaatttctttccacgagaattgatttgggtttgtgttgtttttttctttcttttttgggtttttgtaattgggttggtgaataatcctgcaaaagtgttcgatgattttctccagagaagaattttgaagtttctctttttagagattttttttgttgttggggttttttgttttctgggggaaattgaaaagagatggcaggtgaagaagattggatagaactaaagtttagactagcagatggtacagacataggtccaagcaagtataatcaatctatgactgtttcttctcttaaagagaaactcatttctcaatggcctaaagataaagaaaatactccaaaaactgtaaatgatatgaagctcatcaatgccgggaaaatactggagaacaataggacacttgctgaatccaggcttcctgtttgtgaacttcctggaatgatcattactatgcatattgttcttcgccttcctacgttagacaaaaagagcgaaaaactgcagaatgatccaccgatgaagaatcgctgcgtgtgcaccattttgtagctgcaagtaaattggatcatagagatttatatccgtcatgatcatggcactagatgatgctccacggaacaacttccatggcatcaaacaagctttgagaagttccttcagtacagaatgattggcataggcatgaaaacaaaagatcttcattacagaatttggttccatgtgtgtggttgttaattattattttttaaaaatcaaaatggcttgagaaaatgtactatgattcttgaaggttggttcttttataaatatatacaatatgatcaatacaacagtaaataacaagaatggtattgtccttatgtatgttcttattctcaactaaacttctcattttttgaattaaagaatatggggtttctatacaacacagagaacacatcactttaaaaaccccatatcttgagactcgaataaacaacaattatattaagctatctataactcgagaccactcttggaacttggacttcttcaacattcttggaactttatatacatggtaagtaacatctgtgcattaatgttcaccaagagttgctgatgatgaacggttcaagagcatagccttctttgatgccctaacgttcttcagagtcatcatcagcttttgtctctctccttcaacctctgcaaacttgaggcttagctgagaataacggtcatgcatttccctaagctctgtctccatagacgaataccggcctttggtatccaacatttcttcaattagattgtttatgtctctgaaactctggaagattgcttcgtcattcggtgtgttgcttcaagaaagagctctggaaatgggtggttgattttttctttccacgcaatgcttcagcgagttctatttccagtgcaagaaccctttccaatgcgtttccgcaactgaaattctcttgagatagagggaagatactctg

SEQ ID NO: 539 - DNA, 2910 bp, Arabidopsis thaliana
  Clone ID: ARATH-23APR03-CLUSTER2188_1
acctaaaaccttcaaccaaaatcaccaacttccttcaacaaccgatggacctttcaatatttctctgaattttatcagaaattgaagactctcagatgtcttctctgtcgcaatcgccaccaccgccggagatggatatccaacccccggcattggttaacgatgatccttccacttattcctccgctttatgggattggggagatctccttgacttcgccgcagacgaacgccttctcgtcgatcaaattcatttccctcccgttctctctcctcctctaccgcctctgattccgacgcaaactccggcggaatctgaattagatccttctccggaagaatcgggttctggttcggatcgggttaggaagcgagacccgaggttgatttgttccaatttcattgaaggtatgcttccttgttcgtgtcctgagcttgatcagaaattggaagacgccgagcttccgaagaagaaacgggttcgcggcgggtcgggcgtggctcgatgtcaggttccggattgtgaagcggatattagcgagctcaaagggtaccataagaggcatagggtttgtctccgttgcgctaccgccagctttgttgtgcttgatggagagaataagagatactgtcaacagtgtggaaagtttcatttgctcccggactttgatgaaggaaaacgcagctgtcggagaaagctagagcgtcacaacaacagacggaaaaggaaacctgtagataaaggaggtgttgctgcagaacaacagcaagtgctttcacagaatgataacagcgtcattgatgttgaggatggaaaagatatcacatgctctagtgaccagagagctgaagaagagccttcattgatttttgaagatcggcatattaccactcagggttctgtaccttttacccgaagcatcaacgcagacaactttgtctctgttacaggttcgggtgaagctcaaccagatgaaggaatgaatgacacaaaatttgaacgttcaccttctaatggcgacaacaaaagtgcttactcaactgtgtgtccaactggtcggatctcttttaagctctacgattggaatccagcggagttcccacggagactacgtcatcaaatatttcaatggttggccaacatgcctgttgagctggagggctatatccgcccaggatgtacaattttgactgtctttatagcaatgccagagattatgtgggcgaagttatctaaagatcctgtggcatatctggatgaatttattcttaaacctggaaagatgctgtttggaagaggctcgatgactgtctatttgaacaacatgattttccgtcttattaaaggtggaacaactttaaagagagtcgatgtaaaattagagtcgccgaaacttcagtttgtgtatcctacatgttttgaagctggaaaaccaattgaactcgttgtatgtggacaaaaccttctgcaacctaaatgccggtttctcgtgtctttttctgggaagtacttgccacataactattctgttgtacctgcaccggaccaggatgggaagcgttcttgtaataacaagttctacaagatcaatattgtgaattctgaccctagtctctttggccctgcctttgtcgaggttgaaaatgaatctggcctatcaaatttcatacctctaattattggagatgcagctgtttgttccgaaatgaaactaatagagcagaagttcaatgctacactctttccagagggacaagaagttactgcttgctcttctttgacttgctgttgcagggattttggggagagacagagcacctttagtggcctcttgttagatattgcatggtcggtgaaggtaccctctgcagaacgcactgagcaacctgtgaaccgatgtcagataaaaagatacaacagagtgttgaattatctgatacagaataactcagcgtcgatcttaggaaacgtactgcacaatttggaaactttggtgaagaaaatggagccagacagtcttgttcactgtacctgtgactgcgacgtgaggcttctacatgaaaatatggatttggcgagtgatattcacagaaagcatcaaagccctatagagtcaaaggcacgcgatagggatcctgaagcaggattagattgtaaagagagaatacaggcagactgttcaccagatagcggcggaaaagagactgatcctctgttaaacaaagaggttgtcatgaacgtaaatgacataggagactggccaaggaagtcgtgtataaaaacgcactcagctttagcattcaggtcccgtcaaactatgttcttaatcgctacgttcgctgtctgttttgctgtctgtgcggttctctaccatccaaacaaggtcacacagcttgcagtggcaatccgaatgagattggtacacaaaatttgaatataagttcaacggcagagactctcattaacgtgtgtgcatcaaaaagctcgaagagagctgtaagagtgttcaacagagctcagccacaacagcttctcagagagtttcccttcagaaagagacaggatatgatcagatgaggtcttgctctttctgtgtgttcttcttcccaatttctataagaccggtgatgctgcaactgtaataacaagaaatgctcagatcagtgattaattatctctagtcgaatagtgttttatgtatattagggtttacttttgctcactgtaacctgttttttctttgtttcttggtctaagaaatgattcttgaacaaatcctaatcgtaactttatgcaattttctacttcaagcaatgtcttggctcttgagatctctctaaactctgtttggtcacctctattatcaaatgttatctttgacttttctaaaagaaaaaaaaaaaaaaaat

SEQ ID NO: 540 - DNA, 1011 bp, Arabidopsis thaliana
  Clone ID: ARATH-23APR03-CLUSTER21891_1
ctctcgcgcctctccgtcctttgagtctctggctttggctgattccgcggctccgtttctccccgtccctggggagctccgccgcataccagtcgtccgcttcgacatcaatagaacaccagaaaacattcccgcggaatataagctgcttctccttcctaatctaaaacttacgcttctgactgttattagagactatgtaaatggctgattccgagactccgtatcaccccgaccctgaggatctccggcgtataccagtcgatctcttcgcttccaaaaagcttcccggactttcctccggcgatctcggatttgccgattcttccgaacatctcgtcttcatcctccgcaaatcttcttcctccttgaaatctctccttgattcctccggagttcctctcttctccatctctcgtctccacaatggagtgtgggaattacataaaggagatgtggaaaagcgtaaggatttggttctaacggtgaagcggacatcgaaaagattcagtaagacagagtcagaggtctcttttgctggagaatcgtccgaaaatcttgttatcaaaggtgttccctttcagaaatcatgtaccatttatagtcaagattccattgttgcacagacgagtttgatgtacaagctgagacagatttacgtagggagaagcaagttccggttaacgatatttcctggatccatcgatcattcactagtactcgcaatggttgccatatttcttcaaggatgaaagtgaaaaatcattcactttaaagttactgtaaaggaaaatgtaattcacaggcaaaaaaaaggcattttagtacattgcatttttaatgccttttgattcgatcggctcacacgtggaaatgtagatactacgagtttgcactttctcaattctataatctgttatggtctgatggagtttcgtctcttcaaaaaaaaaaaaaaaaaagctttcccgtaccgtcgactgtttaaacacaataaagttggaacgtgga

SEQ ID NO: 541 - DNA, 1441 bp, Arabidopsis thaliana
  Clone ID: ARATH-23APR03-CLUSTER218984_1
cattgatttagggttcctgataaagttcggtgttcattgatttagggttcctgataaacttcggaaacccctattttgaattgtttcggaattatctggtgagaagggtctaattcgattgtggattagttttttttttgttctgtttcttcaatggcgatcattggagatgcgttgcgtcaagcgtttatgccaaagcaagagtacgagagccttagggaagaagatagagcctggattaagcttcagaggccgactttagtctcgatcgtggctttcctttgttttgtcatcttcacttgcacgatcgtcagcttgaaaattgtatttccttcgaatgttcttaagaggccattttgcagcgacataaagctacaacctttgcctatctatggcaaagctcgtgactccgatctctttcccggtgctttttacttgaccgatcaagaaactgttgatttttactggatggccgctgtcgtagaagaggacgtaactttccttgtatcatctgtttatcttgtagcaggaatttttgtggcttattccgctcctcaccgtcatgagtttctaaaagtcgttgaaaataactactgtgcttcaagaagaggtggggtccgttgtctgtcaattctgaatgttgtgtttgctatcatctatggtctccttgctatatttctcggctcaagcctcctcacattaggaagcagctgttctgtgcctttgttttggtgctacgagatttcttcatggggtttagtaatcttgtatgctggaactgctttctcccttagaagaagagctgctttaactattgacgaaggagagtttgggaacagaaatgatcagggcttggagatgcttgaagctaatccgttggaattcacaccagacgttgaaagacgagtgaacgaggggtttaaagcatggatgggaccatctttattatcatctgatgaagaagaagacgaacctgacttttacaatgaagtgccgaatgtaactcatactctttcaagcaggcaaagatcttgattcttgcaaagaagaatttggtatgacacttatgcaaacctccaaagatgattgcttcagagattgggctcaccaaattgttccctcagtgattctcgggttatttcatgtctctgctttctgctgatgttgtttatggacggatcatgagaagattttgatccggaagataaatcagaacggttaggactgttgctgttgtagatatacacatagtggatcaatcaagattgtgtttggttctgtcttttgagcagttcatggtcggttttgatcgtttacattgttcattgtaggaatttgggtttgtagtataggcctaacaatacattttgattgtacaataacctttagatcaacagtaatagcatcataaaaggattagtatcaaaaaaaaaaaaaaaaa

SEQ ID NO: 542 - DNA, 1646 bp, Arabidopsis thaliana
  Clone ID: ARATH-23APR03-CLUSTER219526_1
atctttctcctttattcaccactgttttacttagtcgtcgtctccacatgacgactgaaaccctagaattgaaaacaccacaattagcagatactgttgctgttatcgagaaggacagagagacgaagaagaatgatgaagtagggaaagatgaggccatggaggagaaaggagaagaaaatgatggagaaaaagttaaattgccggtgactccagtcagtgagagacctataagggagaggaagaggactggccgttacgtcatagatactcctcctcgatcctccgggaacaagcccctgtcaattacgcagggtcgtggaacacggcttaaggaaattccaaatgttgcttataaactgtccaagagaaaacctgatgacaacctcttcttacttcacaccattctttacggcaaaaaagcaaaggcacagatgctaaagaaaaacattggtcagttttcgggttttgtatggtcagagcaagaggaggagaagcaaagagcaaaagctaaagagaagcttgataaatgtatcaaagaaaagttgattgatttctgtgatgtgcttgatataccagtaaacaaaagtactgtgaaaaaggaagaactggctgtaagagtgcttgaatttttggtatgtcccaaagcaacaagggatattctacttgctgatagtgaaaaggaaactaaaaagcgcaagaagagcacatcgaagaacgtgacctctggagaatcatcacatgtcccagctaagaagagaaggcaggcgaagaaacaagaacagccaactgagactgaaggaaatggtgagtctgatgttggttccgaaggaacaaatgactctactggagaagatgatgtagctccagaggaagaaaacaacaaaagtgaagatactgaaactgaagatgagaaagataaagccaaggagaagactaagtcaattgataagaaacgcttgtcaaaaaggactaagaaggagaaaccagcagctgaagagaagaaatctattaaaggttctgcaaaatctagtcgaaagtcctccagacaagtcgataaatcaacttcatcatcaagcaagaagcaaaaggttgataaagacgattcctctaaagagaaaggcaagacacagacaagtaaaccacaggcaaaaggatccaaagatcaaggacaatcccgaaagaaaggtaaaaaagaacccacaagaaaagaactgcatgtagtggtgaccaaaattctgaaggaagtagacttcaatacggcaactctatctgatattctacggaagcttgggagccattttggaattgatcttatgcatagaaaagcagaggtgaaggatatcattacagatgcaattaacgaaatgagtgaggatgatgatgagaaagaggaagacacagaggatgaaggtgagaaagagggaaaggactagttttgtctttcttctctttcctgcaataagaaaaagaaaacataaccgaagagacggtttaacttaaccttccatgtgtgaatcataggattgtttgtatgtttggtgtaatgtgtaatctgttaggctcatgtagtatcaggtaatgtggttggatactttctggattagaattaatttgagatgtatttgtaaaaaaaaaaaaaaaaa

SEQ ID NO: 543 - DNA, 1612 bp, Arabidopsis thaliana
  Clone ID: ARATH-23APR03-CLUSTER219588_1
cttttaaagaaaagttccatttcatatctctatcaaacccttttctgaatattattttgcttgtgaatttgaatttgagcttttttcctctgttcttgggaggaatttttgtctgtgtttgtgatgcgttataattgcttcggacttcttgatatgtgcaacggaagtgatcgtcttggacaaagagaagctgaagagatttgcaccaacaatgtgagggtcttttcatataattcattaagatcagccactgatagtttccatccaacgaacagaatcggaggtggtggctatggcgttgtctttaagggagttttgagagatggcacacaagtagctgtgaaatcactatcagcagaatctaaacaagggacacgcgagttcttgaccgagattaacttgatatcaaacattcatcatcctaaccttgttaaactcatcggttgctgcatcgaagggaacaatcggattcttgtctatgagtaccttgagaacaacagtcttgctagtgttttgcttggttcaaggagtagatatgtaccgcttgattggtccaaaagagctgcgatttgcgttgggacagcttcgggtttagctttccttcacgaggaagtcgaacctcatgttgttcaccgtgacatcaaggcgagtaatatcttactagactcaaacttttctcccaaaattggtgatttcgggttggctaagctttttccagacaatgtcactcatgtcagtacccgagtcgctggaacagtgggatacttggctccagaatatgcacttcttggtcaactgacaaaaaaagcagacgtttacagcttcgggatacttgtgcttgaggtcattagtggtaatagtagcaccagagccgcctttggagacgagtacatggttcttgttgaatgggtgtggaagctgagagaagaaaggaggctactagagtgtgtagatccagaactaaccaagttccccgcagatgaagtgacccgtttcatcaaggtggctcttttctgcactcaagccgcggcgcaaaagagaccaaacatgaagcaagtgatggagatgcttcgcaggaaagagcttaacctcaacgaggatgccttaacggaacctggcgtctacagaggtgtcaacaggggacgcaaccaccgtggaatcggtcttagggtcggccaaggaggcagctcacaggagagctcgtcaacgcaacgtgacaaagggaaaagctcagccgttcctcaagggtcgacgtccaactctaatatttccttccagagcatcacagagttggctcctagatgatttttttctgttaatagagcacaattttattcttgagtatattaattagtttatgatgtgttaatatcttatacatagggtatatatgaataaaccaaagatgctatctgataaaatgtaatgtagttgtctgacatttccctttgtgtcagaagccagcagtttaaaattatgattggcatgattttgcaacataaaaaaaaaaaatgatttggcttgatttgcaacattcttgaaatgaatgattgataccttattaacttactaaaaaaaaaaaaaaaaaaaattaattaattaagacactagg

SEQ ID NO: 544 - DNA, 2985 bp, Arabidopsis thaliana
  Clone ID: ARATH-23APR03-CLUSTER21989_1
aaaaaaataaaaagttcctcaaggaggtgtaaagattattgtacggagaattaagcttcctttggagatggcgtccatggcgaccggcgtcagtttttcgatgactagcggcataggagaaggaggatacgatgttcatcgagtagcgacggctgcacggacaactctgaagctgaatcagaagaactcactgagcgagagtacatgcatgcttttggggatgaataagtatcggggatccggagctatacgaaccgtctcgaaggctgtcggttacggacaagagatgagtaagagtctgagggtgggactcatttgcggaggtccgtcggcggagcgcgggatttctctcaactctgctagatcagttctcgatcatattcagggtgatggtataaacgtgagctgctattatatagatcctgatctcaaagcctttgcaatttcatccgctcaggtgtactcgaatactccttcagatttcgattttaagctggagagtcttgcacagggattctcgtcattatccgaattggccgagcatcttgtttctgctgtggacattgtttttccagtaattcatggtcgatttggtgaagatgggggcattcaggagctgttggaaagtcacaacattccatttgtggggactggatcccgtgaatgttttcgagcatttgacaagtatgaagcctctttggagctcaaggaacttggtttcatgacagtaccaaactacttggtgcagggaactggagtagacaaaagtgaaatagcactgtggtttacagataaccagctggatctcgagatgggaaaagttgtggtaaaaccagctaaagcaggttcaagcattggtgtcaaggttgcttttggcgtaaatgattcaattaaaaaggctactgaacttattctagagggaattgatgatagagttgttgttgaggtgtttattgaagatgcatatgagttcactgccatcgtcctggatgtgggttctggttctgtttgccatcctgttgttttgatgcctactgaggtgcaacttcagtttcatggcattggtgatccaaaggaaaacgcaatcttcgactatcggaggaagtatctgccgacacagcaggtcacctatcacactcctccacgtttccctatccatgttatcaaaagtattcgtgaagaggcatctcttatatttcaaaagcttggtttacgtgactttgctcgcattgatggatggtatttggctcccaattcaaatttatcatcacctgtaagtgaaacgcttggaggaaccaagtcaggagatattatattcacagacatcaacctgataagtggcatggagcaaactagctttctcttccagcaggcatctaaggttggattttctcattcaaacattctgcgaacaatcgtccaccgtgcttgctcgaggtttccccatcttgattggtataattatgggtatagtcaattactccaaggttcaacaaccctggaagtctctgaggacccccagaaagtgtttgtcatatttggaggagatacttcagagcggcaggtgtccgtcatgagtggaacaaatgtctgggtcaatttgcaaagatatgtagatgtaagttgaaaagaacgcagacatcatttgaggtgtaatcatgtatcttatgaaatcattaattcctgtgtatattgtcattaaacgataatagtgggtgcaataggattgccctgactcagatgatcttgttctttacagcttaatgtaactccctgtttgcttccaaaaaaaaaaaaaaaaagaaagtactcattgaaagagtggatcaagcatgccaaggaagctcaagcaactgtcttcattgcagtgcatggaggaattggtgaagatggtacactgcagggcttgctggaggatgaaggagtttcttatacaggtccaggcgtactagcttcaaggacttgtatggacaaggttatgacatctcaggctcttagtaatctttcagagtttggaattcataccataagcaaagatgtgaagagaacagaggatataatgcatgagaccttcccaaatgtttgggatgaattaatcaagaagcttcagtgtctcacactatgtgttaaaccagcaaaggatggatgttccactggcgttgcaagattatgttcctctgaagaccttgctgtatatgtacaagctttgaaagattgtataccaagaattcctccaaacactctttctaagacacatggaatgattgagatgccaaatcctactccagaattcttgatttttgaaccatttgtcgaaaccgatgaaatcatagtttcatccaaagccaagcagcagctctcttggaaaggtaggaggcggtgggtagagatgactgtgggtgtaattggaaagcatgggtcaatgcattcactgagtcctagtcttactgtcaaggaaagtggggatatattgtctctcgaggaaaagttccaagtggcatatgaaattaaatcttgaataggaggcactggcataaatcttactccacctccaccaacaatcatgagtaaggaagctttggagagatgcaaacaaggcattgagctgattgcagaaactctcggcttagaagggttttcacggatcgatgcttttgtgcatgttgaaaccggagaggtgctggttatagaggtaaacacagttcccggaatgactccttccactgttttaatccaacaggcattagcagagcagccgccaatgtaccctcctcaattctttcgcactctgctccatcttgctacgcagagagttgtgtaagcttttctttgtctttcgtatttacattattcccaagtttagtgtgttttttgtaaattcgatgccttcgtcatatgattaaaataaagtggatcccatatgtatgagctatgatttgaatttcatttcggtatatattttatgaattgtaaatttgcaatatc

SEQ ID NO: 545 - DNA, 815 bp, Arabidopsis thaliana
  Clone ID: ARATH-23APR03-CLUSTER21999_1
agtacaatcatatagtcagagtcaataatagattgagttttcaaaaagaaaaaaaaactgaaaacgtatgacgacgaccgagtgtactacatctccggcgattccgcctccgcaggtggagcattcaccaccacaggagaagccaggcaacgctgaactcttttcccccgctcctccctctccgccgccgccaaaaattacgatgatggatattgtgaatagcaacggaattttaacagatcaattggttgatgaagacccatctttttacaaatatctggatagcgaagagtatgctgagaagtatcgaagctacgaagctgattttagaaagtatctcatggataagcacttctctgaagtggatgaatatgaggagacaacaacaattgatggtgaaaccattttttcaagcgtgttgccttgtgcacgttggtatgcagacccggatgcttcgtttgtagacccgccacaatgcattgttgaagaagaagaagtaggagaagtagaagaaatggaagaggtagaagaggttgaagaagaagtagatgaagtaggagaagtagaagaagaacaagaagaggtcatagattcagcttctgcagagataccaaatggtgaaatctccaatggaggtactgtcttagaggatacttgtgatgttggcgagaaaccagattttcccatttagtttctttttctttgttctgttttcggtgttaacaatgtttgaatggaaccctttacttcagttaatttgcttctttagaccgataatgtgatacacaatctcggtgttaacattgttgttatct

SEQ ID NO: 546 - DNA, 3488 bp, Arabidopsis thaliana
  unsure (1)..(3488): unsure at all n locations
  Clone ID: ARATH-23APR03-CLUSTER21_1
gacttccgtcactcgcttccttcacgtctctctcccaaaattcaaattcctcaggcctaaccaatcctgtgatcgacgtcgtcaaatattcaaaagcagtccgtgatccattgcatgatcctcttcctgtgggattcttactctcatggctaacccagacgttaaagagattctctgcgattgtgtgataaacttgagagagaatccgaagaggcgaagggagacggtttacgtcggatgtggtgctggattcggcggcgataggccactggcggctctcaaactgcttcagagagttgaagagcttaactatcttgtccttgagtgcttagccgaacgaactttggctgatcgatggctttctatggcatctggcggtctcggctacgaccctcgtgtttcagagtggatgcagttgttgctacctttggctgtggagagaggcacttgtataatcactaacatgggtgcaattgatccctctggggctcagaagaaagttctcgaggtagccggtgaattaggtctcaccatttccgtggctgtggctcatgaggtgcattttgaaacaggctcgggatcatcttttggcggtcaatattgctctgcagggggtactagcacttatcttggagcagctcctattgttgaatgcctggagaagtaccaaccaaacgtgataattacttcaagagtggctgatgccgccttatttttagcaccaatggtgaggcgttcttgtcgtttcctgtttcgtgattaaatctgatcattcttgttgtgtcatcaggtctatgaactaggttggaattggaatgacttggagctgctagctcagggaactctcgctggccaccttctggagtgcggttgccagctcactggtggatacttcatgcatccaggtgatcagtatagagacatggctttccctcttctccaggatttgtcacttccttatgcagagattggctatgatggtaaagtatgtgtatcaaaggttgaaggtagtggtggaattttaaataccagtacttgcgccgagcaacttctgtatgaaattgctgaccctagtgcctacattacacctgatgtggtaatcgatattcgaggtgtttctttccttcccctgtcagactgcaaagtacaatgcagtggagcaaaaccatcttctaacacttctgtgcctgagaaactcttgcggttaattccaaaggagtgtggttggaaagggtggggagagatatcttatggaggaaatggttctatacaacgtgctaaagcttcagagtttctggttcgatcttggatggaagaaaccattcctggtgttaaccattgtattctttcttatgtgattggggttgatagcttgaaggcgacaagcaacggcactgaatcttggcagtcatgtggagatattagattacgtatggatggtctttttaaactgaaggaacatgcggtccagttaacaaaagagtttactgctctatatacaaacggaccagctggtggtggtggaattagtaccggacacaagatggaaattgttcttgaaaagcgtttggtcagccgtgaatctgtaatgtggaaaactggacttcagcacaccaacacttcagagccagagacctctgaacatcattctccagagaaaatgccaaagttacctaaggaaaatccaaagaaccttacaatgagaggctatcaatctggatttcatcactctcctgctccatctggccaaaagatcccactctactctgttgcacatagccgggctggcgataaaggaaacgacataaacttctcaataatcccgcattattccccagatgtcgagcgtctgaaactcataattactcctcaatgggtaaagcatgtgatgtcagttctgttatcaacctcttcgtttctggaattggatgcaaaaccaatggatgaaaatgtgtcagtagagatatatgacgttgaaggcattcatgctatgaatgttgtcgtacggaacatattagatggtggagtcaactgttccaggaggatcgaccgacacggaaagacaatctcagatctcatcttgtgtcaacaagttgtgttgatctgactgacatgggttgcaccacctcagagacagttggcttaaagtaacaatcccttattggattgaaattgtcagaaaccacaacccttcttttgctcaactccaatcactttgccacccaattttatctcattcattttgcaaaaaagatcaaagagagagagagagagagagagaaagaaaaaaaggaaaaaaccttcctccgttacaacctcacaattgcaacaaagtttcatataaaagaggacagaaatttcgcaggttcctccgttgtctgaggatcttggagaaggaaggaaacaacaacaaccaaaaaaaaaccaaaaaaaaaaaagataaaacaaaaaaaatgtctttcacaggaactctcgacaaatgcaatgtttgtgataagacagtctatgtggtggacatgttgtccattgaaggaatgccttaccacaagtcttgcttcaggtgtacccattgcaaaggaacccttcagatgagcaactattcctccatggacggagttttgtactgcaagactcattttgagcaactcttcaaggaatctggcaatttcagcaaaaactttcaaccaggaaaaactgagaagccagagctgactaggactcccagcaagatatcttccatcttctgtggaacacaagacaagtgtgccgcttgcgaaaaaactgtttaccctcttgaaaagatacaaatggaaggagaatgcttccacaagacatgtttccggtgcgctcacggtgggtgtacgctgactcactcctcctacgcctccttagatagcgttctctattgccgacatcactttaaccaactcttcatggagaaaggaaactacgctcacgtcctccaagccgccaatcaccgtcgcacagcctcaggcaacactcttccaccggaacctaccgaagacgtcgccgtggaggccaaggaagagaatggcgtttcagagtcttgaatatctcttacatgagtgtttttgagtgaatgattgaatgaatgttgttgcgggggaaagatttgatttcatttgtaatgagttgtttccatatgaagacatgattttttttgttatttttttaattcattcgttatacatttattattacacacgaaaaaaaggcaagaattgatgttttttcactctttctaaaaaaaaagaaaaaaaaaaaaaaaaagaaagaaaaaaaaaactcgaggggggggcccggggcccgggccnnggtnccccaatttngcccttatgggggggggggatttacnaggnacngcgggccnncngttttaangngnnncgggggcgnggggnaaanngntcggcggngaggccaacnngataancnnctcggggaacnngcgnnanccgntntttgcg

SEQ ID NO: 547 - DNA, 1382 bp, Arabidopsis thaliana
  Clone ID: ARATH-23APR03-CLUSTER22004_1
ataataaagtagacttctgtgaacgcgaaaaaaaaaaaaaaaactgtatccaattttctgatttcgtttttccttctttccttcaataagtaactctacactgaatcaactcctctgatttctcgataaaaatctagaggcaagattattgaagatatgggggaactaaacggagtcatcatattgaagatatgggggaactaaacggagtcatcattccgactatagacttggaagaggtttctgataagattctgaatcagaaaatccgtgaagccagtgagagatggggatgtttcagggtgataaaccatggagtttcattgtctttgatggctgagatgaagaagactgttattgatctctttcaacgtccatacgaggtgaaagtgcgtaacaccgatgtgctcctagggagtggttacagagctccaaacgaaatcaatccttactatgaagcattaggtctctatgacatggcttctcctcatgctgtcaataccttttgtgaccaactcgaagcttctgcagatcaaagggagattatggtgaagtatgcgaaggctatcaatggacttgcaacggatttagcgaggaaattagcagagagttacgggctggttgagaccgactttttcaaagaatggccgagccagtttcggattaacaaatatcattttaaacccgaaacagtcgggaaactcggtgtgcaactacacacggattcagggttcttgacgattcttcaagatgatgaaaatgttggaggacttgaagctatggacagttcttcaggaacctttttccccatagacccgttgcctaacacgcttgctatcaacctcggggacatggctacgatatggagcaacggaagattgtgcaatgtgaagcatagagtgcaatgcaaagaagcaacaatgaggtattccatcgcctcgttcttattaggaccaatggatacagatttggaacctccaagtgagtttgtggatgcagaacatccgcgactatacaagcctattagtcacgaaggggtacgaaatattagaatgactaaaaaattgcatgatggagaagctctcaagcttataacccatgaagggcaggctagataaatgacctaaatggcattttaagatggcagcgctatggaaccagaaaactgcaatttcttacctaagaatgagaaataattatgtattacctattggattgttgcaatatatgaaaaaaaaaaaattaccttgagatctttgtggatgcaatagtactacgattgatcctctgtttgttggtagtacttgtagagaagaaagaaattatcaaaatcatatttagtaactacagagttaattctgttttaaaaaaaaaaaaaaaaa

SEQ ID NO: 548 - DNA, 887 bp, Arabidopsis thaliana
  Clone ID: ARATH-23APR03-CLUSTER22023_1
ggcttgtaaagagaatcggcggctacaccgagagagaaccttaaaacccttcaaagacacatcgttttctccacctgaatcctccaatttccataagatccgatctcactctagcctgagagaaaaatgggaattacatcatccacagatccaaaaacagagactttttccgaccccaaatctcaaaacaacgaagaaggtccagctcaatctgagaaactcggagatgcgtctccgtcgactccagctccatctgaggaactcggagattcatcaactgtttggagagacccagaagattccgaatcggatgaaaaacaagaagaaggaggaggaggagacgcagatggtgaagaggaaggagagtgtgggttttgcttgtttatgaaaggaggtggttgcaaagattcgtttgttgcttgggaagagtgtgttgaagcagctgagaagaacaaggaagatattgttactaattgtatggaagtcacttcgatgttgaagaagtgtatggatgaacattccgattactatcagcccattctcgctgcggagaaagctgctgaagcagaggttaagaaggagcttgaagctgagaagaagaaggaagaagaagagaagatctcggaagaggaggtagctgcgaagaagcaagctcaagggtaattttgttatggtttcttgtttatgggaatatcaaaagattggaatttggggataaaaattgttctctaggaacagaggaaagttcgttgttagaatcataacttataagatcccattgatgatcatgtttcttctctaattaataagttgattgattgaggtcatctgaatccaaaaaaaaaaaaaaaaactcctttttatatgattcgagagagaatttgctc

SEQ ID NO: 549 - DNA, 963 bp, Arabidopsis thaliana
  Clone ID: ARATH-23APR03-CLUSTER22035_1
gaagcatttttgggagacgaggaggcgatccacgggcttattcttaagaaaccttccacagtcgccgccgattttatcttctccgccaaggctggattgatgcgagaggatgcagcacgagatcgcatgagaggatttgggtttcatgagcatgttatcagtgagagtattaaggaactgttagaggtctacgaagaccaatggtttttgattgaagatgatagctatggtcccctccttgctatctgccttgaaaagcaagaggaaaaagagaaacaattggctgaagtacaagccaaccaattgcctgagaatcacaatgaagagatggctgaggaagaacaacccaatcaattggctgtggaaatacacgaagaagagaaggagcaggagcaggacatgcatattgagtatggaagagaccaagctgatgagttatcaatcaatagcgaagcagtcaatgacccatcaccagcagctattcatttgggagaagcatcatcagattatgcacaaagttctgttcgaggtgtggagaatcttcattgtggatggctaattgatgaggaggagacggatcctgaggaggaaacggatccagaggagaaggagaccgagccagaggatccaaaggagaaggagacggagccagaggaggatagtgatggtgatgatgatgagatcattcagcttactccagaacctctttgtgaagaacttcaagagcttctcagggaagtacgtggacagaagaggaggaagaaagagatgaggtgggacaagtaaaggagctatggagctcctgtaagtagcaaattgatatatatgttaggaagccaaatagtagtagtaagctatagtattgtggtgaaaaaaggtaaaacgacccatcttaacatctcttgagatattggtttttaataatttgtgatggagtagagaaagcaaaaaaaaaaaaaaaaa

SEQ ID NO: 550 - DNA, 902 bp, Arabidopsis thaliana
  Clone ID: ARATH-23APR03-CLUSTER22036_1
ggaggaaaaaataatattttggtagaaaataaagtgtatatagtgtgactggtcatcgctgtctggaacagcgatgaagagagagagcaaaaaaaggaagaagacatggctacaacagaaacaatcatacaaggagcaattctggtgttaaccttggttatgttctgggcgattaagtatctctctcaacgaggcctaaccaaattccgaaccaaacaccgagccacactccaaacccagcgtcagctaatccaagcctcacgtctcctagctcgagcccgaaccacacccaagaaatctcaatctcaatctctcgccaaaacggcgctcaccgaagctgataatgtgatcgcgatttctccagatgatgccgccggtcacatcgtccgtgccctagctctagatctgctcggtcaccatacttctgctctcaaatcgttcgatatggcgctgacttatccgcgtttgaagtcgctttcggttggagaacgagccgatgcgcttgtgaagagagctgagatgaagctggctgtgaatcggcgacggaggattgattcggcggtcgaggatctggaagaggcggtgaggctcgccgccggtacagatacggcgagattgttccggctgttgggagagtgttatgagttcaagggcttgaaagagaaagcccagtgggcctttaatgaagctttaaaagctcaacctagttccgtaaacggcacgtgatgaatgagatggaccggactaggtcgtggctttgtttccttttagtataacttcttagaatttcactttgtatcctgctatttttcattatttacattatgacctcgaacgctttagttttactcagatttaaagtgtgttcaattatgcttttaaaaatgttatgacaatttgag

SEQ ID NO: 551 - DNA, 1376 bp, Arabidopsis thaliana
  Clone ID: ARATH-23APR03-CLUSTER22038_1
ggttctttttttctttctgcaatcggtcgtcgtcgttgtgcttaaacccttaccggaatggagccgccggcgaaaggaacggtgacgccgttaggattttcagaggaggatgttcgaaaagcagcaagttacatggaagagaaaatcggagagaagcgagtagagatgaatcgtcttcaacagtacgtcgacgaaaacgataatctcatcaatctcgtcaagaagcttcccgatcagcttcatcacaacgttatggttccattcggtaaaatggcttttttcccaggtcgattgattcacaccaacgagtgtttggtgttgttgggagagaattactatactgatagatcatcgaaacaaactgttgatttcctgaagagaagagacaagactttacagtctcaaattcattctcttaaagctgagattgaagatcttcaaacggaggcttcattcttcactacaactgcttctgaagtagcggatggacttgttgagataagagaagagtatgtagaagaagattcttctgcacctgttgtgatacattcaagtgaaaaagagccttgtaatctttctgaaggagagactgaagaaggtgaacttgaagacgatgactttgcaagaatcatggccaggttgaatgaacttgaaatagaggaagaactggagggtgaagatggggatagtagaggtgaagatcctgattcttcagtagaaagtgtggaacagatccagcatgatttggtgaaaggaagtagaggtgagacagaccgtggtagggttgaatacgggaaacaagaaactaccatatctgttcctaacaaagcttccggtcatagctcttcaccgagggtctcagagccaagggtcgaagccaaaattattcaagtgttaccagagacacatccacacaaagatctagatgatccgctgaatcgtatccgaccaatggcacaatatctttccaaagaaggtcaatcacgtggcggaacccctcagcaaaacgctgaaacatggaaagactttcgaacgaatgcaaaaaccaatgttttaggaccacaaaagattgagccacagaagccagagcccgagtttgattctaccaaggcttttactggatcaatcgtagagcatgcccatattctagagaccagcgcacacagccaaacgcagtcttctacgtctcaaccgtctaaaccagtgtcgagattcagggcgaagagaaggtagccagtcagctctgtgtacaattttttgttgagttgcctttatgatatgtaagaagtaagaacacatgcaaatgtgcgcaaccttgtaagcttactctatatacagttaattaacaaaatctacataaaaaaatctgacattgc

SEQ ID NO: 552 - DNA, 1227 bp, Arabidopsis thaliana
  Clone ID: ARATH-23APR03-CLUSTER220445_1
aaatctcatttttgtctccttaaaattttctcagaaacatttccgtcatttgttccttagttttgtaatcaatcttcacgattcctcaggtaccatcctccaaggtcatatgagaacaggatcggtgttctctatcgaacgagcggtgttgtgtcttaagtggggatggcttcaacaccttgtgcagcatgtaagctcttgaggcgtaaatgcactcaagaatgtgtgtttgcgccgtattttccaccaactaatcctcaaaagtttatctttgttcaccgagtttttggagcaagcaatgtaaccaagatcctcaacgatcttccacctgatcaacgcgaagacactgttaattccctcttttatgaagcggaagcgcgtatccgtgacccaatctatggatgtgttggtctcatttcttttttacaacaatacctcaagaaaattcaacaagatcttctcactgctaaagaagagcttgttggttacatgggacccgatgctgtgattccgccgccttatcttcctcctataggtaacaatcctcctcccaatttcatgatgtctatggaaggaatgccaccaggagtgatccctcaaggagaacctttgatgatacgcgaaccaaacatgtctcagcaacatcatcatcaacaaccgcaagatgagcagttgcaattcatagcttctgatgcacagagaatggctgcaatgatgttggagagaggagatcaacaagggatgttcaatggttacggaatagacaacaatggttcggttacagccacgggttttaaccaaatggatgtgaatgatcaaggtgctggtggttcgttgtctggaccatctcttgctttaggaagctttggtgatgcttatcagatgggtcaagagacagagcatggtcatatcaaccatgatcagcttcagacacagcttatgcttcagcctccattacaagaaggtcaagaacaaacagaggaaggacagttcttgatgcaaccaatgggacaagagaatcttcatgacgaagaggaggaggaagagcttgagccaccggttaaatggaggaagcctgagaacaaggaagctagtttttaagacctaaatgcatttaggagaacaaaaaaaattcttattttcttggatagtttacttaactcttgaggatctatttggtttttttttttaataatcaaatggtattattcaaaaaaaaaaaaaaaa

SEQ ID NO: 553 - DNA, 601 bp, Arabidopsis thaliana
  Clone ID: ARATH-23APR03-CLUSTER22064_1
attttgattataaaataactcaagagagatcacagagagatatggcggagggtaaacccgacgagcagctctttcagcttctttcgggtcttcttcaacaggtagaatcattgacaaatacagaagaggttgagctacgttctaagattgaagctcttggtttagaagtcactaaagtgccatcaaagtctgctcaacacctcaatgaggtggagatagctaaggaattggacaagttatcagcaaagttagatgatgtggatgagatgatatcatcagctatagcttctgatccacaggttcagacgcttcttagcggcacagctgatgtttggatgccggttatcactgccggcgccgaagagagactcaacttcacagcctctcttgctgatgatgatgacctttctaacaaggagactactaccgacaataccagcagctcttaatcccattttctttttgataaactcatgtcgaagttttctattttgcagtcttgtttcttttatgtatatcaaaaccaagataagctttaattcatgagtgatattgatgtttgatttttacgcaaactgaatacaactgtttatttattaaa

SEQ ID NO: 554 - DNA, 2548 bp, Arabidopsis thaliana
  Clone ID: ARATH-23APR03-CLUSTER22082_1
ataaatagcccatcaaacccctacaacggattagggctataacattccaccaaacacaaaagatacaagtttaagaccatgaagaagcttacttctctcttccctctcctctttctcattcccctcttagcctcatgtgctgaagaaaaacaggtgtatattgtctattttggagaacataaaggtgataaagcctttcatgaaattgaagaacatcatcattcttatcttcaatcggttaaagaatccgaagaagacgctagagcatcgctcttgtatagctacaaacatagcatcaatggcttcgcggctgagctaacccctgaccaagcctctaaactagaaaaattagcagaggttgtttcagtattcaagagccatccaagaaaatatgaagcacatacgacacggtcatgggaatttgtaggattggaggaggaagaaaccgacagtgatgttccacgtcgaaaaaatgatgccgatgatcggtttcgtgtgggaagaaattttttgaagaaggcaaagcatggtgatggaatcatcgtcggtgttctcgacagtggtgtgtggccagaatcaaagagtttcaatgacaaaggaatgggaccagttccaaaatcatggaaaggaatctgccaaaccggagttgcctttaactcttctcactgtaaccggaaaattattggagcgaggtattacgtgaaagggtacgaaagatattacggagcgttcaacgctacagcaaacaaagacttcttgtctccaagagatcccgacggacatgggtcccacacagcttctactgccgttggccgtcgagttctcggtgcatccgcacttggcggtttcgccaagggctcggcatcgggcggtgcaccgttagctcgtctagctatttacaaagcttgttgggccaagcccaatgcggaaaaagttgaaggaaatatctgtctagaagaggacatgcttgccgcgatcgatgacgccatcgctgatggcgttcacgtcatcagcatttccatcggaacgaccgagccttttccatttacacaagatggaatcgcgatgggggcgttgcatgcggttaagaggaatattgtggttgctgctagcgctgggaattcagggccaaagccgggaactttgtcgaatctggcaccgtggattataactgtcggagctagtactcttgatcgggctttcgttggcggtcttgttcttggcaatggctatacaatcaagacggattcgataacggcatttaaaatggacaaatttgcccctcttgtttacgcttctaacgtggttgttcccggcattgcattgaacgagacatcgcaatgtttaccaaattcactaaaaccggagcttgtgagtggtaaagtggtcttgtgtttaagaggagccggttcaagaatcggtaaaggcatggaggtaaaacgagctggaggagccggtatgattctcggaaatatcgcagctaacggcaatgaagttccttcagactctcattttgttccgactgccggggttaccccaaccgtggtcgataaaattctggagtacatcaaaaccgataaaaacccgaaggcttttatcaaaccggggaaaacggtttacaaataccaagcagctccttccatgaccgggttttctagccgcggcccaaacgttgtagaccccaacattctaaagccggatataaccgccccaggactgtacatactggctgcatggagcggagcagattcaccgagcaaaatgtcagtagatcaaagagttgcaggttataacatctactcaggaacttcaatgtcttgtcctcatgtcgctggtgcaattgctcttctcaaagccattcatcccaaatggagtagcgctgctataagatcagctcttatgaccactgcttggatgactaacgacaagaagaaaccgatccaagacactactggtttaccagcaaacccatttgcacttgggtcaggacatttcagaccaacaaaagctgcagatcccggtttagtctatgatgcatcataccgagcttaccttctctatggctgctcggttaacatcaccaatattgacccgacattcaaatgtcctagtaaaattccgcccggttataatcacaattacccgtcaatcgcggtcccgaatctcaagaagacggtgaccgttaaaagaacagttacaaatgttggaactggtaactcaacaagcacatacttattcagcgttaaaccgccatcgggtatttcggttaaggctataccgaatatattgtcctttaaccggattggtcagaagcagcggtttaaaatcgttattaaaccactgaagaaccaggtgatgaatgcgactgaaaagggtcaataccaatttggatggtttagttggacagataaagtccatgttgtgaggagtccaattgctgtttccttagcttgattgttgtttgcttatttgggatggttttattagtcggtttggatgttatagaggtcaaagtgaaagaaatagaaaatatttttctgatcactct

SEQ ID NO: 555 - DNA, 1511 bp, Arabidopsis thaliana
  unsure (1)..(1511): unsure at all n locations
  Clone ID: ARATH-23APR03-CLUSTER22112_1
gggatcgtaagaacagaggatttttctcggccaagttttctctggctcaggttaaaattcgatttgtgagatctgttagttagattgtacatgacggtgcgaatttattgaatctgtttaaatctattgaacgtgaaacgcatttgagtattgtgaggctgaggaaatttctgaaagtggttttgggacgatgatgctggtgttgcggagtttgccataatcagatctgtatgtatgtgggtttcttgataaaagttgtatgaggaaggcattggagatttgtgttgaagaattgatgtatgggatcgtaagaacagaggatttttctcggccaagttttctctagctcaggtgtttgatgtgaattttttgagggaggggaatgagttcaatgagcagaagcagaagtcgaagtagaagtcgtagtcgggatcggtttcgtagtcggagtccgagagacaggagaatgagatctgaacgagtttcttaccatgatgctccttctagaagggagagggagccacgtcgtgccttcagccaaggaaatctctgcaacaactgcaagcgacctggtcactttgcaagagactgttctaatgtttccgtctgtaacaactgtggtcttccagggcacattgcagcagaatgcactgcggaatcacgttgttggaactgtagagaaccgggccacgtagcctcaaactgttcaaacgaaggaatctgccactcctgtggtaaatctggacatcgagccagagactgctctaattcggattctcgtgcaggagacttaaggctctgcaacaactgcttcaaacagggacatcttgccgctgactgcacaaatgacaaggcgtgcaagaactgcaggacttcaggtcacatagctcgcgattgcaggaacgatccagtttgtaacatctgcagtatctcggggcatgttgctagacactgcccaaagggtgacagcaattactctgacagaggaagcagggttcgagatggtggtatgcaaagaggtggtttgagcagaatgagcagagacagagaaggcgttagtgctatgataatatgtcacaattgtggtggccgaggacacagggcgtacgagtgtccgtctgctcgagtcgctgaccgtggattccgccggtactgaggctcttaaatttaccaattgaagttccattcatcttcacctttacccttttagcttctgcactcttgtttttgttgagctacattgttgttttctaatctcatggtttttgtctattggagtgaatcaaggatggttttagttttggtttgttttcggaaaatttgagacattgcttgtgttgtatgaagtattgaacagattagtgtgatgcagagttctgagttttcagaactcaatattatattaaaaacaaattttaatggtttgcttaatcccaaaaaaaaaaaaaaaaacaaaaaaaaaaaaaaaaaaaaaaaaaaaaaaaaaaaaaaangaaaaaaaaaaaaaaaan

SEQ ID NO: 556 - DNA, 3368 bp, Arabidopsis thaliana
  Clone ID: ARATH-23APR03-CLUSTER22125_1
cttcctaacttactctcaccctttttaaaaccaaaccctaacttacacagaaagagaagaaaaaaaaacaaaaaaaaaatgaagcttcttcttctcctcctcctcctccttctcctccacatttctcattccttcaccgtcgctaaaccaatcaccgagctccacgctcttctctcactcaaatcctccttcaccatcgacgaacactcacctctcctgacctcatggaacctttcaacaactttctgttcatggaccggtgtcacgtgcgacgtctctctccgtcacgtgacctctctcgacctctcaggtcttaacctctccggaactctctcctccgacgtagctcatttacctctgctacagaatctatcactcgctgctaatcagatctcaggtcctattccgccgcaaatctccaatctctatgagcttcgtcacctcaatctctccaataatgtcttcaacggttcatttcccgatgaactctcctctggattggtgaatctccgtgttcttgacttatacaacaacaatttaaccggagatttaccggtttcactcactaatctcactcagctccgtcatcttcacctcggtgggaattacttctccggcaaaatcccggcgacgtacggaacctggcctgttctcgaatacttagcggtttccggtaacgagctaaccggtaaaatccctccggagatcggaaacctaacgactcttcgtgaactttacatcggatattacaacgcttttgaaaatggtcttccaccggagattggaaatttatcagagcttgttcggttcgacgctgctaattgtggtttaaccggagagattccaccggagattgggaagcttcagaagctagatacgttgtttcttcaagtaaacgcatttacagggacaataactcaagagctgggattgatttcaagcttgaaatcgatggatctgtctaacaatatgtttaccggcgagattccgacgagtttttcacagctgaagaacttaacgcttttgaatctcttcaggaataagctctacggtgctatacctgagttcatcggtgaaatgccggagcttgaagtgttgcagctttgggagaacaatttcactggtagtattcctcagaaattgggggaaaatggtagattagtgattcttgatctctcttcgaacaaactcaccggaactctgccgccgaatatgtgttctggtaaccggttaatgacgttaatcactcttggcaacttcttgtttggttcaataccggattcgcttggtaaatgtgagtctctgacccggatccggatgggtgagaatttccttaacgggtcgattccaaaggagctcttcgggttacctaaattatctcaagtggagctccaagacaattaccttaccggagagttgccaataagcggaggaggagtctctggtgaccttggtcagattagtctttctaataaccagctctctggttcattacctgcagctattggaaacttgtccggtgttcaaaaactacttcttgatggtaacaagttctctggttcgattcctcccgagattgggaggcttcagcagctatctaagttggattttagccacaatctgttctccggtcggatcgcaccggagatcagtcgttgtaagctgctaacgtttgttgatcttagccgtaatgagctctcaggtgatattcctaatgaactcacaggtatgaagatcttgaattacttgaatctttcaagaaaccatctcgttggttccatacctgtgacgatagcatcaatgcagagtttgacatcggttgatttctcttacaacaatctctccggtttagttcccagcactggacagtttagttacttcaattacacatcgtttgtgggtaactctcatctttgtggtccgtatttgggtccttgcggcaaaggaactcaccagtctcatgtcaaacctttatctgctactacgaaactgttactcgtccttggattgctcttttgttcgatggtgtttgctatagtggccataatcaaagctcggtccttgcgaaatgcgagtgaagccaaggcatggagattgactgctttccagaggctagacttcacttgtgacgatgtcttggactctctcaaggaagacaacatcatcggtaaaggcggtgctgggattgtctacaaaggcactatgcctaaaggcgacctagtcgcggtcaaacgattggctacaatgtcccatggatcttcccacgatcacgggttcaacgccgagattcagacgctaggtagaatcagacacagacacatcgtgagactgctcggtttttgctccaaccacgaaacgaatctccttgtgtacgagtacatgcctaatggtagccttggagaggttcttcatggaaagaaaggaggtcatttacattggaacacacgttataagatagctcttgaagcagccaagggtctttgctatctccaccatgattgttccccgttgatcgtccatagagatgttaaatccaacaacatcctcctcgattccaacttcgaagctcatgtcgccgactttggtctcgccaagttcctccaagattccggtacttctgaatgtatgtccgcaattgccggctcctacggctacatagctccagagtacgcgtatacattgaaggtagatgagaagagcgatgtgtatagtttcggtgttgttcttctagaactcatcaccgggaaaaaacccgtcggagaatttggcgacggcgttgatattgttcaatgggtgagaagcatgacggattcaaataaagattgtgtgctcaaagtaatcgatcttagactctcttcagttccagttcacgaggtaacacacgtcttctacgttgcgttgctctgcgttgaagaacaagcggtggagaggccgacgatgcgtgaagtcgttcagattctcactgagatcccaaaaattcctctttcgaagcagcaagcggcggaatcagacgtgactgagaaagctccggcgattaatgaatcgtcgccggattcaggaagtccaccggatcttttaagtaattagactttccggcgattgggtttggtcattgaggggcaaatttgtctttctaattttcttgtcaccgacgtctcggtagtggagttaattacttaattagcccgttgttgtctggttccggttaaggcaacaattagtggtttaactcttaaggttgttgcatttcttttttcactgctgccacaattattcgtgtaggaattttgaatatgtacattgcggttgaattttgcatgataagtggttaatttcaggaaatcgaatttcgagaaaaaaaaaaaaaa

SEQ ID NO: 557 - DNA, 2207 bp, Arabidopsis thaliana
  Clone ID: ARATH-23APR03-CLUSTER22164_1
atgctgcgtaactctcttaaacactaccttggcacctatgacaaatatgttagtgagccaacttttctggctttgagtttcaaaccaaacaagtatgaaggaaatacatatcagacaccatttggagacttgagtccatgcggggagcaacaagtgacgaggccgggacccttgttgccattcaactctctctttcttgggatttaatttcactaacactttatgtcaatttgatcattaccactttcacatctctctctcttctccttcttcttcttcttcttcttcctccctcatatcaacctttgagcacaccagttttcatgagaagtctaggatgaagttcatgaaaatcggaacaaagcctgacactttctacactcaagaggcttcaaggattttgataacagacacacctaacgatcttgttattagaatcaacaacaccacttatcatctccacaggtcttgtcttgttccaaaatgtgggctgttgcgaaggctttgcactgatttagaggagtctgatactgttaccatagagctgaatgacatacctggtggagccgatgcttttgagttgtgtgctaagttctgctatgatatcacaatcaacctcagtgctcataaccttgtgaatgctctctgtgcctccaagtttcttcggatgtctgattccgttgacaagggaaatctgttaccaaagcttgaagcttttttccactcctgcattctccaaggctggaaggactccattgtcactttgcagtccactaccaaattgccagaatggtgtgaaaatcttggaatcgtcagaaagtgtatagattcaattgtggagaagatcctcactccaacttcagaggtctcctggtctcatacatacaccagaccaggctacgcgaagagacagcatcactctgttccaagagactggtggacggaagacatatcagacctcgacttggacttattccgctgtgtcatcacagcagccaggtcaaccttcacgttgccacctcagctcattggtgaagctttgcatgtctacacttgccgttggttaccatacttcaaatcaaacagccattcaggtttctcagttaaagaaaacgaagcagcactggaaaggcatcggcgtcttgttaacacagttgtgaatatgattcctgcagataaagggtcggtttctgagggttttctgctgagacttgttagcatagcgagttatgtgagagcatctctcacaacaaagactgagttgattagaaaatctagtctgcaactcgaggaggcaactcttgaagacctcttgttgccttcacactcatcctctcatctccatcgctacgataccgacttggttgctacagttcttgagagttttttaatgctctggagaagacagtcttctgcgcatctttctagtaacaacactcaattgctgcattcaatcaggaaggtggcaaagcttattgactcctatcttcaggcagtcgcacaagatgtccatatgccagtttccaaatttgtgtctctttctgaggcagtgcccgacattgcacgccagagccatgacagactttacaaagcgatcaacatatttctcaaggtgcatcccgagataagcaaagaagagaaaaaacgactatgcagaagtcttgactgccagaaattgtctgcacaagtacgtgcacacgctgtgaaaaatgagaggatgccattaagaacggtcgtccaagcactcttcttcgaccaagagagcggttccaagggagcatcaagtcgatcagagagccaagaactcttcacaagaggtaaagagacacccactgatgaacatagcatgatgcacaagcttcacctaggtccagcttctacagggaaagctaagaacgtgcttgaagagggatgcaaaagaggagaagagaaaaccagatccagtacagatcctaagaagatagtgtggaaaggaacagggtcagaacataagcatcatataagtagagacaggtagtggggactatacgtcttaggccacagagattcagtttcttgtttgcactcgccagatttctggttcttttatttttctttctaaaaagaattgatgatgattgtagatggttaatgtaaacccagtggcacgatctgtattaatacaatgcagagctcaagctcctgctcaaccaaaaaaaaaaaaaaaa

SEQ ID NO: 558 - DNA, 1329 bp, Arabidopsis thaliana
  Clone ID: ARATH-23APR03-CLUSTER2216_1
acacgcctctcttcttctgcttcacttcactactgctttctctatttctccatagatggctccttcttcatcacctcttcgtactacaagtgaaaccgatgaaaaatatgcgaatgtcaaatgggaagagcttggattcgctctgactccaatagattatatgtatgtagccaaatgcagacaaggagagagctttacacaagggaagattgttccttatggcgacatttcaattagcccttgttctccgattctcaattacggccagggactatttgaaggtctcaaagcttacagaacagaagacgaccggattaggattttccggcctgaccaaaacgctcttcgcatgcaaactggtgcggagaggctttgtatgacacctcctactctagaacaatttgtcgaggcagttaagcaaactgtgcttgccaacaagaaatgggttcctcctccgggtaaaggaactctgtatataaggcctctgctactagggagtggtgctacccttggagtagctccagcacctgaatacacttttctcatatatgcatctcccgtaggagattaccataaggtaagctcaggcttgaacctcaaagttgatcataagtatcaccgagcccattcaggtggaacggggggtgtcaagagctgcacaaactattctccagttgtgaaatcgttactcgaagcaaagtcagcgggtttctctgatgtcctgttcctggatgcagcaactggtagaaacatcgaagagcttactgcttgtaacatcttcattgtcaagggaaacattgtatccaccccaccaacttcaggaaccattttacctggagtcacgaggaaaagcataagtgagctggctcatgatattggctaccaggtcgaagaacgcgatgtatctgtggatgagctactagaggcagaagaagttttctgcacagggactgcagtggtcgttaaagctgttgaaactgtgaccttccatgacaaaaaggtaaaatacaggacaggagaagcagcattgtctacgaagcttcactcgatgttgaccaatattcagatgggagttgttgaagataagaaaggttggatggtggacattgatccttgtcaaggttgaaagaagaagtttagaaagctgatgattctatgtactcaaacgtgtatcttttcttctcatgtgttggtttttattaggattcttctttttttatcatgggacttgtaataaataatgggtaactcttaagatacaagaggcggcagtatgttcgaaaaaaaaaaaaaaaaaacgacatcgttcattaaaaaaaaaaaaaaaaa

SEQ ID NO: 559 - DNA, 865 bp, Arabidopsis thaliana
  unsure (1)..(865): unsure at all n locations
  Clone ID: ARATH-23APR03-CLUSTER22176_1
aatttattctcaaaccttatgagtgagatctctcttaatcattctctctttcttctctcctctgtgatgtgaggtttcgaagatccttctctgattcctcatcaaactcagatcagtagcggacccaaataggatcaaagcaaacgaggtttcaatttagagttttttaaagctcaaatctcggttgcttcggttgaacttcttgatacactgtctcgttttgagttcttgttaggtcattcctttagagagatatatggcagaggtgaaggatcaattagagattaagttccggcttaacgatggttctgatatcggtcctaaattgtttcctgatgctactaccgttgctacattgaaagaaaccgttgttgctcagtggccaagagataaggagaacgggccaaagacagtgaaagatgttaaactgataagcgcgggtagaatattggagaacaacaaaacggttggagattgcaggagtcccgtcggcaatttctcaggtgctgtcaccacaatgcatgttatagttcaacatcaagttactgaaaaagaaaagaagaagaagaagcctaaaggtgatctgaaacagaacaaatgtgtctgtttatgttttggagctcgttgttaacaattgtgcaagacaagtagagagagttaaaaaagcttgggagattcacattctgttcttgagccttcttcaataccttttgctcttgttccttgtaattcttttttctgacatgacatgacatgattggctttttgatcgcttgaggtttggtttctattgtatttcggattcgcaacaccgtggaaattattaggtaacaaacaaatttgcacgaaaaaaaaaaaataaaan

SEQ ID NO: 560 - DNA, 3193 bp, Arabidopsis thaliana
  Clone ID: ARATH-23APR03-CLUSTER22179_1
tctctcgcttctctttctctatccaatcggaaagagatcaaccaacgatagaggagaagaagaacttgcatacgcaaaaaaactttcccgggaaaattccagaaactgctttggaaaaatgtgcgagcccgatgataattccgctagaaacggcgtcactactcaaccttcgaggtcaagggagcttctaatggatgttgacgacttagatcttgacggttcatggccactagatcaaatcccttacttatcctcatcgaatcgcatgatttctccgatttttgtctcctcttcctctgagcagccttgctcgcctctctgggctttctccgacggtggaggaaatggttttcaccacgcaacctccggtggcgatgatgagaagatcagctctgtctccggtgttccttctttccgtctcgccgagtatcctctcttcctcccttactcttctccatcagcagctgagaacacaacagagaagcataacagtttccagtttccgtctccattgatgagcctagtcccaccagagaacacagacaactactgtgtgatcaaagagaggatgactcaggcgcttcgatacttcaaagaatcaaccgaacaacacgttttggctcaggtctgggctcctgtgagaaagaatggtcgtgatttgctgacgactttgggtcaaccttttgttcttaatcctaatggtaatgggcttaatcaatacaggatgatctctctcacatatatgttttctgtggatagtgaaagtgacgtagagctcggactcccgggtcgagttttccgtcagaaattgcctgaatggactccaaatgttcagtactattccagcaaagaattctcgcggcttgatcacgccttgcactacaacgtgcgtggtacactggccttgcctgtctttaatccctctggtcagtcctgcataggtgttgtggaacttataatgacctcagagaagattcactatgcacccgaagtggacaaagtttgcaaagcccttgaggcggtaaatctgaaaagctcggaaatacttgatcaccaaacaacacagatatgcaatgagagtcgccaaaacgcgcttgctgagattctcgaagtgctgacagttgtatgtgagacccataacttgcctctcgctcagacttgggttccatgtcagcatgggagcgttcttgccaatggtggcggtctaaagaaaaactgcaccagctttgacggtagctgcatgggtcaaatctgcatgtctacaaccgacatggcctgctatgtcgtggatgctcatgtctggggctttagagatgcctgtcttgaacaccatctccagaaaggccagggagtcgctggacgagcttttctcaatggtggctcatgtttctgcagagacatcaccaagttctgcaaaacgcagtacccactagtccattatgcgctcatgttcaagttgaccacttgttttgcaatatctctccagagctcttacacgggcgacgacagttacattcttgaattttttcttccttcgagtataacagacgaccaagagcaagatttgctgttgggttctattttggtgacaatgaaagaacattttcagagtctgagggttgcatctggggttgactttggtgaagatgacgacaaattgtctttcgagatcatccaagcattaccggacaagaaggttcattcaaaaatagaatccattcgagttcccttttctggttttaagtcaaatgcaacagagacgatgttgattcctcagcctgtggttcagtcttctgatccagtaaatgagaaaatcaacgtggccactgttaacggtgtggttaaggagaagaagaaaacagagaaaaagcgtgggaagactgagaaaacaatcagtctagatgtacttcagcagtatttcactggaagtctcaaagacgctgcaaagagcctaggagtttgcccgacgacaatgaagcgaatttgcaggcaacacggaatctcgcggtggccatcgaggaagatcaagaaagtgaatcgttcaatcacaaagctgaaacgagtcatcgaatctgttcaaggtactgatggaggcctcgacctgacttccatggccgttagttccatcccttggacacacggtcaaacatcagcacagccactaaactcacccaatggttccaaaccacctgagctaccaaacaccaataattcacctaaccattggtcaagtgatcacagtccgaacgagccaaatggttcgcctgagttaccaccaagcaatggtcacaagcgatcacgaacggtggatgagagcgctgggactccaacctctcatggctcatgtgacggtaaccaattagatgaaccgaaagtcccaaatcaagatccgctcttcacggttggtggatcacccgggctcctttttccaccttattctagagatcatgatgtatctgcagcttccttcgcaatgccgaacaggcttcttggttctatagaccatttccgaggaatgctcattgaagacgctggaagttcaaaagatctgagaaatctctgccccactgcagcatttgacgataagtttcaagacacaaactggatgaacaatgataataatagcaacaacaacttatacgctcccccaaaggaagaggccattgcaaatgttgcatgcgaaccatcaggctcagaaatgagaacggtaacaatcaaagcaagttacaaagacgacataatacggttcagaatatcctcgggttcaggtataatggaattgaaggatgaagtggctaagaggctgaaagttgatgcaggaacgttcgatatcaagtatcttgacgatgataacgaatgggttttaatagcttgtgatgctgatcttcaagaatgtctcgagatccctagatcctcccgcacgaaaatcgtaaggctcttagttcatgatgtaacgacaaatctagggagctcctgcgagagcactggagaattgtgacctgataattcattcgaactcttttgtaaatatgttttttgaattttattattgtttagggtttctttggacaaattaaagttgtaaaagaaacatttgtttgtaacttttaactgtaaaagtgtaagagagagagaggttagaagtaaattttagttgtaacttcatacaaaaaaaaaaaaaaaaaaaaaaaaa

SEQ ID NO: 561 - DNA, 1218 bp, Arabidopsis thaliana
  Clone ID: ARATH-23APR03-CLUSTER22181_1
attcgtaaccccgtgcaaaaaaaactgaaaaccccaaatccaacctctctcactcaaaaaccatgtcttggctcttcaaatctcgcggcgatgacgatcacgatcccgatcccgatccttccacaactcatggcggtgtcaaagaagatttatcttccttactccgtggcgtcgcagctttcctcgcaccgcctccttctccacctgtaaacgaacgccgactctcctctgataattcaccaactcagctaggtcttctcgggatccgcaacgatctagccgagattcgtggaaatttctccaatttcgcatctaatttactccaatttcctagtaatctaagagatagagaaagtagtagaagatctccgttgaacgatcaagttcctggaatctctgaagaagtagtcgatttcgctgttaaaatctcgacgaaacctggttgttggacagattttccattgtcactcgatactgaatttgaactgtctgaggctcaaagggcacatgcatcagccattgaagatttggttcctggccttgtagctgtgaagaatcaagttagtagttacatggatgatgaacacttctggctgatttattttattttgctgatgccgagactgaatgggcatgattttgaactcttagcaacatgcaaggtatttgaaacaagggatcaacttttactaaagctgcaaaagaaagagacagggtcaagcaagagcactactggtcacgaaactcctgaagaaggtagcagtagggaaacagaaaccgttgagggagtcattgacaagatagagactctaaaaattgagcaaagggagataagtgatgagtcatctgaagaacaacggaggagtttcagagatgaagaggtaatctcctttagtgatttagatgtcgatgatctctcggagaagccaagtcccaacaggagtacactgaaaagaccagcatcaaacgcaagcgggtcaagctgggttcagctcagcaagagccaagttggacatagcaaggattcggaaggtgattccagtgactggcttccaattggcgattctgattaacgtttaaaggtatgaaattgaatattactgtaaagtgaagtgttagcaatgacttttaaatgaaaccatgcacatttttattaataaaaatcttactgtgtagtaatggagtcgctacttgaaaaaaagaaaaaaaaaaaaaaaa

SEQ ID NO: 562 - DNA, 1719 bp, Arabidopsis thaliana
  Clone ID: ARATH-23APR03-CLUSTER2222_1
tcttctccagaaaaaaaaaaacttttttcttttctctctcaacttgcagaagaagcgatttacacaaggaactgggtttatacatttatctctcaagtcatagaatctgcatttgtcccaagttaagaagagaatctttaaccatggagcggctgatttctcatcctcctctcatgatcgtctcagaccttgatcacaccatggttgatcatcaagatcatgagaacctctctcttctcaggttcaattcattgtgggaatacgcttatcgccgtgactctcttcttgtcttctctacagcaagatcacctgttctttataaagaattgagaaaagagaaacctttgttgactcctgatatcattattacatcaataggaactgagatagcatttggtaactccatggttcctgatcatgcttgggttgaatccttgaacagctgtaaatggaaccgggaaatagtcttggaagaaactagcaagttccctgagttaactcttcagccaaaaactgagcagaggctacacaaggtcagcttttacattgatgaaggtaaagttggatgtcaagataatttacagttggggaaagaatgtcgatgttataccgcgtggtgcaggaaaaggagaagcgcttgagtatcttctcaagaagctgcaggctgaaggaatattcccggtcaatactcttgcttgtggtgactctgaacatgatgctgaactatttagcattcctgatgttcacggtgttatggtgagcaattcccaagaagagctattgaagtggcgttctgaaaatgcgttgaacaaccttaaggttatacattcaaccgagaggtgtgctgatgggattattcaagccatcggacattttaatcttggtcccgatctatctccaagagatgtttcggaattcttggatcgtaagatggacaatgtgaatcctggtcacgaggttgtgagattctacttgttctacgagagattgagacgcggtgagatcaagaactatgagacatacatagccagcttcaaagattcatgtctccatgctgctgtcctttttcatccatcaggtgcagaaaaatctctgagagacaccattgatgagctgaagaagtgttatggtgacaaaagagggaagaagttttgggtttgggtagatcaggttctggtaacagacaccattcctggcaaatggatagtgaagtttgataagtgggagcaatgcgaggatgaaagccaatgctgcaaaacgactgtcgaatttacttcaaagggaggagatttggtgtgggagaaggtgaagcagatatggtcagaggaatcaaaggtgaaagatgataacagttcttggattctctgaatatattttggagactgttcttctctttctcatgagtgaattggtatatgaacattcttcacgatttttcttcccttcctcatataggcattataaagttttgaacttcttttgataattattatcaaagaatagtataacttaagatttggcagaggtttatggaaaaaaatttaaaaaaaatgagggcccaaccgggttcgaaccggtgacctcttgatctgcagtcaaatgctctaccactgagctatggaccctttgttgtacatcatatctatattaagctatctaaatctacattaagatttctacatatagtagcttatttctttgttaaaaaaaaaaaaaaaa

SEQ ID NO: 563 - DNA, 1011 bp, Arabidopsis thaliana
  Clone ID: ARATH-23APR03-CLUSTER22256_1
acagagagagagagaagaaaagaaaaaaaaaaagctttaaacttttgcttctactcaattctctgatttagggttttttcttgactttacactatctcgatttgagaagtgagaagagaaatcgccatgaacattttcaagaagaagaccactcccaaagatgctcttcgtactagtaagagagaaatggctgttgctactcgaggtatcgaacgggagattacatctcttcaactagaggagaagagactagttgcagaaatcaagaaaacagctaagactggaaatgaggctgccacaaagattttagctcgtcaacttgttcgattgaggcaacagattaccaacttacaaggaagccgtgctcagattaggggtgtaacaactcatacacaggctctgtatgccagcacttcgatttcatctggtatgaaaggtgctaccaaagctatggttgcaatgaacaagcaaatggcaccaacgaaacaagccaaggtgattaaagatttccaaaagcagtcggcacagctagacatgacgatagagatgatgtcagaggcaattgatgaaacacttgacaaagatgaggctgaagaagaaacagaagatctcactaaccaggttcttgatgagattggtgttggtgttgcatctcagttatcttcagctccaaaaggtcggattgctacgaaaaccgcagctcctcccgcttccactgcagctactagcaagaactctgaatcaagtgaagtggatgagcttgagaagaggttggcttcgctacgacgaatctgagatttatgaaaaacaaagaaagaagagagcagcttccttttttttgttatctctgtataaatctgctgaaacttaagctgtttgatattaagattggccatcagaaaactattaaggctttttaagaaatgaagaagacatgtatacacatattttattatagatagttcctctacgtagccacttcatattcaatttaataagcatgtttcttat

SEQ ID NO: 564 - DNA, 1180 bp, Arabidopsis thaliana
  Clone ID: ARATH-23APR03-CLUSTER22270_1
gaagtctcagtgtcggctaatcagaggatcagtctcagtgttgatttcaggtgataaatctctttgctttgacaatggcagaggaaattagattctttgaactcaacaccggagcgaagataccatccgtcggtctaggaacgtggcaggccgatcctggtctcgtcggaaacgctgtcgacgctgctgtgaagattggttatcgtcacattgattgtgctcaaatctatggcaatgaaaaagagattgggttagtcctgaagaaattgtttgatggtggagttgttaagcgtgaggaaatgttcatcacatccaaactatggtgtacttatcatgatcctcaagaagtgcctgaggcacttaatagaactctacaggatctgcagcttgactacgtcgatctgtatctcattcactggcctgttagcctcaagaaaggatctactggctttaaaccagagaacattttgccaactgatattcctagcacatggaaagcaatggaatcactctttgattcaggcaaggcccgtgctattggtgtaagtaatttctcctcaaagaaactcgcagatctcttggtggtggctcgtgttcctcccgctgttaaccaggtggagtgtcacccttcatggcaacaaaacgtgctcagggatttctgcaaatctaaaggcgttcatctctcagggtactctcctttgggttctccaggaacaacgtggctaacgagcgatgttttgaagaaccctattcttggtggtgttgctgagaagctcggcaagactcctgcacaggttgcattacgctggggtctccaaatgggtcaaagtgttcttccaaaaagcacccatgaagacaggatcaaacagaatttcgatgttttcaactggtccatacccgaagacatgttatccaagttttctgagattggacagggtaggttggtgcgaggcatgtcatttgttcatgagacgagtccatataagagtcttgaagaactctgggacggtgagatatgagactcagctgatttgattgtcatagatttgtcattagtaatgcacgttgtttcattacaaaggtacaacattttacttataaactccctccagcagttccacgtgaaaagacattaatgttctaattatactgaattgatgatccaaaattacgaaaaaaa

SEQ ID NO: 565 - DNA, 1253 bp, Arabidopsis thaliana
  unsure (1)..(1253): unsure at all n locations
  Clone ID: ARATH-23APR03-CLUSTER22278_1
gagggtcttctgaaacttgaaagggactaaaagacgagaacaaaaaccctttctctctactctgtgtaaaccctagtgtgttcgtgctctccgatggcgagtcttcgatgctttcgtgagctgagccgccgcgctacgactgttttctccatcaaccagacgcgatcgatctcttcatttcatgggattgagttttccgggaccagcatttctcatgggaccgtaattccgaatcgatctctcactaggaatttgccatggtacagtcattggtatcgctctcaagatcgttgtttctcttcgaacacaaaggatactgatgaagatgaagaaagcagtgaaggagaggatgatgatgaggaggagggggaagactttgaggattcggcggatatggaagtagaaagggaatattcaccggcggagaaagtggaagaggcggaggagatagggtacaaggtgatgggtcctcttaaaccttcggagagacttttcaaaccctatgaaccagtgtttgccattgttcagattggttcgcatcagtttaaagttagcaatggggactccattttcaccgagaagttgaaattctgtgacatcaatgataagttggaactaaccaaggttcttctattgggctcggcaagccagacgattattggtaggcctattttgccagatgcgacagttcatgctgtagttgaagagcatgctttggatgaaaaagtgctcattttcaaaaagaaacgaagaaagaattataggagaacgagaggacatcgacaggaattgacgaagttgagaataaccgatatacaaggaattgaaaaaccagaaccgaagatcgtccataagccttcgaaagaagctgttacagaacagacgaaggctgagctagttgcttagagataaaatttgcttctttcttttttgctgatgccgatacatttgaagtaagttaaattatcacttgctgttcactaagaactagattttaaagtcgttgaaatgatgaaaaggccttcttggtaaaaaaaaaaaaaaaactaggctcctgagatatgaaatgtgatttgcctttcactgtcttgttctccttgctcttcattttgtatttaaactggctcatgcttgtgggagctgtttgttgcttctgtttcagaaataaagatttgcggaaacatctctctccttatcttctctatgctttgtactttgtactgtactacgtgtnggtttaggttatnggttta

SEQ ID NO: 566 - DNA, 2019 bp, Arabidopsis thaliana
  Clone ID: ARATH-23APR03-CLUSTER22331_1
gaacaatcgaagcagtgactgagtttgatatcaatggaggctacggcggcgccattctcttcaattgtctcttccagacaaaacttctcttcatcttcttcgattcgcgcttcttctccggcttctttattcctctcccagaagagtattggcaatgttaatcgcaaattcaaatctcccagaagcctctccgtccgcgcatcttctacctcagattctgttgtgactttgcttgactacggagctggaaatgttcggagcatccgcaatgctcttcgtcatctcggcttcagcatcaaagacgttcaaacgccgggagacattctgaatgctgatcgactcatatttccaggcgttggtgcttttgcacccgccatggatgtacttaacagaactgggatggctgaagctttgtgcaaatatattgagaatgaccgtccatttctaggcatatgtcttggtctacaactacttttcgattctagtgaagagaatggaccagtcaaaggtcttggtgtgataccgggaatagttggacgctttgatgcttcagctggtataagagtaccccacattggctggaatgctttgcaagttgggaaggattctgaaattttggatgatgttggaaaccgtcatgtctattttgttcattcgtacagggccattccatcagatgaaaataaggactggatttcgtctacctgtaattatggtgaatcatttatatcttccataagaaggggaaatgtgcatgcagttcaattccatcctgaaaagagcggggaggtggggctttctgttttaagaaggttcttgcatccaaaattacctgcaacacagaagccaatggaaggaaaggcctcaaaacttgcaaagagggtgattgcttgtcttgatgtgaggacgaatgataaaggagatctcgtagttactaaaggggatcagtatgatgtgagagagcaatctaatgaaaacgaggttcgaaaccttggcaaacctgttgatttggctgggcagtattacaaagatggtgcagatgagattagctttttaaacataactggattccgcgattttcctctaggggatttgccgatgattcaggtgttgaggcagacatcaaagaatgtctttgtaccactaactgttggaggtggtattagagactttacagatgctagtggcaggtactattctagcttggaagttgctgctgagtatttcagatccggtgctgataagatctccataggaagtgacgctgtttctgctgcagaggagttcataaaatcaggggtgaagacaggaaagagtagtttagaacagatatccagagtttatggaaatcaggcagtggttgtaagtattgatcctcgtagagtttatgtgaaccatccggatgatgtgccatacaaagtcatcagagtaactaatccaggcccaaatggagaagaatatgcctggtatcagtgcacggtcagtggaggacgagaaggtcgacctattggagcatttgagcttgcgaaagcggttgaagaattaggtgccggtgaaatactattgaactgcatagactgtgatggtcaagggaaaggattcgacatagacttagtaaagctcatctcagattcagtaggcataccggtgatcgcaagcagtggagcaggtactcccgaccacttttccgaggtgtttgagaagacaaacgcatctgccgcgcttgctgccggcattttccaccggaaagaggtaccaatccaatctgtgaaagagcacttacaagaggagcgcatagaagtcaggatctgagaattttctggtctgcgtgttaccataattcatgacacattcaacaagatagaatctttaccttcaataaattaaattaagtcggaaccatcggagctccaataggtctgagtgaatcctcttatagttgatttccttttgttgacagtaagactgatacaatttatggatttcccttgaaagtaagaaagcaacgtatgttcactt

SEQ ID NO: 567 - DNA, 753 bp, Arabidopsis thaliana
  Clone ID: ARATH-23APR03-CLUSTER223355_1
aatcagaaaaagagattctgaaagaataaaaacatattctttctctcaaatgctttccttttaatggagacgaagacgaaaccctaatttccccaaattcactatgaagcgtattatcagaatctcattcaccgacgcagaagccaccgattcttctagcgacgaagacacggaggagcgtggaggagcatcccagactcgccgccgtgggaaacgcctcgttaaagagatcgtaatcgatccttccgattccgccgataaactcgatgtctgcaaaacacggttcaaaatcaggatcccggcggaatttctcaagacggcgaaaacggagaagaaatatcgtggagtgaggcagaggccgtgggggaagtgggtggcggagatcagatgtggaagaggatcttgtaaaggacgacgtgatcgtctctggctgggtacttttaacactgctgaggaagctgctcttgcttatgataacgcttcaattaagctgattggacctcacgcgccgaccaattttggtttgccggcggagaatcaagaggataagacggtgattggagcttctgaggttgctagaggcgcgtgaagtggggttggtaatttagttgttagcattagcaagaaggtctctctcgtattttgtaaattcctcttctgatgttgtgtatgatcttgatgtctttcgtctatgtatgtatatgaaactcgagaaatgaactatattttgatttagaaaaaaaaaaaaaaaaa

SEQ ID NO: 568 - DNA, 2167 bp, Arabidopsis thaliana
  unsure (1)..(2167): unsure at all n locations
  Clone ID: ARATH-23APR03-CLUSTER22337_1
gaatttctctcacccgaagttaataattcagtcagaaacacacacacacacacacaccacactcaaaactgaattgacttgtcagaaatggaatctctgttgtgtcggaggaggataaagagagtcatggtgctaataatagcgttgacatggctccgtagcacgtgcggagagctcgaggaccaactattcgaagtaggaaagcttaagatgttcgtcgacgacctcccagatatgcccagactctatggctttaactctgttcatggtatcatcaaaccagcttctcttcaaatcggcatgttctccactaaatggaaattccacagagatttgcctgcgacgccagtgtttgcatacggtacatcacggagcaaggcaacagttcctggtccgacgattgaaaccgtatatggagtagacacatacgttacgtggcgaaatcaccttcctaaatctcacatccttccttgggaccccacaatctccccagcaactccgaaacacggtggaattcctacggttgttcacttacatggaggaatccacgaaccaacaagcgacggaaacgccgacgcgtggttcactgccggtttcagagaaacaggaccaaaatggaccaaaacgacgttacattacgagaacaagcaacaacctggtaacatgtggtaccatgaccatgccatgggtttgactcgagtcaacctccttgccggtttggtaggcgcctatattcttcgccaccacgccgttgaatctccctttcagctacctactggcgatgagttcgaccgaccgttgatcatttttgatcgtagctttcgtaaagacgggtcaatttacatgaacgccactgggaacaacccatcgattcacccgcagtggcaaccggaatattttggcgatgtgataatcgttaatggaaaagcatggccaagattaaacgtccgacgtaggaaatacagattccgtatcataaacgcaagcaacgctaggtttttcaagtttttcttctccaacggtctagatttcatcgttgtggggtctgattcagcgtatttgtcaaagccggtgatgaccaaatcgattctcttatctccatcagaaattgtagacgttgttgttgatttctacaaatcaccgtcgagaacggtggtgcttgctaatgacgcaccatatccttaccctagtggtgatcctgtcaacgaagaaaatggcaaggtaatgaaatttatcatcaacaatgaatcagaggatgacacatgtacaattcccaagaagctcatcaattatccgaatgctgacgtgtcaaacgctgttctcacgcgttacatctctatgtacgagtatgtgagtaactctgatgagccaactcatttgttagtcaatggtttgccctatgaagctcccgttacagaaactccaaaatcagggactacagaggtatgggaagtgataaatttgacggaagataaccatccgttacacattcatctaggattgttcaaagtggtagagcaaacggcattactggcggcaggattggaggagttcaaggagtgtatgacgaaacaaaacgacgcggtcaagtgtcaaattagcaaatacgctcgtgggaaaaagacagcggtgacggcacacgagaggggttggaagaacgtattcaagatgatgccgggacatgttacgaggatacttgtccgcttttcttatatccacactaatgcatcttacccattcgatccgactcaggaaccgggctatgtctaccattgtcacatattggaccatgaggacaatatgatgatgaggccgcttaaggtcatcatttgatatgtcaaggtctaatgatcgatctctgcgaagttttgatggtgcaaaaagataaaaactaatcagacatcataaaatgaaactccatattgagaatgtaacatagtctttactttaataattcctagtaggaattctaaaatttagtactggcttatgttgaaagaaccattctttcctgattttattatgagtccaaattcagaaataataagtactctctaaattgatcaaagaaaaaaaagaaaaaaaaactcgagggggggcccggtacccaatagtgttgggcggggggggaaaaaaaaggttgtcccccaaagaatatataaaaaan

SEQ ID NO: 569 - DNA, 1263 bp, Arabidopsis thaliana
  unsure (1)..(1263): unsure at all n locations
  Clone ID: ARATH-23APR03-CLUSTER2234_1
atcttctattagtgtgtttaccaatttttgttacatctcttgcttttacattttcttgaattagccatggtggcacattcactcgttcctctctcaccggcagcaagacggccgcctccaccaccacctaaggagaagaaagacccgaccgtgaccggagttcaggccaaggtattggcgagtaagaagcgtaaagaagaaatgaaggcttccattgctaaacttagagagaaaggcaaacctgttgttgaagcaaaaccatcctcttcttcttcagaatagcatccgagcaacaatttaaaccctttccattaattcatactctatcttctattagtgtgtttaccaatttttgttacatctcttgcttttacattttcttgaattagccatggtggcacattcactcgttcctctctcaccggctgctcacgccgccagactctcctctccatcgccgcggtcactgccgcaggctcctcccgtcgtccttgcagttccaccaattaatcgcaggacaattttggtggggctaggcggtgcgctatggagttggaacgctctggccgctaaggaggaggcaatggcggcagcaagacggccgcctccaccaccacctaaggagaagaaagacccgaccgtgaccggagttcaggccaaggtattggcgagtaagaagcgtaaagaagaaatgaaggcttccattgctaaacttagagagaaaggcaaacctgttgttgaagcaaaaccatcctcttcttcttcagaatagcatccgagcaacaatttaaaccctttccattaattcatctgtctaccaaattcatccctatgatgttaattcactactatatttcggtttattcttatgctgattttgtggtagtaaattcaaaagcattctagcttgtcagaaatcatcacaattagattacacgagagggcccgaaaaaacctcnagggggcccggccccattggcccctagggggcggtggnagggctggcggcgttaagagggggatggggaaccctggggaccaatgagtgcttgganaggcccgtttccacggggnaaacaaagggcccccnncccttccagattgccccacagggagggcggggaagaatttgtgaagncncagttgaanaanaatttcaaanaaanngnnntnnnagnaatngttaanngaantaaaaatnnnatannnaagtaatantaaaaganntggntnaagagtagagnnnancaaaagtggaanaag

SEQ ID NO: 570 - DNA, 2522 bp, Arabidopsis thaliana
  unsure (1)..(2522): unsure at all n locations
  Clone ID: ARATH-23APR03-CLUSTER22354_1
gacccaaaanaacatcttttaagcttctcccgcaaaattcagcaaagctttcggaggaatctcctaacagtcaccaccaccaccaccgtctaggncaaatctcgttttaagcttctcccgcaaaattcagcaaagctttcggaggaatctcctaacagtcaccaccaccaccaccgtctagggtttcgcgccgggatctaaaaaatcacaatcatgccggtgagtttgactccgaacgcaatcacggcgatacatgacggcgacgtgaatttgaagccgttgttacaggttttagaaatcaaaatgataggaagaagtcaagagagaagccaggagaggtatcgtttcctcatttcagatggtgtttctgctcaacatgctatggtcgcggttcagcttaatgatcgagtcaagtcaggacaatttgagaaaggatctatcgttcagctgattgattacatttgtagcgacgttaaaggccgcaagcttattgtggtgctgaacatggagacgatagtacaacagtctgaaaccattgggaaccctacaatatttggagaaacagatacagaagcccagaagacattttcaggtacgggcaatataccgcctccgaacagggttgtttttaatgaaccaatggttcagcattctgttaatagagcacctcccaggggtgtaaacattcaaaatcaagccaacaatactccaagcttcaggccatctgttcaaccttcatatcaaccgcctgcaagttacagaaatcatggacccatcatgaagaacgaggctccagctcgagtcatccctattgctgctctcaatccataccaaggtcgatgggctattaaggctagagtaactgcgaaaggagatatcagacgatataacaatgcaaaaggagatggaaaggttttctcgtttgatctgcttgactatgatggaggggagattcgggttacgtgctttaatgctcttgttgaccgtttctatgatgttactgaggttggtaaggtatatttgatttcaaagggaagtttgaagcctgcacagaaaaatttcaaccacttaaagaatgaatgggaaattttcttggagtcaacatcgactgtggagctttgccctgatgaagatggctccataccaaagcagcaattctccttccgcccaataagtgacattgagaacgctgagaacaataccatactcgatgtcattggtgtggtgacttctgtgaacccctcggtgccaatcttgagaaagaacgggatggaaacccataggaggatcctgaatctaaaggatgaatcaggaaaggctgtagaggtaacactttggggagaattctgtaaccgagatggtcggcaactggaagagatggttgattcagcttttcacccggttttagcaataaaagctggaaaagtaagcgacttcagtgggaaatcagtagggacaatatcttcaacacagctcttcataaatccagatttccctgaagctcataaactacggacctggttcgattacgggggaaaagacactgcttccttctccatctccagggacactatgcctggaggagtttccaggaacgagataaggaaaaatgtttctcagatcaaagaggaaggtcttggaagatcagataagcctgactggatcactgtgaaagcaaccatatcattcatcaaaacagatagcttctgttatacagcttgtcctttgatgatcggggataaacaatgcaacaagaaggttacacggtctggaacaaacaggtggctctgtgaccggtgcaaccaagagtctgatgaatgcgactatagataccttcttcaggtacagattcaagaccacactgggttgacttggataaccgcgtttcaagaaacaggagaagaaataatgggatgtccggctaagaagctttacgcaatgaaatacgaattggagaaggaggaagagttcgcagagattgttagagacagactgtttcatcagtacatgttgaagctgaagatcaaagaggaatcgtatggggatgaacaaagagtgaagatgactgttgtgaaggttgataaggtgaattatacatccgagagtaaatacatgcttgatttgctcgtaaggtaagttcgttctaggtattacagtgaggtatttcaattaactcagaatatgcaagctcgagtttagtacactattatattacgaattgatgaattctattgaatcttgattcaatgaagcttagtgttatgatttcaagtctcaatcgtctttcgaattcaggaaacaacaaatttgacttttatccaaaagttcattgctgcaccattgaaacgaatacacagaaggagaacagattacaataatgatgtaagaaagatatataggtcttaggttctcttgacagggtcaaagttggagacgccgacgacgacaccaatgatgacactgaggacgaggccaccagaagcaatgctgagcaagaaattcttgagggaaggagagattcc

SEQ ID NO: 571 - DNA, 1542 bp, Arabidopsis thaliana
  Clone ID: ARATH-23APR03-CLUSTER223754_1
aattagaaggaaaaatcatttatgagtgaaatagaaatttgatatctctttattagtttctgcatctcgaggggtttttgggattctctgattcgattgagttctatttgtcgttgtgtacaacatctcgggtggatctttgttgatggcgaaactgagacactcgcgatttcaagcgaggaaatggtcgacattgatgcttgttctgtttatgttgtttatgttaacgattgttctcttaatgcttttggctttcggagttttctctcttcctattaacaacgatgaatcctctcctatcgatctctcttatttccgacgagctgccactgagagaagtgaaggacttgggaagagaggagaccagtggactgaagtgctttcttgggaacctagagcttttgtctaccacaatttcttgtcgaaggaagaatgtgaatatttaatcagtcttgcaaaaccacatatggtgaagtcaactgttgtagatagcgaaaccggcaagagcaaagatagcagggtgcgaacaagctcagggactttccttaggagaggaagggacaaaatcattaagaccattgagaaaagaatagcagattacacctttattcctgcagatcatggtgaaggacttcaagttcttcactacgaagcagggcaaaagtatgaaccacactatgattattttgttgatgagttcaacactaaaaatggaggtcaacggatggctacaatgcttatgtatctgtcggatgttgaggaaggcggtgaaacagtgtttcctgctgccaatatgaattttagttctgtaccatggtataatgagctctctgagtgtgggaaaaagggactttccgtaaagccgagaatgggtgatgcattgcttttctggagcatgaggcctgatgctacactagatcctacaagtttgcatggtggatgtcctgtgattagagggaacaagtggtcatctaccaaatggattcatgttggcgagtacaaaatctagcgtgtttggtttctggacagtaaactgtttcctttcatggtggatgggatgcaaagttggaactagaaattacagagagttgatgtttgttttttccctgcggctcagtgcattccttgctttgatgggattcaaggtttatcattagagaataccaaaagatagagattttgttagagtaaattaggatggcttagagtgactcttactcattggtatacccataaaggtcttgtgtctttgaacaagagttgtgaattacatagttttgtggtattcttttgttttgtttgtgattagaaacataatcaaattaaaaattgttaccaaaaaatgaaaaatgaattgttatatatatttacccaaattaaaataaaactaaaaaaggtaaacataccaatgcaaaaagaaaaaaaaatcaacaaatacaagcaaacgtgtttttcaggaaaaaacgtgacactttcacaagtgggtgtagtaagtccgcaacataaggagatttgactcgagaagcagcatcaactttgcgc

SEQ ID NO: 572 - DNA, 3286 bp, Arabidopsis thaliana
  Clone ID: ARATH-23APR03-CLUSTER22378_1
ggtcttatcttcctcctcccaaacaaaatctctcctcttctcttctcttctcttctctgcggtcgtcttgtctccagatagaaacaaaagattggatatttcagacacaatcgatcaaagaataaactattcgtcgctctcttctcaatcagccgtaaaaaatggcagctgatcagaggagaaagcggatgaacagtgccaatgttattggtaccagttctcgggagcattacagagcaaaaaggaaaaagaatgcttcaccagatggtgctttgcgttccggtgatcacatcactcttgaatgggatcgcaaccgaagtaaagtagtctctaagaaggaacaagttggtctaagttttaggcatcttcgtgaatttgttgatgtcgttcctcctaggcgtaatgtcttggcacaagtatgccctgtcccgcatgaaactttccagttggaaaatctgtcggaggtgctttctaatgaggtttggcgatcttgtctgtctgatggtgaaagaaattatctgcggcaatttctccctgagggagttgatgtggagcaagttgtacaagcattgcttgatggcgagaattttcattttggaaatccttctcttgattggggaacagctgtctgctccggtaaagctcatccagatcaaatcgtttcacgggaggaatgcctgagggctgataaaaggagatattactcgaatttagagaaatatcatcaagatattatagattatttgcagacattggaggagaaatgggaaagctgcaaagatccagagaaggatattgtcaaaatgatgtgggggagatcaagagggggcaatgcacaagtgaacggtagctgccagggtctgactgctgcctcggggtcgagttcctggaatgaagatgataaaccagacagtagtgataatatgatttctcctgttgtgaggtgtggagaggttcagagaaggtccaagcgctctggtttagagaaagaaaaaactcaaaataatggtgtaaacgtgggtggaaaagttagaaagaagaacgtgttgccgaaagatagcattcagcaaactgatggtgctaaatacatgtcctatcttaagataagcaagaagcagcatcaaattgtcacaagcatgaagcagtctggtaaaagcattcagtcgagagcacttaatcgaatcttcggtaacatcgatagtttagatgttcaaccatacggagtttttgtggaagaagaacagaagaaactgaacgctcactggctgcatcttgttaaagatcttcctgcagcatatgcaatatggaaaaggctacagttacagaaacgagatataatcagctctatgggaagggaactgaaggaaaaatgcaatctgtggatggaggataaacaacaacagtatgctgcagaaaaccctctgcagaagcatgatgttcaatacaataatggagaaagtttgaatcctaatcagagtggtgatatggcaccagatggtgaagattctggaattttcagtcaaatttctggcaagaatcactccccttcaaaggattcttcgtcttatggtgaccaaatcacagattcaggtcgctgcttgctagttggtacacactcctcacaggtttcatcaccagattgtggaaataacatcaatcacgaggatagagaagagaaacaatattcttctccttgttctcccagcaggtgtcacagctttaaccgaacagatgttgaagtaaataattattccagctctatacaaggtcagtctctcccacaggcttcatttcctaatgagccccatgcttcagatctcgaagatgcagatcatgtaggcaagcactgtgcaccagaactagagaatgcttcgttagacgagaggattccgtgtattgctacaagccttggagaagggtcgcagttttgttctggtggagatgtgtggcagccagtgggagggattaggcagtcctacattagccgtcaagcttacacccccagtggtggattgtcaatcatacaccatcctgaaggtgatgaagtagctaaaaactgtttcatagacctggaatcgaacatgcctgaagaagttgataggaggaagatgttgcagcgaaatgcaaacaacagttttggttctttccctaacaacaaccaaaatgaaatactacagtctttgtttaatggccagggtatggtatctcgcaccactgagcagcttcatcctcttctcaaagtcccacttaacgaggagcataaacaaattatgggcattggttttcagcaggaaggaaacaacaatatgatggtgggcaatcaattttctggtcagttccaggatcagattcctgcatctcatgcatttccccaggaccagcagagacaggttgacgcctttggccaaggaagcatgtcagacaacatttaccgtggattcttgatgcagcggccagactggaaccccaattgtactcagataggagttaccgcacagcccctgttgagcaccgggcctttgttaaatcagaattggcaatttaggagcatgtgggcaaacacaaacggtgtcggatgtacaagccaaggcagtcaaaccgggaccgagagagatccgagccttctcagagttgctaataacgcagagcaaataattcataggggaagtagttcagatcaaagcttattctctgttctctctcaatgcagtcaactgcgcccatccagatctgctttcgagccagaaagttcaagtcatcaaatggttgcgtctggtaactacggaatgctgatggggggaggttcaactcaagtaagcagcaatttggttcagcctgcgaacccgcttgattacttgagcggtagcaaccctacaacatctttgatgccagatgatgtagtgtggatgaaccagagccgccagaactctggtctccatgacccactaggcaagttgtatccaaggtcatggaatccgtaaccatgtttctaaagttttgtgttgcagaagcatctggtcatctttaagatatacaaaacccaacatgggtttcttagttttcatttctgtgcctgtacatagaaagttacagaggaactttggttttgtacatatttaggttttgagatatggattaggaagaaagtgaggatactccagctaccttttttgttttttacattttgtcatttcaccttctctcccttgtttttgttgctatgtccctcgtggggcggcccggggcccgggggtggggggggggaggagggggcggtgtgggtggg

SEQ ID NO: 573 - DNA, 2946 bp, Arabidopsis thaliana
  Clone ID: ARATH-23APR03-CLUSTER22379_1
accgttcctcctcctcctccgtcgcttttttttttcctcttcaaaagaaaataaaaaaccaaagccgcacgcgtgctcttcacgcgctttcacactctcctcctctcgccgatcatcgctgcgattcccttctccatctccggtaacaattggatgcgccgtctccaagccctagaacaatttcccagtatctctctctcattctcaaaaatcctaattagggtttgtcactgaaatcaacaccagatttggctcaatcgtaacatgtgattgctgttacaaaccacgaacaaaaaatggttgataacagtaacaataagaagaggaaagagttcatcagtgaagcagacatcgccactcttttgcagagatatgatactgtgacgatactgaagttgctacaagaaatggcgtattatgctgaagcaaagatgaattggaatgagttagtgaagaagacaagtactggaattactagtgctagagaatatcagttgctttggcggcatcttgcttatagagattctctcgtccctgtgggaaataatgctcgagttctggatgatgatagtgatatggagtgtgaattggaagcatcccctggagttagtgttgatgtagtaacggaagctgttgcgcatgtgaaagtgatggctgcttcctatgtgccaagtgagtccgatattcccgaagactcaacggttgaggctcccttgaccattaacataccttacagcctgcatagggggcctcaggaaccatcagactcatattggtcatcaagagggatgaatatcacctttcctgtttttcttccgaaagcagctgaaggacataatgggaatgggttagccagtagcttggctcctcggaagagaagaaaaaaatggtcagctgaggaggatgaggagctgattgctgctgttaagcgacatggtgaaggcagctgggcccttatctctaaggaagaatttgaaggagagcgaacagcctcacaactctcacagcggtggggggctataaggagaaggactgatacttcaaacacttctacccaaactggcctacagcgaacagaagcacaaatggcagctaatcgtgcattatctttagcggtgggaaatcggttaccctcaaaaaaacttgcagtaggtatgactccaatgctgtcatccggtaccatcaagggagcacaagccaatggtgccagcagtggtagtacattgcaaggtcaacaacagcctcagccacaaattcaagcattatcacgggcaacaacatcagtgccagttgcaaaatctcgagttcctgtaaagaaaacaacagggaactccacttcgagagcagacctaatggtaactgctaattcagtagctgctgcagcctgtatgtctggcctggcaaccgctgtaacagtgcctaagattgaaccaggaaagaatgctgtttctgcgttggtgccgaagactgaacccgtaaaaaccgcttccacagtttctatgcctcgtccttcaggtatatcatcagcactgaatactgagcctgtaaaaaccgctgtggcagcctctttgcctcgttcatcaggtattatttcagcaccaaaggttgagcctgtaaaaaccgctgcttcagcagcctctttgcctcgtccatcaggaatgatatcagcaccaaaggttgagcctgtgaaaaccaccgcctctgtagcctctttgcctcgtccatcaggtattatttcagctccaaaggctgagcctgtaaaaaccgctgcttctgcagcctcttcgcctcgtccatcaggaatgatatcagcaccaaaggttgagtctgtgaaaaccaccgcctctatgcctcgtccatcaggtattatatccgcaccaaaggctgagcttgtaaaatccgccgcttctgcagcctctttgccttgtacatcaggtattatatcttcaccaaaggctgagcttgtaaaatccgccgcttctgcagcctcttttcctcgcccatcaagtatgctatcagcaccaaaggctgacccagtaaagattgttcctgctgctgccactaacactaaatcggttggacctttgaatttaaggcatgcagtcaatggaagcccaaaccacacgataccttcatcaccctttactaagcctttacatatggctcctctctccaaaggatctacaatccagagtaattcagttcctcctagttttgcatcgtcaaggttggtccccacacagagagctcctgcggctactgttgtcacgccacaaaagccaagtgtggtagcggcagctactgttgtcacgccacaaaagccaagtgtgggagcagcagctactgttgtaacgccacaaaagccaagtgtgggagcagcagctaatgttgtaacgccacaaaagccaagtgtgggatcagcagctactgttgtaacgccacaaaagccaagtgtgggagcagcagttaccgtcacttccaagccggttggtgtacagaaagagcaaactcagggaaacagagcaagccccttggttacagcaacacttccgccaaataaaaccatcccagcaaattcagtgattggcacagcaaaagcggtggctgcgaaagtggagactcctcctagccttatgcctaagaaaaatgaagtagttggcagttgcaccgataaaagttcattggataaaccacctgagaaagaaagtactaccacggtgtcacctctagctgtagctgcgactaaatcaaaacccaaagatgaagcaaccgtgacagggaccggactgaaggagttgtagttcatttacttcattgtttttgtgcttccattaatgttttttcttaggactcggacaataatatgattatgtacagtaggacctccaaatataaggttcttactactaattagtaatacgagtttaaatatacttcggaatctcc

SEQ ID NO: 574 - DNA, 919 bp, Arabidopsis thaliana
  Clone ID: ARATH-23APR03-CLUSTER2238_1
aatcaacgaatcacaatttataatcaagaaaaacggacaagagagtaagaagagttatgtcgccttcttgttcatcttgtgtcaatgtgttactcatcatgtgccttatgcttctgagtttatcagctgatgcgtacaagaactacactgtgggagagtccacgggatggttcgatattcaagagagaccctctgctaattatcagaaatgggccgattccaaatccttttctttgggtgatttcctcatattcaacacagatagcaaccattcggtggttcagacatatgatttcaaaacatacaaagattgtgattacgacaacaatgaaaacaatgatacaacagagtggtcggctgcaaatccttcagcaacatctcctgttcccgtctcaataagtgttcctcttgttaaagaaggttccaattatttcttctcgggaaactatgatggcgaacaatgtaaattcggtcagcattttatgatcaatgtaacacatggtcagggcttaccagattcatcatcaccagatgatgctgctgcacctggacctagcgaatcctctcagtccggtgatgatgaagttgctcctgataccatcgtcccggccaatttcgatcatcctaaagatattgaaagtgctgatgatgataaagaggttcatagtaaaaaaagttcttcttccacaacaaaaactagtttgttttgttttgtctttatggggctctttgcatcattttaatcaaatattctttcatatttgtatgtatatgcattctgttttcttctttttcataactaggataataataatcaaagaaacaaaagagtattagtggaaattttaaagcagtgagggaataaagaaaaaaagagtaaagatcatgagttatcctttttttatcaaaaaaaaaaaaa

SEQ ID NO: 575 - DNA, 1188 bp, Arabidopsis thaliana
  Clone ID: ARATH-23APR03-CLUSTER22403_1
gattccacccaacaaaccagcaataccaaatacaatacattcttctctatctatagttcctccatggatatagaagagatggaaggaaataatcaagtggaggaacatcatgtcgacacttctcgtccttttagctctgttaaagaagctgttgccatatttggccaacggattatgctaccggtacaaactcataccatgaactctaaatcggcaagtcctattgctgctagtcgtagcatcaaccagaacgctaaaccaagaagccctggactcagccagaccgttaaattggtaattcctactgctagtcctagcatcagccagactgctaaattggtaagtcctattgctagtcctagcataagccagaccgcttcttcatcttcttctccatggaagcaacgctccttgttgcccccttctcctcaaggtccaaaagaagagatcatggatgtgttgaagaagcttgaagccgagataacggaaacaaagacagaggtgaagatgttgaaggagagagaatcagagacagaggttgctttggctactttaaacgcagagctacataagaacaagtcaaagatagcgaaagccgaagctgatgctgcagggaagagcgcggcagccatgacgaaatcagttagcttcaaggacacaaaagagaaggaaaatggagaggaccagaggaggaaagagctgatgaggaagatgcagaaggagtatccttcattagctcagatacttgacagtaacaaaggaaacagagatgggtattttgcgaacactaagaagacgaagaagaagaagaaacctatcattcctcttgtgggagatttcttcttcttcaagaagaaaggttcttcgcctgaaatatctggacctctttacactacctcttccaccctgcacttttaactgatatacccaagatcatgtaccctgcaagtgtatatatatgtatatgtatgtatacacatcaatattcgtaatatctatgtatgtatgtgttttcgtgtgagtgtgtttgtgtgtgagcgtattctttatttgtttgtctctttttctctttgtttggattttgagtccaaaccatcagcgtgtgttccccctctactgtaacaattacctgtcaactatcagattgtgaatatacaatgttactctacaaaaaaaaaaaaaaaaaaa

SEQ ID NO: 576 - DNA, 1645 bp, Arabidopsis thaliana
  Clone ID: ARATH-23APR03-CLUSTER2243_1
cccccgccttccgacggcccccctctagaaccctttcttctctctctctctctccctaaaatcaatctatcttttttttaaccattgcgtttctttttttccctttccgagcagatctgagccgaaggttaactacatgaccggcgctgagaacggcgtgagaatgacgtcaccagagacgtcttcaacatcctccctcgccaccacaagtgtccacgtaagcgctctcgacggactcgtgaacgtgaactctctcttcaccatcgccgtcttcgttggtctttccttagcgactccaggacaacacagcctcgaacaacgatccagctgcgacgcaagtgctgacgtcgccaagaagctactggtcttcgaagtcgtctccttcagcttcttcctcttctcctctcttgtagctcagggtcttaagcttgccttaaaccttcttaatagcaaagacgtcaacgagattttcagagctcacatcaatatcaaggttttgagatggggaatgatggcttctgctgtcggatctgtaatgggctgtctcttcttgatgctctctatggttaatgtgattcagatccgtcttggtttgctctcttgcggcagcaaatcggcggctcaagctgttgcaacgctcgtcactctggtttcctctgctctgctgatttacatctctaccgccatttacgctttctggcattgatgctatgtcaaaattggataatgtccatggctttgttttgattagccaatgtgtaatttcatcatcaatgccttccaatctagttttttgtttttttgtttcggagaatgaagaatcaatcacaagatacagaacattggattatgagaatttgatgttaagcttttatgaacagaaatgaagcattatgtttgttgtttggtgaaagtattggactcaatgtctctaacactttggataacactattgatgttaatggtgagatggttggaatgttcttccatctccttaaggaccatatcaagctgctgttgcaaagcagtacaacgccttctctctcggctcagctctgcactcagctccctaatctttgcgtctttctcgtccggtgtttgagggagctgaaaattccggcgaacattaggggagagaggcaagagaggatgattatgctctttctcaaatttagtaacaagccatgttccggatttctctcttttcacaacaatcagagctttacacccttctcttgttatagcccgaggctttctactctcgcttctccgaggtctcgacctacgaaatccttctttattacacacgagtctgcgccacaccacagtcccatctcgcattgacctcctgaaagcatccactcgcataacgaaacccatgcatgtagcgtaattgtcatagaaagactttgcagcctcttctgattcaaactccataccaatgaacggctccaccattggagaagcttcatctgtgactgtcttcattacatctgaattctccatcatctctacatcttcttcgggtaaagagttcccttccattggaatgaagattagaaaactccaaattgtgttttcttcagagagaggaagtgatgatgatgatgatctctgaagctcaagttagtaactggtaagcggt

SEQ ID NO: 577 - DNA, 1380 bp, Arabidopsis thaliana
  Clone ID: ARATH-23APR03-CLUSTER224414_1
aactgatcgtataatcattctcacggagacgagtgaccaaaacaaggtctcccgcttcttgcgaagattaaacgaatccatttagattttagaaaccacacaaaaaaatatgggtcggctcaagttcgcatgtccggttcttgagatcaatttaatctcagctcaagacttagcccctgtctcaagaaacatgaaaacgtattccgtcgcttggatcaacaccgatcctatgagaaaactcaccacgcgtgttgatcaatccaacagagctaaccctatatggaacgagaagttcgtgtttcgcgttaatgacaagattctcgatgttgacgcatcagcgattgtgattgagatatacgcagcggcttgggctaaagatgctcttgttggtactgtgaatgttcttctcagcgatctttttgctccttggtctggttttggtgatggtaacgacggtggtggtgggaataacaacatgaggcttgtgactcttcagattcgtcgtccttcagggaggctacaagggtttttacgtctcggtattgcacttcttgacggtggtcaacggagtatgcctttatctattgaggttttcgatggaagtcgaaaaggagagaggaatagtgttaaaagagatcaagaggcttcaagaatgatgcatcgccgtacgaatagcgatcaaacggatttaaccacgtctacgaatgattacggtgtgaaaacaggggttgttactggcaatggaggaggaggtggtggtggtggcggtattgttgttggtgcggatagtatggttaatggttcgctttgtagctctgatattggaccatcagcgtctgtggttgcggctgcgattgcgcaagggctttacaatagacagaaaacagcggttaaagcggctaacaaagaggacgcaagttcgatacttgaagggaaaacagagggaattgagtatagagttgaacggtggagagcagagaaaaatggcacggttggagcgggtggagcggctggatcaagcgatgattctagcgggaaaggaggagcgggaaggagaagaaggaggaggagaagaaaggagaaacaacaagggaggagaaacggtggaggagagggtaagaaagggttgttttcatgttttggaaacgtgtttggatgtgagatttcgataacatgtggcggtggaagcggcggagaaggagacagcacaaagaagagatataataacaataaagtagtaaatcttagtgctgtagacgaaacgtttagtcattctgcgacttgaaataagagaaagtgtttacttattaaaaaaatctaataaaaaaaaaaaacgaaaaaaaaagaaaaaaaaaaaaaagaaaaaaaaaaaaaaaagtt

SEQ ID NO: 578 - DNA, 1962 bp, Arabidopsis thaliana
  Clone ID: ARATH-23APR03-CLUSTER22447_1
aagaaaaaaaaaacagtctctttggcgatagcgatttggtcggagatttctccgattacattgattgggactttagtgaatcttcacagaagcaacttcacggagaacggcgagaagaatgtggaattgagagcgtcgttagaggatcgagaagcgtcggccgtttcactggagagatctagtgttgttcgttgatgaaggggttctaatttcgatacctaacggaattgatcattgataaggtctcattccggtggcaatcgtcgtcgccggaaacaatgtgcacagatacgaccttgaggggatgattcaagtgagagatccttaaagttgttctaacttcagtcttattttggattcaaatcttccagtaagtttcatgaaggcgaaggatggcaaagaagagccagagtcccaagcccataaatatctgagacgccatgaaactcatcaaccaacaagtcagtctcattggtatcgtccttgaacaaagagaaccaaaacaatgtcgcaacaatgattggatttgtacgctacggataattgatgatacgtattctcgtcccggatttactgataatctatttagttagacgcttgaacaacgtcctaaaatcaacatctatgacgctaggaatctgtataatccaagtaagttgcaaacctttgatagtggaataagagtaaatgatgcttgcagcagatgtgtcccttcctttgacttgtctgaagaggtgaattatgcaggtaactaatgtagtacgaaatatcaggatgaatccgcattataaaagagtaccatagaagaaaatgtgaaagatctttgatgatagactcttatcataaatgctatggagagtttctactaaacgaccaactttagctacaaaatgtactctttcataactggtaactagaatgaaacacgctcctctatcaacttcacaaatctaattgtaaagttagatccaatcacagactgaggacagttgtgcaccgtttgatacactgatggtaatcttaataatccccatggttacaacaaagcacttaggtattgctctgtttgtaccttaatatcatgggatattagaggctttctgttcagatgagaatcgccgtcaaaaccaagttttgttgacactggaggattcaacagcgactctagaggcatcattatgcaataaagtcgcagtaaatacaccatttggtctaattgcatctaaactgttaacaaagatcgtctctgatagcctagtctagcgtccgtggctccaacccgccacaattgtcctcagtccatgcctagcctacctgtaaagtactaccccttcatgaaatgtggtactactttggcgacagtcttttcccacacatcctccaattgtgccccatttgttactctgatggacatcgatgcattccccaaggttacatgcaagtacagatgtattgttcgggttgtagctgcatatccttggcaagtagaggatttctgttcagatgagaatcgccgtcaccaccaagttttgttgacactggaggattcaacagcgactttagaggctttcttatgcaataaagacgcagagtacttttggggtttagggtttcaggacacagagacgctgaggaagaagcggaattggttgctcggtatacgggaaagctcgaactttgtggctccaagaaatccaccatggatcgagtgctgcatcctctcctactatactaacaaagctgacccgtggaatactagattatacagaatctttggtactagactacttcattaagtatttgtaagtgttaaaagaggattaaatagtttagtattaggctcatgttaagaatgttggatttggccaaaaaaaaaaaaaaaattgtgttgttttagttcatgaagaccttgtaaccaaaagaacatcttcatgatattaaccaaatccaaagactgaacac

SEQ ID NO: 579 - DNA, 2010 bp, Arabidopsis thaliana
  Clone ID: ARATH-23APR03-CLUSTER22484_1
cacgctcacatcctaagacaagggccaagtaaagactttgatctcgtgtctctcttgtaccgagagtgtctgaaaaatggaagcatcaaaatgttttggtccaagaactctccctatcattcacaacgtccctctctgtctgaagaccaacttctctctctttcctcgctgtttgcttcaaagccaatctctttcctccaagaaatccacaaaacacgacttgttccgtgttaaggctgagactagtggcgatcttgagaatactcgtccattgacgtactattctccatctctttggggagatcacttcctctctgttcccatcgatgaatccaaatttgaggcacttgagaaagaaattgaatcggtgttcaagcctaaagtgagagacatgctcatgtctcctcacagcagcgacaaggagaggattcgtctcatccatttgcttatcagcctcggtatcgcttattactatgagaatgaaatcgaggagattttacacaaggcttacgggaagttggcctgcttaatttcggacgaggatgatttggaaacaatagcaatcatgtttgaggttttcagactatatggacacaagatgccttgcgatgtgttcgagagattcaaaagcgaagatgggaagtttaaggaaagtttagttggggatgttagagggctgctacagctgtacgaagccgcgcatctaggagcaccatctgaagatataatggatgaagccttaagttttgcgcggtatcacttggaaccgttggcaggcaccgaaacaagctctaatctttttaagcatgtagaaaacgttttgtatagagctcgatatcatagcatagagatactagtagcacgacagtacatctctttctatgatcaagaagaagaccaagatgagacgctccttaggttttcaaagctcaatttcaatttttgccagatgcattacgtcaaagagctcaaaattgtcaccagatggtggaaggagctaggtatcgcatctaagctaccctactctataagggaacgaaatgtggaggtctatcttgggagcttgggaatgtttttcgagccacggtattcacttgccagaattttttcgaccaagcttacaatgatcttgactgttgttgatgatacatgcgattcatatgccactcttcctgaagttaagagtcttcatgatgcttttcatagatgggatctgcgtgccatggaagaactaccgaggtatatgagaatcatctaccaaagtgtgttcgagactgtggaagatattgatcgagaaatgatagctcgaggaaaacatggtcggttgcaactaaccatagatgagattaagagtctaatgatatggtatcttgggatagcaaaatgggcacgctcagatcaagtgccaagctttgaggattacatggagattgggaccccctcgtctgcattggatgacttagcatcatacggctttatagcaatggacgattgtgatcagaagaaattgaaggagtggttttactccaaacctaaaatctttcatgccttgaatgctctgtttcgtatcagaaatgacattgtcacgttcgagcaagagatgagcagaggagaggtggcaaatggtgtcaattgttacatgaagcaacatggtgtcaccaaagaagcagcggttgaagaactgaggaagatggaaagagagaattataagataatgattgaggagttcatgacgtccaaagctatgccacgccagattctggtgcgacccgtcaacattgcgcgtgtgatggatttgtattacaaagaagccgatggatttgggcatcctgatcaaaagctcttacaacttattgcgtctttgttcctccatccaatacctctttgaacatttataaaaagttataaggagtttttatatatgtatgtgactttgaataagtgttttgtatatgtttactttgaatttgaattttctttaatttattttaccaaaaaaaaaaaaaaaaa

SEQ ID NO: 580 - DNA, 1483 bp, Arabidopsis thaliana
  Clone ID: ARATH-23APR03-CLUSTER22533_1
gcagccgtgccgagcactcatctcttcttctctctcagtctcgctcgccatctccgtggagatcctcggacatggtcatgagatcgtaagagagaatcttcaaaaaattgaaattggaaatcgataagctaggagctatggagaaatgtcggggaaactttggatcccgagatttattctcatcactctactgtttattagctcacgagttaactctcaatgtgaattcagtttcactggacgcaacaaggtctttcatttcaacctagcatcttcgattcatttcaacctagcatcttcgattcggaattatcctcacggtgtgctcagcgaagatgggttttataaagtggaagcgaacagttccgtgttatggtttcagctttgtgacgtgctgattttcaatcacgatccccctcgatgtgttggttgcgaagattgtggaggtccatctcactgcggaacgtcatgtagtgcacttgtgtcagaaaatgtaagagggtatgatgtatgcacttctctagggcatgcctcaagcacaaaagttgatattattgataaagaggatcctggcaaaggcgtcattgttcagatgtcaactggaaataggaaccaaaattgctcgctttcagtttctgttatttgccagaaaactaaagttgatggaccactcactttggcgaaatctggtacctgtcagtatgctactcagctgcgacatcctgccggttgtgcagtagctatatccggccatagtagtggatggggtttggatttagtatcttgtgcctgattgtcgcgtgtctgtttggtgcttatctgttgggtgatttcttatatcgatatcttgccctagaagtaatcccgaatatggattactgggccactgtaccccacagtatacagagctgttttggctcactattttcaagattcggggggtctattcgtggtcagcaaacctcatattctcaagtcaacttttgagcagtctcagcatcttctctgatccatggtctggagacacatccccaaactttccttgactggttcaaccaattgcaaacgccgctagattgttataccctgagtactcttttggccattatatgactgcaagttataaggtgcctctccttttcagcttgttatgtcatggatccctgtagaaacaaaagaatcttgttcattggatagaaacaatgtcaagccattgcaatctgcagcctttcccatttcgtgtgtttgctctttggagattgtttcagtttcttgatgctgattttgagtaatggtaaccgatgtgttgatgttttagcacattttgcatccgcttggcgttggataagtggatatctcttttctttcaaaaagttttctgataggcgagtgatcaatgtttaggatagagatgttgcaattgaccaaaaatccacgaaccagattgttcttttagtgatctcggttaaatttgagccgattt

SEQ ID NO: 581 - DNA, 1427 bp, Arabidopsis thaliana
  Clone ID: ARATH-23APR03-CLUSTER22554_1
ataaaccatttaaatttgatcaaaccctcacaagattgatcaatcaattctcgagtctctgtttcggtcacataaccgaaaggaaacttttttagtcagaaagaaagatttttggagttgaaagcaacataagagattaatggatggttcagctggtccaagagatggaggagctatgaagccggtgattttgagagtttgtgttgctattgtattatcagcaactggtttgattttggctaggtttgtgtctcggaatgaagataacgaggtaacttcttctacaagtaatccagagtcttcttcatcacctagcagagaaaacgacgaggaagaagaagcagagagtccgaatcagcagaagcaagagattctcagcttaaaatccagattcgaggagcttcaaaggaaggaatacgagatggagttgcatttcgagcggttttgtaacttgaaagatcaagaagtcatgcttattgagcataaaagcatattgagtcttgagaaagctcaattagatttcttccgtaaagaagttttagcgatggaggaagaacacaagaggggtcaagctttggtgattgtgtatctcaaacttgtgggagaaatccaagagttgagatcagagaatgggttgcttgaggggaaagcaaagaagcttagaagaaaatcaaagcagttataccgtgttgtcaacgagagcaggaagattattggcgtggaaaaagagttcttgaagtgtgttgatgaattggagacgaagaataacattgtgaaggaacttgaaggtaaagtcaaagacatggaagcttacgttgatgtgttgcaagaggaaaaggaagaattattcatgaagtcgtcaaattcaacatcagagatggtgagtgtagaagattatagaaggatagtagaagagtacgaggaattaaagaaggattatgcgaatggagtgaaggaagtgattaacctgagatggagcaatgcttgtttgagacacgaggtgatgagaaatggaaccaactttggggaaatcgtgttttctccaaatggaaacttgcatgagctgggtttggaggatgatcaagtggataatgctctggcattgatgagagtagctaatgagcaacatgaagagaatcatcatcagcatgaatcttcgaggaggaagagattgatgaagaagttgaagaaatgggttgaaggaaatgagaaaggaaaatcaaaagcagaagaagcagaagaagcggaaggcactatttgacagtggaacctgaagaagaacgaacatttcattcaagaaggtcttgttctagtgtgtaatagcattgctttacaaaagaagcatgttcatgaattattcatcatttctccacaactaacatagtctttgaaaacaaaaaaaaaaaaaaaaaaaaaaaaaaaaaaaa

SEQ ID NO: 582 - DNA, 612 bp, Arabidopsis thaliana
  Clone ID: ARATH-23APR03-CLUSTER225571_1
aaattttaatctaaagatggggaaatcgaagcgatactggttactcaaaacagagccaagtgagtggtcattgtcagaccaagaatccaacggcggcatcagcaaatgggacggcgtcaagaacaaacaagcccagaagaatcttaaatccatgactttaggagatctctgtttcttctaccattcaggaaccaaagctagatccgtcgttggtttggttgaagtatcacgtgaatggtacactggtgatgatgaaggagtagaaggagaaggagcggttgatgttaaagcgattggagaaatgaggaaatgtgtggatttgaaggaaatgaaaggagacaaagggattagtactaagggttttgttttgtttagacagccgaggttgtctgttgttcctgttgaggaagatgtttggaataagatttgtgaattgggaaatgggttttgtggagatggtaaggaagattgtgaaagtagtgatgatgaatgagtcttaaattggattctgttcttgtattatgtgatttaaagttctgaactttgttaggattttgggggttttgcttaatgattgattcgtagtggtgatgccaaaaaaaaaaaaaaaaa

SEQ ID NO: 583 - DNA, 1330 bp, Arabidopsis thaliana
  unsure (1)..(1330): unsure at all n locations
  Clone ID: ARATH-23APR03-CLUSTER2256_6
catagcaccgatcataatctactctctttaaaagaaattcgtaagtactatcaagaagcagaagatggcccaaaaggtggaagcacaaggagggaaaggagccaacctatgggacgatggatcgacacatgacgccgtgaccaagattcagctcgcagcaggcatagacggaattcaatatgttcagtttgattatgtcaagaacggacaacccgaacaagctcctcttcgtggtaccaaaggccgtgttctcccagctgatccggttcctatattttccttgcccattaatcttcttctttctctctctctctctctatatatatatatatatatatatatatatatatattggnatattttgaaattttgacattttcatcttgatctatttctacagtttgtgattaaccatccagacgaacatctcgtttctgtagaaggttggtatagccctgaaggtatcattcaaggggttaagttcatctccaacaagaagacttctgatgtcattggatccgatgagggtactcacttcactctccaagttaaagacaagaagatcattggctttcatgggtctgccgggggcaatcttaattctcttggggcttactttgctccgttgactactacaactccgttgactcctgccaagcagctaacggcatttggtagtgatgacggaactgcatgggatgatggtgcttacgttggggttaagaaggtgtacgttggacaagcccaagatggtatctcagctgttaagtttgtgtacgacaaaagccctgaggaggtcacaggagaagaacatggaaagagtactctactcggattcgaagagttcgtacttgactatccaagtgaatacatcaccgcagtcgatggcacttatgataaaatcttcgggagtgatggctcagtcataactatgcttaggttcaagactaataagcaaacgtctcctccctttggacttgaagctggcacagtcttcgaactcaaagaggaaggccacaagatcgttggtttccatggaagagccgatgttctgctccacaaaattggagtccatgttcgtcctttatccaactgatgatggagctctttatccttgattccatgcatctaataagttatcaaatctatcttctaaatttctcatatgaggtctcttcatgcctctggtgaatggtgatctttgataagtgttttacgcgttgtctcttgcgatgttgttttttctttgttcttcttgtgctctattttaataaaggaagtttgttcccaaaaaaaaaaaaaaaaaaaaaaaaaaaaaaagggcggccgc

SEQ ID NO: 584 - DNA, 1235 bp, Arabidopsis thaliana
  Clone ID: ARATH-23APR03-CLUSTER22588_1
attagcatgagaaatggcatccattgattctctccaattccattctctctgcaatctccagtcgtcgattggaagagccaagctccagaatccttcaagtttggttattttcagacggagacccgtaaatctgaattgggttcaattcgaaactaaaggaagtttcgtgtgtaaagcgattggtgattcctcgactccagatgaagatattcagaacactcaaagtgatgataatgttgttgttgttactgctacgactcagagtgacattccccatgattccgagtattcaatttcgaggtttcgaagtatggttaccacactccctcctgttgtcttcctgatgaagaagtgctcagtgaacagcatttggattggggtctgcatcacggctactgttttggtcgctgcgattagggcttatgtagtcagaaagtcaagagataatcagcgtgctggctctgttgctgatcttgtgagacgtggccagctgaggtctggtgatagaagaggcatctccaaatctcttaactacgaggacccattcaacaacccttttgtgaaacttgataaaggaagctcaacggtagagatgtgcgggaaagtttatcggctagctccagtcacacttacagagaaagaacaaactattcatcagaaaagaaggtcaagagcttaccaatggaagcgaccaacgatttttctcaaagaaggggactcgataccacctgatgttgatcccgatacagtcagatggatcccggccaatcatccgtttgccaccacagttagcgatatcgatcaagaccttgcccagaataatgtctaccagaagcaaggtgttcctttccggattcgagctgagcatgaagctatgcagaaaaagcttgaagctttacaaaatgaggagaaattgaacaatctgagtattgacagtcaaaatgccagagatttccagaggccatacaagttctcagcgaagctcgaaggcgagaatatccagaagaattctcaggagaatcatacaggcaattcatcctctgaggaaacgcacaagtcctgagacgtactaatctaattgtaaatacagttttccctcgagagtcatacttgcgttccaagaaactggagattttctttgtagtagatcacacttacctaaatctatgtttttctctatttgctttaccatcagaaccaagtcataaagacaagagaaagctttatccttaaaa

SEQ ID NO: 585 - DNA, 672 bp, Arabidopsis thaliana
  Clone ID: ARATH-23APR03-CLUSTER226275_1
acagatcacctttagtacttcccaaggtgacatccatggcaaagaactcatcatcacagagtagtagcaagaagaagcaagaaaacagagtgtgcgagaagatcttcagagcagtgactagtcctgtccgaaccgttcgtcgcatctccaccaaatcttcaccagcagaggctgttcgcgtcaaatttgcagagacatcggctaggcctagggcagccaaacccattacaaaggtggaaccggtgatcgctcgagtggatactacgatcaaaacggacgagaggttcaccgagtatataaagaaagcgaagctgaagataagggcgatgacgaatgtcggtgatatgatgaaggaggatgcgtgggagacaagtgatgaaacagatcagacacgtcatgatcatcgtcaccaccatgtgcctatctctcacgtaggtagtagtggccggagatcatcagatcagttctctgagtacataaagaaggcaaagatgaagctcagttcctcttccaccattgctcgtgctaacccgactttcaagtgatggatttcgacaaattaatgatttgaataatcctctggcctgagagattgatatatatgtatatgttttgtggtgtgtgttgacaagtacggacatggatttgtcgttttaaaaaaaaaaaaaaaaa

SEQ ID NO: 586 - DNA, 1652 bp, Arabidopsis thaliana
  Clone ID: ARATH-23APR03-CLUSTER2264_1
attgttttgtccgaaatcgattttctttctctctcgcgcgaccggtgaactcttgataagccgatgaattgacgatggtgattgtttgttggcgtgttatctgaggtttccaacgccggattcatcaacgctaatgaccatcggcagaatgatcaagctctggtcaaatgctggtaacggtggagcaccatggtggacttattggagtgtcggcattactattatggttatgggaacttcagtttacgaaataagttacgctttccctgcatactctattggttgatgcagttactttgattttttcttattttacagtacaagccccataaaggggataagatcaaggtttacttgcttgcttgatagtattttgcattgacttgaaaaatccaaaacaaacatttttagtttgcgattctcggattcgatcagtgaaattcgaatcgaagcgccgccggaagaatcatcgccggtgtgggagcgtttcccggagcggcgatggaggtccatggctccggattccgtcgaattctgttgttggcgttgtgtatctccgggatctggtccgcctacatctaccaaggcgttcttcaagagactctgtccacgaagagatttggtccagatgagaagaggttcgagcatcttgcattcttgaacttagctcaaagtgtagtctgcttgatctggtcttatataatgatcaagctctggtcaaatgctggtaacggtggagcaccatggtggacgtattggagtgcaggcattactaatacaattggtcctgccatgggaattgaagccttgaagtatatcagttatccagctcaggttttggcaaaatcgtcaaaaatgattccagttatgctaatgggaactttagtttacggaataagatacactttccctgaatacatgtgcacctttcttgtcgctggaggagtatccatctttgctcttcttaagacaagctctaagacaattagcaagctagcacatccaaatgctcccctcggttacgcactttgttccttaaacctcgcctttgacggattcacaaatgccacacaagactccattgcctcaaggtacccgaaaaccgaagcgtgggacataatgctgggaatgaacttatggggcacaatatacaacatgatctacatgtttggcttgccacaagggataggattcgaagcaattcagttctgtaagctacacccggaagcggcatgggacattctaaagtattgtatatgcggtgccgtgggacaaaacttcatcttcatgacaataagtaacttcgggtcactagctaacacgaccataaccacgaccaggaagtttgttagcattgttgtatcatcagtaatgagcggaaatccattgtcgttgaagcaatggggatgtgtttcgatggtctttggtggtttggcatatcaaatttatcttaaatggaagaaattgcagagagtggagaagaagaagcaaaagagttgaagtttttccctcatatctctaaattacgtatcagttattcttagtttatttatgtcactagtcaatacaaagaaactcaaaccagattagttaactgtataagtaacattactaatcactaaaatatatgatttgaattttgtgggtaaaaa

SEQ ID NO: 587 - DNA, 1592 bp, Arabidopsis thaliana
  Clone ID: ARATH-23APR03-CLUSTER2265_1
cggaaaactgctcactgcccctggttacagagagagcaagtggtcctcctcgatcttcccctcccccccccatcagatatacacttcccactcaaaattttccagaattcccaaattcttctctgtatatttcctctaacactctcgaattcactccctaacttgtgatttaaaacaagtcttctcaaattttgttcatctccagctacaaaaaaaatggcgcagcaaaagttccttcaccagcgaccaatccaaaacccattcacaaacccattctcttcttctcctctttccacttcttcaatctcaaatcgtccaatctctctactcagccgcaacggtctcctcctccttctcgctctcctcgttatcctcggcgtattcttaccctgggcaggatctcctttattcccgtctccaaacaaactctctccttctcaatccaaatggcgcgactattccctccctcaagctgtcaaattcgtagctaagaacgggactgtgatcgtatgcgccgttagctatccttacttgccgtttctcaacaattggttgattagtgtttctagacagaagcatcaggatcaagttctcgtcatcgctgaggattacgctactctctacaaagttaacgagaaatggcctggtcacgccgttctcattcctccggcgctcgattctcagaccgctcacaaattcggttctcagggattcttcaatttcacagcacggaggccgcaacatctcttggaaattttggagttaggttacaatgttatgtacaacgatgttgatatggtttggttgcaagatccgtttcagtatttagagggaaagcacgatgcttacttcatggatgatatgactgcaattaagcctttggatcactctcatgatttaccacctccgggtaaaaaaggaaggacttatatttgtagctgtatgattttcttgcgtcccactaatggcgcaaaacttctcatgaagaaatggatcgaggagcttgaaacgcaaccttggtccagagctaagaaagcaaatgatcagcctggttttaactgggcacttaacaaaacagctaatcaggtggatatgtacttgctttcgcaggcagctttcccaacaggaggattgtatttcaagaacaaaacatgggttaaagaaacaaagggaaaacatgcgataatccacaataactacatagtcggttttgagaagaagatcaaacgtttccgtgactttaatctatggctagtcgatgatcatgcttccgagtctcctttagggaaattagagtaaattccaatggcagaaaaagattttttgtcgctccatctttcttcttgttattggaatattcaggctgcagaaaggaagaaagatccatcgagtaaattcttttacattttttgggggtctttaaagtcatgtgaagaggtgttgttattggctaattcaatacgagttgagttgaatttgggaaaaaaaaaaaaaaaaaaaactcgagggggggcccggtacccagtcgccgtgcttttatgttgttcccacacgagtgcgcatcggcgctatttcattaataacttttatgt

SEQ ID NO: 588 - DNA, 1737 bp, Arabidopsis thaliana
  Clone ID: ARATH-23APR03-CLUSTER22671_1
aaggagggaaaagaagagaacaaagcgtgagagagatagagataaatccggttctagaatcccggtttaaccgccataccggtggaagattctgctttactacgctctccgcttcttcttctcctcgattcgattctcctcatgggtttatcatgaatttttaggttttgagtaattcagaaactcgagtgatgatcccgaatgatgatgatgatgcaaattctatgaagaattatccgttaaatgatgatgatgcaaattctatgaagaattatccgttaaatgatgatgatgcaaattctatggagaattatccgttaaggtcaattccgacggagctttcacacacttgttcattgataccaccttctttaccaaacccttcagaagcagcagcagacatgtccttcaattcagaactcaatcaaatcatggcaaggccttgtgatatgctccctgccaatggtggagctgttggtcataacccttttttggaaccaggattcaactgccccgagacaacagattggattccctctccactcccccatatttattttccttcgggttctcccaatctaataatggaggatggtgtcattgatgagattcacaaacaaagtgacttgccactttggtatgacgacttgattaccactgatgaagatccactcatgtctagtatcttgggcgatcttctccttgacactaatttcaactcagcttcaaaggtccagcaaccaagtatgcaatcgcagattcaacaaccccaagctgttctgcagcagccttcttcttgtgtggaattgcgcccacttgataggacagtatcctcaaacagcaacaacaatagcaacagtaataatgcagcagcagcagctaagggacgtatgcgttggacgcctgaacttcatgaggtttttgttgacgctgttaaccagctcggtggcagtaatgaagcaactcctaaaggtgtcctgaagcatatgaaagtcgaaggtttgactatttttcatgtcaaaagtcatttgcagaaatatagaacagctaaatatataccagtaccatcagaaggttcgccggaggcaaggttgacaccgcttgagcaaattacatctgatgatacgaaacgtgggatagatatcactgagactctgcgaattcagatggaacatcagaagaaactgcatgagcagcttgagagtctaagaacaatgcaacttcggatagaagagcaaggaaaggcgctgttgatgatgattgagaagcaaaatatgggtttcggcggaccagaacaaggagagaaaacaagtgcgaaaacgcctgaaaatggttcagaggagtcggaatccccgcggccaaagcgtccgagaaatgaagaatgaaggaaacctttcttcggatggtagatcataaaactgtggttttggtggagttgtagagtatgacttattaggagtagagctttcagtcttcttcaggccttttctcttttttttttctttcttaaaactctaattttctgattctcagctctctaggaagaaacaaataaagagcaattccatctttgtgatgtaattctgagtgcagagattttagatttagtgtttaggtggattttaaactagcttttatttcgagtttcttcctgtaaaaaaaaaaaaaaaattaattgcatgtatggaatcaactcatgtaagttagattaatcttcgaaaatatttttgcttttgc

SEQ ID NO: 589 - DNA, 1669 bp, Arabidopsis thaliana
  Clone ID: ARATH-23APR03-CLUSTER226_1
acaaaaatcagaacagcttttaaattgcaatggtctcttcggttttatccatccctccacaaacttgtctacttccacgattacccatctctgattctgtcaattgcaaatcgaaaatcgtgtactgtctctccacaagtgtccgaggaagctccgtcaagagacaatccacggccagaactcgcagtttcactgagacaaatcgtcgaacaccttccgtgcaatccaaacatgaattctgggaagatccagatgatggtagcgacagtgaaaacgaatatgaaggagaagaagaagatggtattgggaatgatttagataacgagagtgattgggaagatgactcgagagtacaaaagcttactactacagacaactacgaggaagagcttgcaaaagaggttgaacaacttcttgaacctgaagaaagagtaattcttcagcaaaatgagaaaccaaatctcaagatgatctcaacaaagagttggaagccacttcagacacttgctctgtcaatgcagattcagttaatggataatcttattgaaaacggactagacattgatgatgttgacaaggacaaccaaaccgctcttcacaaagcaatcattggtaaaaaagaagcggtgattagtcatcttttgaggaaaggagctaatccgcatcttcaagatcgggacggtgcagctccgattcattatgcagttcaagttggagccttgcagactgtaaaactactattcaagtacaatgtagacgtcaatgttgcagataatgaaggatggactccgttacatatagctgtacaaagccgaaatcgagacattacaaagatattgttgaccaatggtgctgataaaacaagacgaacgaaggatgggaaattagctttggacttggctctgtgctttggaagagatttcaagtcatatgatctggtcaagctattgaagattatgcccaccggggatatatagaaagagctggtgagattttgaatgatcaggttgagattactaaactgcatttgccattgcttggtttgattgtaatctacaccggtataagtggttaaggtagaagaaacccgattgagtttgtaattactgcttttatatattcgtggatgaacttgttattcgggtgtgtgtatcataatgtgcataacaaagatacacattgttatgtcatatatattaaataaaaaacattacaaggcggccgcagtaaataataattttaagggttatgcattgactttaaaatagggaagacaagtatataatttgttctctttctccacatcttttttttttgttaccaaccatacattgaaacatgcaaatgcatatgcacctattcgttgataagttcgcagcaacatattttacaagttccggtctcgtcacggctacaaaaagcggattcataattatatccatattttccagatacgcaatccgtaaagcatgagtccgtgtacggtccaaccgggtgtttgcaatctgcatcgacagatttaggtccagaaatgatgaatatgatcatgatggtggtaatcaaaattagtagaggagaagatgatgatctcttggattccatttttttcgtattaagacttgagagataatggtgtttttaatcaactgagagattatggttttatatt

SEQ ID NO: 590 - DNA, 2463 bp, Arabidopsis thaliana
  Clone ID: ARATH-23APR03-CLUSTER22706_1
aaacaaaaggaacaacctttttcccggcaaatgcttccgatggaacatccacttccactgtcgttcgtcttgccaaacccggccacccttcccggtctcgcactaggctttattgacggtaatttcgtagacctccaagatctgctcctccgcgcttcgactctgacgtccaatttaaaccacgactgttctgatctaaacgaccgtcttctccatctccggacggatctcacgaagcacgccgtttcctggatctcaacctcactttccgctaaagtttcactcgaagatttgagattgaacctggagagcctcctctgtctccctacggattctgtcggaaagcaaacgaattgggagttacagcaagtcgtagaggaattgtgtcgtatacagaatcggcgtaaatatttcgtgactgccttaaagttggaaagtcttgttggcgatcttgaagattctgtgtttcatccgataagtaaacgcaaaggaagtacgcttcaagatcttgcattgaagcaagagagattcagtcatgctattaagaccatgaatgagattgaagaaatacttggtgatgttacaaggcatcactcacggtggcgtcgccttgtagattctgttgatagtagagtagataaaagtctgtctgttcttcgtccacagattatcgcagatcaccgagcttttctctcatctcttggctggccaccaaaacttgcaacatccaaagtcgagcatggagaggttgatagtatccctaatcctctactcttgatgcaaggagataaaaaagagtcttattcccaaagctttctactcctctgtggtttacagcaacataatacgcagaaggaaaaacgaaagaagcttaatatgaccaaagaaactgataatgatggactttgggcgaccgatgaactagttaaaccggttgcatctcggatggagtatcattttctaaaatgggctgagcaacctgagtttatttttgaacttgtctataaagttacaagagactttgctgatggggttgacgatttcttacagcctttgattgatagggctatgttagtaagctgtagtgctaaagaagcttgggtttcagcgatggtccaaatgctatctggtttcttagagaaaaaagtttttcctgggcttatagatatgtacaaggagaagcacatgaaatctgaaggtatttcatcgtggttccatcttgtcgatcagatggttacatttgataagcgaatgcagtcttttgtgaatacagatacttgtctatcttatgaaggctcttcgacagcgttttctcaaggtatatcagtaatgggactgttttgtaagaaacctgagtggctcaaaacctgggggaagattgagctaaaggatgcttatagaaaaagtaaagaggatattaagaatgagaaagcttgggtaattgatagtgaaagaactagacttggtaatgaatccaactcacagtctgcaaagtatgttctatctacaagagaagattataaagcgccattagtagcagactcttttcttaataggacttggaggttgatagaccatggtctatctctaccggccattctaccaaggatccaatttataagagctactgccaccagatttctctggtgtatattcaaaattctgttattggagttcaaaaagactgatctctctcattatggtttgtctgaagatacactgatacaagcatgtggaccggttaatgctgctcggtatcttgaatcaaaactacgagaatggagtgatgatttggtttttgtagagatgtgggctgccgaaaccagtgtcaaagttgatagaaaacctgaagtttcctgccaaggctgcttttttggggaagaactgaaaagccttgttgagttggaaaccaattggcttatggagattataacagtttttctccaccaatttgacaatctttgcagcgaccacttccacaacaatgcagtttcatgggacgaagacgtcattaccagctccagcaatttaacagtgtctcagggtgtcgcagaagcattggacaatttaagaaggcatctgtgtgttcttcatctaaacatgaacccgaaagacttcttggacttgtggagaaatctcgcggaagggcttgaccattatgtttctcgtaaatttttctcaggagaacctgttttacggagacaaaagtttgataggtttgaagttgacgcagaggcacttcttactgtgcttaaaccttattgtgttcgtcctggtgcatttttccctcgtgtgcgagagattcttaggctgttgaggatgcatgaggaagaaaaggcacgattgagaggagctctaagtcgaagtggaaatacttgtctaaagttgtttggtatttctaacttgtctcctcaacttgtggaacaattttgtaggtcttactagtaatgaatgcctttttgt

SEQ ID NO: 591 - DNA, 1713 bp, Arabidopsis thaliana
  unsure (1)..(1713): unsure at all n locations
  Clone ID: ARATH-23APR03-CLUSTER22753_1
gaaaagtnccttaacatggcggttaagcacggcgtcgacggcgacggcagcgtaatcgaatcgagaactctggcggtagatcgaaaaagcggtttctgcgaatcaacatcgatattctacagcaaacgtgagccaatggctctcccgccaaaccaatttctcgacgtcacgtctttcattgcatcacagcctcatcgcggcaaaaccgtattcgtcgacgccgtaaccggtcgtcaactaagcttccctgagctctggctcggtgtcgaaagagtcgcgggttgtctttacgcattaggtgtacgcaaaggaaatgtcgtcattatactctctccaaactcaatcctcttcccgatcgtctccctctccgtaatgtcactcggcgcaatcataaccaccgctaatccgatcaacacgtccgacgaaatctccaaacagataggcgattcgcgtcctgttctcgccttcaccacatgcaaactcgtctccaaactcgccgccgcgtcgaattttaatctcccggtggttctcatggacgactaccacgttccttcgcaaacttacggtgaccgcgtgaaactagtcgggaggttagagacgatgattgaaacagaaccgagtgagtcacgagttaagcaacgagtcaaccaggacgacacggcggctctgttatactcatcaggtacgacggggacgagtaaaggagtaatgctgagtcaccgtaacctaatcgcattggtacaagcataccgggcccggttcggtttagagcagcgaaccatttgcacaatcccaatgtgtcacatcttcggattcggtggtttcgcgacggggctaatcgcgttaggatggacaatcgttgttcttcctaaattcgacatggctaagcttctctcggcggtggagactcatcgttcttcgtacctttctcttgtaccgccgattgtagtagctatggttaacggagcaaatgagattaattccaagtatgatctgagctcgttgcacactgtggtggctggaggagctccgttgagtagagaggtgacggagaagttcgttgagaattatcccaaggttaagatcctacaagggtatggtttgactgagtcaacggctatagctgcttctatgtttaataaagaggagactaagaggtatggagcttctggcttactggctccgaatgtggaaggtaagattgtggatccggatacgggtcgggttttgggtgtgaatcaaacgggtgagctgtggattcgaagtcctactgtgatgaaaggttatttcaagaataaagaagctactgcttctaccattgattcagaaggatggttgaaaactggagatttgtgttacattgacggtgatgggtttgtctttgttgttgatagattaaaggagctcatcaaatgcaatggttatcaggttgctccagctgaactagaggcattgttgcttgctcatccagagattgctgatgcagcagtaatacccatccctgacatgaaagctgggcaatatccagtggcatatatcgtaagaaaagttggaagtaacttatccgagagcgaaatcatgggatttgtcgcaaaacaggtatcaccgtacaagaagattcgcaaagtcacatttttggcttcaatccccaaaaatccttcgggcaagattttaagaagagaacttacaaagctcacaacttcaaaactctag

SEQ ID NO: 592 - DNA, 1117 bp, Arabidopsis thaliana
  Clone ID: ARATH-23APR03-CLUSTER22782_1
aagcagaggagttatactttactacttactaatctctccctctctctatctgactctttgatcggaaaaaatggcggagaaaaatgcgagcgcggtggacggtgcaattagggttagtggaatgcagttttcttacgatgttcaagatcctattttcttcgattttaatctcgatcttcccgctggatctcgttgcctcttggttggtgccaatggatctgggaaaaccacattattgaagattttggctggaaagcatatggttggaggaaagaatgttgtacaagtgctggatcgctcagcatttcatgatacagagcttgtttgtagtggtgatttgtcttaccttggaggatcatggagtaaaactgctggttctgctggtgatattccacttcaaggagacttctcagcagaacatatgatatttggagttgaagggattgatcctttcagaagagagaagttgattgatcttcttgatatcaatcttcaatggcgtatgcataaggtttctgatgggcagagacgtcgagtgcaaatatgtatgggtctattacatccgttcaaggtattactactggatgaagttactgttgacctcgacgttgttgctaggatggatttgttggagttctttaaagaagaatgtgaacagagaggagctacaattgtatatgcaactcatattttcgacgggctcgagacatgggctagtcatttggcttacattaatggaggagagctgaaactctcggccaagttagatgagatcaaggatctcaaaacctcaccaaatctgctatctgttgttgaagcttggctccggtctgaaaccaaagttgagaaaaagacgaagaagaaacctgttgttacctctccatttatgtcgtctagacaaatggcatattaccgatgaatcttaacttgtttatgagatcagtaagaataagagcactgcttctacagatgcctttgttttctatggtacttcattgtttagaatccgataacttttatcacacatgaaagaatttctgtaaaaccacgtttttaattaaattactattttgccaacaaaaaaaaaaaaaaaaaaactcgagggggggcccggtac

SEQ ID NO: 593 - DNA, 898 bp, Arabidopsis thaliana
  Clone ID: ARATH-23APR03-CLUSTER22796_1
gaagaagacaacaatggagtgctctctctcatccatcctccttctccttgtactctgcttcactcatcccattccttctctaaccttcgagccactaatctcttctcttgatcttcatgaagaagaaagctgcccttacactgtaattgttaccacaagctgtttctctcctgattggtctagagatcaggtcactatcgctttgggtgacgccgacgataatcaggtggtcgcaccgagactagacaaaccgctaagtggaggaggtggttttgagaaatgttcatcggacacattccaagtcaaaggtaaatgtctcaacactatctgctccgtctacatctaccgttccggtaccgacggctggatcccggagaccgtcgagatatacaaggaaggttccaaatccgtgaaattcgatttcaacaagaacgtccctgaaaacatttggtacggaaacaactattgtaacaacaccgatttgccaccgccttccccggatttccctccgttttctccatccatcccaccgccttcaccaccttattttcctcctgaaccaccttcaatcccgccgccaccaccaccatcaccgccgtctgctgcctctggacgtggaagtggtcagagtttggttgttgcgtttgctgcgtttgtgtttgcgtttgcggctgtggttgtttgagttattttgttaagaattaagagttgtctcaataagtaacgagtatcgtgtaatccctctgttttgtctttgactctttgtagttgaacattgacaatttcatattgtggtaacattaattagttaactaatgtatgagttcgagtttttaacgtactattccttataaattctgcatcaatgttttgtatgtgaaaaaaaaaaaaaaaaaag

SEQ ID NO: 594 - DNA, 1359 bp, Arabidopsis thaliana
  Clone ID: ARATH-23APR03-CLUSTER22828_1
agagaggtttttccattcatatcataaaaatcgattctttcagagattttcttcttcaacttcgtggtactcttttgctttacccatttttcaatgtcttacgatgagatgctttctgctgcgaagaaagctgtttctctcgctgctcgtctcagcaacgaagtgaggaaatctctgttggtaactgacgtttggaacaaatcagatgatagtcctgttactgttgctgattatggttcgcaggcggtggttagccttgtactggaaagggaactccagaatgaacctgtgtctttagtggctgaagaggattctggtgagttaaggaagattgctgctgagaccgttttggctcgtattacagagcttgtcaaagatactcttgcaagtgatgaatcatatgctattgcttctcctttgacttcggatgatgtgctcaacgctatagatcgtggtaaatcagaaggaggtcctaagggtcgccactggatcttggatcctattggtggcactagaggatttataagaggagaacaatatgcaataggattagcattgttggtggaaggcaaagtagtactaggtgtaatggcttgtcctaagcttccattggcatcaactgctggtaatgcactcaagtctttacctgaaaaagttggttgccttttctatggttcggttggcaatgggacttatgtccagtctctcagtgtcgactctcttcctgcgaaggtggaggttagcagcatagatgatcctgcgaaagcgagtttcttcgagtcataccacacacctgtccccatccataacaccattgctacgaaattggggataaaagaatctccaatcaagatcaacagccagactaagtatgcagctttatctagaggagatggagaggtttacttgaggtttactcgcaaagcaagacccgaatcaatatggaatcacgctgctggctcaatcattgtttcagaagcaggagggaaagtgactgatgcagcagggaatccattggacttttcgaaagggaagtatcttgattacaagagaggaatcgtcgttacgacgcagaaactgttgccaaggcttttaacagcagtaagagaatcaattaaagaagaagaagaggaagaagaaaaagctgcttctctaaaacttcactaacacgcaactgtaatatacttattattgttgtctttgggtatactctgttgtctctgtgtttttcacagtctatttattgaaaaccagaaacaaaaaaaaaactcacctttgatatatataagaaacactaattctcttttgaataaaaaaaaaaaaagaaaaaacactaaggatcaagctacgacgcgtcat

SEQ ID NO: 595 - DNA, 1399 bp, Arabidopsis thaliana
  Clone ID: ARATH-23APR03-CLUSTER22829_1
atggaaataatacactactctctcacggacttggaaccaaacattccaaattagtttaatcgacagatcactgctcagctgaatcgttttctctcatcaaccgcagagaaagactttcaagatcatccttcaagctctctcaaatggccaacttctatgagaattaccagagtccttacgattacaatcaggttaataatctctacgatcaaaatcattatcattacaatcaacagcagcagcagcttggtttcgaaccaatgagttataattattacaactggaatgaatctgaatctgaatatgttgcttactctggttatgatgatccaatgagttataattgttataactggaatggatccgagtctgagacaacctctgcatatgttgcttactctgtttctaccatgtctgagcctaaacacttgttctatgatccgaatctctatacaacctacgaatctcctcctcagtttagtatctattgctctgtagcctctgctcttgacttcaacgagccggaattcgatgaatacgatcccacgccgtacggtggtggctacgatgttgttgcaacctatggaaaacctcttcctccatcggtggaaacttgttacccttgttcaaccgctcctcacgctaaagctccctctcctcctgagattattgctcctgttcctcttggaatttatgatggtggtcaaaagaatgttgtcaagaaacgtgtgtcttttgctgaaccggtagaagaagtcaaaccaatagaaaccattaaagagcaagaacaagaacaagacgaagattatgatgaagaaagtgaggacgaagatgatggtgatgatgatgatgaagaagaagaagaaggggatgaggaagctaaagaagaagaaaaagatcacagttcaagctatggaaatgaggaatatgaagtcgtagataaaggagaagtgaaagctttgtatgttccgtctggttacggattagaagcgaccgatctctgtgaggttatatttggaggttactttccttgtgtgttacgtaacaaaagacgtcaggaagatgaacaagatcgtggggctgctgtttcttgctgggaaagcaacgattctgatccgtggaagacaacttccgatcaccttttcggggattcatatccgtacggttacgagaatcggagcgaaagaaatcagttcgaggtctcctcttatggttaccggatgtattaacaaccctagttatcatcagttgtgtcaatgtgaggtaagaacaacattcttttgattattgatgaacctgattttttagtatctgttacacaagagatgagatttactgttgtataacgaggaggggttacttaataataaaacgtcgcacgcaaaaaaaaaaaaaaaaa

SEQ ID NO: 596 - DNA, 749 bp, Arabidopsis thaliana
  Clone ID: ARATH-23APR03-CLUSTER22836_1
gtgaagtgaaacaaaaacagagcaaaatggcaataatatctcagttttttgctccattaccatctctcaccggaaccctaaccctaaccggtcgttcttttctccctctaaaccttgatacccaattcccaaaacctagactttccagggacagagccgccacactcgtactccaatccaagggtgatgattccgtcgatgcatcggatcggataatctcagccgtctgttacttctacccattcttcgatgggattcaatacggcaaattcatcatcacacagtaccacccttttcagattctcatccaacctttgtttcccgccatcagagctttcaagagcttccctttcaatgggtttcttatcttcatcactctctacttcgtcgttgtgaggaaccctaatttcagcaggtacgtcaggttcaacacgatgcaggcgattgtgcttgatgtgttgttgattttcccggatttgcttgagaggagctttaatcctagagatgggtttggtttagatgtggtgatgagtttggacagcacagtgttcctcttcttgcttgtctctttgatctatggattctctgcttgcttgtttggtctgaccccgaggttgcctcttgttgccgaggctgctgataggcaagtcctttgattcaataatatctttgtatgtaacacatttgctgtgattaaaccttctgtattggatcgctttctgataatcaaaacatacaatgtaactttt

SEQ ID NO: 597 - DNA, 1166 bp, Arabidopsis thaliana
  Clone ID: ARATH-23APR03-CLUSTER22840_1
aaaaacacagagacacctttaaaattgagaaattttactttttagcccaaaacttttaaaacttatactttgaaccctttagttctgagaaaatgtgcggaggagctgtaatttccgattacatagcgccggagaagattgcgagatcatctggaaagtcttcctggagaagtaatggcgtctttgactgctcaatctacgatttcgatggaaatttcgatgaattagagtccgatgagccatttgtcttctcctctactcacaaacatcatgcttcaggctcagcgtcagatgggaagaagaaacagagcagtcggtacaaaggaatcagaagaaggccttggggaagatgggcggctgagatacgtgatccaatcaaagatcagatgggaagaagaaacagagcagtcggtacaaaggaatcagaagaaggccttggggaagatgggcggctgagatacgtgatccaatcaaaggagttcgagtttggctcgggactttcaacacagctgaagaagctgcaagagcttatgatcttgaagctaagagaatccgtggagccaaagctaagctcaatttccctaacgaatcctctggaaagaggaaagccaaggctaagactgtgcaacaggtagaggagaatcatgaggctgatcttgatgtggcggtggtaagctcagcgcctagtagtagctgtcttgatttcttgtgggaggagaataatccggacacgcttctgattgatacacaatggctcgaagatatcatcatgggcgatgcgaataagaaacatgaacctaatgatagtgaagaagccaacaacgttgatgcttctctgctttctgaagagcttcttgcttttgagaaccagaccgaatatttctcgcagatgccttttacggagggaaactgtgattcctcaacgtctctgagtagtctctttgatggaggcaatgacatgggtctatggtcctgaacggttctattgtacaaatgacatgagtgttttaaatgagttcttcttcgacttgtctgtttgctatttattcttcaaaccttagccagtgtcaaacaaaaacggccactacgactattgttttgaagattgcgatattttaagttgtaagaatgtagagaataatgtttgggaagaacaaagctcgatt

SEQ ID NO: 598 - DNA, 1339 bp, Arabidopsis thaliana
  Clone ID: ARATH-23APR03-CLUSTER228468_1
gtcaaaccccataaaccctaaaaggctaaaagtttgaatcttaacgaaatgcagtttcttggaagatcaatttcgaaatcgataagaccttcgttaaattcaactgctagaaaatcatgggttctttcttctcagcaatttctttcaacttcttctacggaaagtagtagccgtactcgcggaggaggaggaggaaacagagctgagaaatcgtcggaggagtggccgagaccgatggaggtaccgtaccaacccaaaatcgcgaactctattgatttaattggttacgttcaccaaccagttcagttcgactctacactcgatggaaaattctgggcaggcacagtcatttctcatgaaccttcttctgattccaagtctgagtctgattcatctagtaacttctggattccggtactgtttgaaggggatttagctcatacggctaactcttatttgaagaaaaacgatcgggttcatattactggacagattttaggagatgtgattcaatctggagcaaattctgaccaagcacatgttcagttgtttaaaagctttcatggtagcttttcacatcaagtaatggttcgtgatctccactacattgaaggttctaaagccatgccaaaggttttgccaacgttggatcaaaatgaaggtgtgctaaagcattctgctagcgttcaaagaggaagagaatttggaactaatctttggtttgatcttgttgataaaccgaatgaatggtgtgattaccgtgaaatgaaacagaatggatcggttaatcctaaacaccctgatttcaagaagaaagacgggagtcaagcgctttggcttaacaatgctcctacagagatattgtccgagctcaaagacgtgaagtttgatattccaaaatacgcaaaacaaccaaaggccggagaggaatcatggaaggacttggtagataacatgaataagtggtgggacaatagagtggacaagagaaccccaaaatcgccggattttaagcacaaagaaaccggtgtaggtctctggctaagtgactctccgagctgggtgttagaaaaactgcctcccccaaagagcaaaacaagtgacatctacggtgtacaagagatgttctaaccaatgttcatgttgcgttactcttaatttttttcttacttctacggattaggagaaatatcgtagtgggagtttgatcttatgtgcatatattggatcgtagagtttgtcttgatgcagaatgaaacagagatggtaacactttttttcatgaaaatatggatttatttatttatttaccatcttgaatcaaaaaaaaaaaaaaaaa

SEQ ID NO: 599 - DNA, 893 bp, Arabidopsis thaliana
  Clone ID: ARATH-23APR03-CLUSTER22848_1
gaaaatgaccaaattcttgaaaacaaaaaaaaaatgaataatcaaaatgaagacacagaaggtggtcgaaactgttgtacttgctgcttaagcttcatcttcacagctggtctcacctctcttttcttatggcttagtctccgtgcggacaaacccaaatgctcaatccaaaactttttcattcctgccctcggaaaagacccaaattcacgagacaataccactctaaatttcatggttcgttgtgacaatccgaataaagacaaaggaatctactacgacgatgtccaccttaatttttccaccatcaacacgaccaagatcaattcatctgctcttgtcttagttggtaactacacagtgcctaagttctatcaaggacacaagaagaaggccaagaagtggggtcaagtaaagccgctaaacaaccagacggttttacgagcggttttgcctaatggatcggctgttttcaggttggatctcaagactcaagttagattcaagattgttttttggaaaactaagaggtatggggttgaagttggagctgatgttgaagtcaacggtgatggagttaaagctcagaagaaaggaattaagatgaagaaatctgattcttcttttccattaagaagctcttttccgattagtgttttgatgaatttactcgtattctttgctattcgttaacttcattaatggtgttgattttcaggtttttcatttcttggttttgttgattttgattattgactatttcatgagttttgttgtgatccttagttccattttcttcattgcataatttatcccttattttttttgttttaactatgtattagtttccatcaacaaaattctatttgaaaatcattttatccattttttat

SEQ ID NO: 600 - DNA, 1500 bp, Arabidopsis thaliana
  Clone ID: ARATH-23APR03-CLUSTER229157_1
atgtgttactgctttgtgcagattgtgggagctgttatatatagtgttctggtggcagccttttatgtattcctcgggtttttcttggggaatcgaatagctgttatcgcgcttctttcggttttctcctctgtggcggtttcggttatagttttattcgttaggtgtactgcgattgatcccacggataagactagtgctaagaaaaagagaaaggataaatccaaaggggtcttgatgaagctgagagtcaaggttgttctgagtcaagttgttgtgaggtttttcaggagattagagaggaaaatcttaaggaattttcttagaagaacttatctggatccatggaaaagcagtgtgcagcttgaaccacttcttccatttccacttgttatgaaagatgatgattctgttacaccagatcctaaagaggaagatgatatctcttattgttcactttgtgatttagaggttaaacgcagcagtaagcattgcaggacatgtaaccggtgtgtcgaagggtttgatcaccattgtaggtggcttaataactgcgttgggaaaaagaattacacgacgtttatacttctgatggttttcgtcttgcttatgctaataatagaaggtggaacagctcttgccgtatttgtcagatgttttgtggacaagaaaggaatggaaatggaattgaagagaaggctttatgtagccttccctcaatgggctcttgctacaatatctattatcttggtcttgttcacggcttatggctcagccgccatggggcagcttttcctcttccatgtagttctcataagaaaggggatgagaacatatgactacatattagcgatgaaggaggagaatcaatttacagaagtggacccttttgatgaattagattcgtcttcagatgaaagctcagattttgattcgcctgaaagattaagaccaacgtttatctccaagtttatgtgcaggaacggacgcgtgggtcagcagagactatccataaaaatagaaggagatgaacagtcaccttcttccacgctgatcaacaagaaaccggggtttcatgtaagcataaacccatggaaactgataacattaagcagtgaaaaggctctacaagcagctgagaaagcaaaggaaagactgaggaagacgaaaccagtttccgggactgaagaaaattcacttaagccacttccattagagaccaaattcggacttttgttagatcctgacaataacaacactgtgttgcaaccatcaacaactgcagcagtaaagcttcaggtttcacctggaagattctcaagcccacgaagaaggttctcaggctcttcatcttcaactgtgccttcgccgaagcaaaaatacagaactaactttgacttgaagctaactgaagtctctagggagctggaaagttacatctcaagacaggttttatgttctgtgataaaacaagatggaagtgaagcatcaccaagataa

SEQ ID NO: 601 - DNA, 938 bp, Arabidopsis thaliana
  unsure (1)..(938): unsure at all n locations
  Clone ID: ARATH-23APR03-CLUSTER229352_1
gnttgctccaagcatnaagtgggtacnccgggtttccccatcncgcngtgtaaaccccgccnggtaantgtaannccccccctanaggcgaatgggtcctttttttttttttttttgggttttgcaaaatttacgaaaatgccactctagagatctcagaaacagaggataacgacagagaaagagatcatgaaagtgtaaagaaggatcaagaacccaaaatagagagcccaatttctcttaaacttgccaaagtagctatcaggtggttcttgatacggaacttccagatcccaagcagcagcagaggcctcatcaccgtcgcctccaccgaggaaatctccggcagcgattcttgacttgatgaaacggagcttgtgagtggcgagaccgagagtgagcttatggcagcgacgctggtacttgaagccgttgatgcaacggagagtttgagcgacggagacgtagaagaagaggtgagagaaggataggaggcagatgggtgcccagcaatggcggcagtgaagacgacctgagggttgagagagggagaagaagattacggcgaggaagatgaagaagagctgaaatagcttgtggagcttcttcttctggtggtcaatggctcgtttcttctctaaggttttctcgaagtggagctggattattgagtttagtgcttgtagagcagtttctttggggatgaaaggttggttattctggtcaatttcgtcgtcgtagtccgccattgaaggactgagaagagagaaaaagtgttattggttagagagatggtttggggattgtgtgtagngaacatgtgggtgtggtntcgtatctctagacaagtattatccatctcaacggtcttgttctgatttttgatgttttgtccgtactcaataaatattttactgggagtaaaaaaaaaaaaaaaa

SEQ ID NO: 602 - DNA, 3111 bp, Arabidopsis thaliana
  Clone ID: ARATH-23APR03-CLUSTER2296_1
ctcctccctcccttctccaattcccaattctcctccaaaccctagggttagggtttccacgattgcttcaccttcccttctttttttaaaacctcagatcttccgcttcctcgttcttgtctttttgttgagctgagaagcaaaaaaaaagtgttctttggcttcacgaggagccaacaacgaatcgatgccggaaatcgatcttatgagagtcgatcattgtgtttccgatgttaaattagatgattcttcttcttctcctccgggattcttcgatggtggtggtgttccgttagattcggatgtgaagttagacgaagaagattccgattctttgaagaagagaggtagacgtggtcgtccgccgagaattttagctaaagcttcttcgcctccgatttcgaggaagagaagagaagatgaagatgtttgctttgtttgcttcgatggtggtagtcttgttctctgcgatcgtaggggatgtccaaaggcttatcacccagcttgtgttaagcgtactgaagcattcttcagatcgagatctaaatggaattgtggttggcacatatgtactacttgtcaaaaggattcgttctacatgtgttatacttgtccgtattcagtttgtaagaggtgtgttagaagctcagagtatgtagttgtaagggagaacaaaggattctgtggaatttgtatgaagactataatgcttattgagaatgcagctgaagctaacaaagaaaaggttcaggttgattttgatgatcaaggcagctgggagtatctttttaagatttactgggtttctcttaaagaaaagctaggtttatcgttagatgatcttaccaaagcaaaaaatccatggaaatcttcttcttctactgccgctaagcgaagaactactagtcgggttcatgaaaaggatgatggaaattctcctggggttatgaaaatacgtcgtgctaaagtaaggaaaatggatgctgtttctgtgagtaatttgggtccttctttggattcaaactgttctttgggtgacagacttccacaattgactagtgctgctacttgggcaaccaatgagcttttggactttgtggggtatatgaaaaacggtgatatttctgtcttatcaaagtatgatgtccaaactctcgtgctagagtatgtgagacggaataatctacaaaactctcctcagaattctgaaataatgtgtgactccaagcttatgagattgtttggaaaggagcgagtggacaacttggaaatgttaaagcttcttgattctcacttcatcgatcaagttaggtctccagtcacagataattcagccggaggagtcactgaaactatgtcttaccaggttaatgcgggcagaagctgtgataggttaaatacatctgaacagcatcaagaaggggaatcacagcaattgaacgggcacagtattcaagttagaccttccagttctgatagcagaaaccatgcagttgtaaaacctgacacaagtgccactctgtccaataagccaattgatggtttggatacaaatatggtatggttatatggagatccagatgggaagattcatggaccattttcgttatataacctgcgacaatggaattcaagcgggcatttcccaccagagctgagaatatggaggttgggtgaacagcaacacagctccatacttttgactgacgcattaaatgggcagttccataaaacagggttattacagaatcattctatccccaagcaggaagtgacagctactatagctaacgatcaaaacaggtctgtggctgttcctaaaatagagagtagaatacttgacttcagccccaactcagtgtgcactgaccagagtgttatttctagcagtaacagtgtcatcacaaggagctcggatgtgagtaacaaaagcggaaacaattgtagccacgccgtgccattggatttttctctttctaatgaaagggatactgtgggttttatctctctctgggacaaaagaaaagttgaaagttctttgcttgtacaaagcccaataagctgttcactctcgctggctacattacctagaaactcaaactgctctctgccaccacatgaaagatggagtgctggtcagacagatggaaacagtgcagcaacgactgcttgcaatcaaaacggtagtcttagcggctcagctgagaaacaagtcacggctacagtccagtcatgtggacagaactggaatgctgcaactccaagcagtgcttcaaatgtgtgggattcgaactcgggtttgacgtctttcccagacaatcaagaaatagactttttagatctctttagtccaactttcaaattcaactttgcatctactaccactgattggcaacccattgtggctggacctgacgaatgcgacgaatcagtctcagatcttttggcagaagtggaagccatggagtcccaaaaacgtcttccttctccaacttcgacattccgtggtcctgaagaattattaatccggcactcaataaacgatagcttcagtcccgcagaaggacatagcccagcactagatgtaagcaaaggtgactccatgagctccacaaacgatcttcaaatgcattcacgatctaacagcaccgtgcatttttagtcgtgggctcgggttcacatagagagaaatcataacctggggcacaggttaccatagatcatccaatgtcctagattcgtctgatcgatggtggactatgccctctttcttctctttttttttgcaggattattacagaacataaataaatggcagaatcatcagcaaaaatgaaaaaaaacgagtggtgcatatgtagaagatgtttcttcgcggtatttttgactgcacccattgttttcttcagtatttaggttttgtaacgttgtcctgtgttaagatttgcacagacatacccaacttctgtatcttttttttttacattgtttgtacttaggaccaagtataaaaatgggaagaaattgttgtccatggatgtaatcaaaacatttgtagggatcagatcatcttattattctatatatatgataatgatagtgtaacgtttc

SEQ ID NO: 603 - DNA, 1049 bp, Arabidopsis thaliana
  unsure (1)..(1049): unsure at all n locations
  Clone ID: ARATH-23APR03-CLUSTER229744_1
ccggagactccacaccggtgggcgggccctcttagaacttaggggtccccccgggctccaggaattcccccgggggccttcccttagaacctctttattggaaaaaatttctcttctctgtttcttcttcttcttcaattttcagatttgatagctctcaaaatcgttaaactacagaaacgaaaaaggaaattgcggcgatctaaggttaaatccatggctgatgcacatttgaagcaaagaggctatatctcggcagttgcagctggactcaatgcagctcttgcagcaatctctgctaagttcttcacatctcttgtgattaagtatggattagttgtaatctgcaatgtggttatgtgggcatgttatgtaaacagtttaagagctttgtcctctctacaagctactgtcacaaactttgctgctaattttctatcttctggtttagctggtctctttctttttcaagaatcgttatcgtttcgttggtttgcgggagctttatcgattactatcggagttcttatcctcagtaagtcgagtgtcgataagaaggtaagctcggattaatggagaatcgaatatgatagcttctgttttggagaaggctgcttttggttgaaaggaattagagatgttaagttgttctgagttttgagttttagaggttaagggaaacattatgttttaagtatgccaatttggttcaaaaaaaaaaaaaaaagcaagcttaatcgaanccccgncgaccntcnaggggggggccccgggcccccaanttcngccctataagnggaggcggattaccccnncctcccnngccccgncggttttaccnaccgncnngantngggaaaacccctngngggtncccccactttaaatcgcccntttgngncannantccccctttttncccnntttggcgnnaaaanncgaaaangggcncgnnnannnnaannnnnnttntccgaaaaaanaggnncccggnccgccgcgcngcgcggggncccccgccnccccacanccccccccccccccccccc

SEQ ID NO: 604 - DNA, 774 bp, Arabidopsis thaliana
  unsure (1)..(774): unsure at all n locations
  Clone ID: ARATH-23APR03-CLUSTER229950_1
gaagaagaagaaaaaaaaagaaaatgatggattctctagctaaatgcttcaacaggcttcaagaaaggtacgacaacgttctagaagcaaaacctatctacagagacgacttagacataacgttgcctctgaacgaatcaaaggaggtttcagtagaatcgaccaaaaagtctcggtgcttgcagagagccaagaggattgacaaatcgctgaggtttgaagaaggcgaagaggaagaagatgaacagaataaaaagcctctggctaagccacgtaaggttgtcaggtttcagttagagaataataagatcttcgagccaaagaagacggtgagttttgatgatgatcacgaactcaaaccaaaggagaatcctctggaagaaaaagagagtttgaaaatggttgaagggaaggaagaggtcgtgagggttaagatcaagatgacaaagcatgaagctcaacggttgttgtcgaaatgcaaaaacgacagcgttttaaagttggagcatcttatggaccagatcgcacacgtccctgttcatcagcttcaagtcgctatggtgatggttggttgtaataatgagcgacaaggaaatggctgctggttatcccagctggaataagttaatcttgagtttttctatcaaattttctagttttagagtagaaactttataaatttacgtttgtatatatattttgtaacagattaatagaagtaacatgattttgtggaacaatttatgatgtcgtctcatctaaganannngngng

SEQ ID NO: 605 - DNA, 4349 bp, Arabidopsis thaliana
  Clone ID: ARATH-23APR03-CLUSTER23008_1
atagatgtgcgtgaaagaggcgcaactataagagaagctgatatgaaactcttcatcacatctccctcaaacttatttctctctttaattggttaaatctccacacccacttcgtgttttcttgattcgtttcctgggtttctcaaaaatctaaccttataattggaaaaattctggtgtcactgctctgggaaaaaaatggatttggagtttgcagttaatggggaacgattcaagattgattctgttgatccatcaacgaccttacttgagttcttgcgattgaacactcctttcaagagtgtcaagctcggctgtggcgaaggagggtgtggtgcttgtcttgtagtgttatctaaatatgatccagagttagatcaagtgaaggaatgttgtataaactcttgtctcactcttctctgtagtgtaaatggatgttccattactacatctgaaggtcttggaaacacgaagaaaggatttcatccgattcataagcggttcgcgggttttcacgcctctcaatgcgggttttgtacaccagggatgtgtatttctctctactcatctcttgcaaatgctgagaataacagctctaaagattttacggtttctgaagctgagaaatctgtttcgggtaatctttgtcgatgtactggttatcgtcccattgtcgatgcttgtaagagttttgcttctgatgttgatattgaggacttagggttaaattccttttggaaaaaaggagaaagcaaagaggttatgttgaagaatttgcctccttataaccccaaagaccatcttgtaacattccctgagttcttgaagaagaaagagaaggttgataatggttcggatcatttgaagtatcgttggaccactccttttagtgtggctgagcttcataacataatggaagcagctaactctggagactcgttgaagttagttgtaggcaacacgggtacaggttactataaagacgaggaacggtttgatagatatattgatatcagtaacattccggagatgtcaatgatcaagaaagatgagaaaggaattgaaataggagcagctgttactatatcgaatgctattgatgctttggagaaggaaagcaaatcttcttatgttttcaagaaaatggccactcatatggagaaaattggcaaccgttctatccgaaactcgggtagtattggtggtaatctagtgatggcacagagcagaaagtttccttctgatgttaccactttgttgctcgctgtagatgcctcggtgtatatgttaaatggtaggaaaaccgagaaggttacgctacaggagtttcttgaattgtctccggtgttagactccaaacgcgttcttttaaaggttgagattccatcatggactgctccttctggtgatgacactgaatttctctttgaaagctatcgagccgcacctcgttctattggaaatgcattgccttacttgaacgctgctttcttggcgctagtgtctcgccaagaagcatcaagaaaaggtgtaacggtagaaaaatgcttcctggcatttggttcttatggcggggatcattcgatcagggcgatagaagtggagactttcttgacaggtaaattacttagctacagtgttctatatgaagctgttggtttacttaaaggaatcatagtccctggcaaagacaccttgcactcggaatatagaaaaagcttggctgttggatatctttttgagtttttttacccactgatcgagagtggccatagaatatgtagtcttgattcagggaataagcataacaacagccatgttgataccgtaaaatctcttcccttcctctcatcttcacagcaagtattagagagcaatgaatttaaacctattggtgaagcagttatcaaagttggagctgccttacaagcttctggtgaggcggtttttgttgatgatataccgactttaccagactgtcttcatggagcattcatttatagcacagagcctttggctaagataaaaagcttaagcttcagagagaatgtaactcctactggagtttttgctgttcttactttcaaggatattccacaacaaggacaaaacattggttccaagaccctttttggaccaggacctttatttgcagatgaactaactcgatgtgcaggtcaaagaattgctcttgtggttgcagacacacagaaacatgcagacatggctgcaaaacttgcagtagttgagtatgatacaaagaatttagaacaaccgatattaactgtcgaagatgcagttaaaagatctagctttttcgaggttcatccgatgttttaccccgaaccagtaggtgatgttataaaaggaatggaagaagctgagcgaaagataatctcctctgagttgaggctagggtcacagtacttcttctatatggagccacaaacagcacttgccttgccagacgaagacaattgtgtcaaggtatttagttcatctcaagcacctgagtacgtacattcggttattgctacatgtcttggcattcaagagcataacgtgagagtcatcactagaagagttggtggtggctttggtggtaaagctgtaaagtcaatgcctgttgcaaccgcatgcgcactaggcgcatacaagttgcaacgtcctgttaagatgtttttgaaccgcaagacggatatgataatggctggaggaagacatccgatgaagataaattacaatgtgggatttagatcagatgggaagctcacagcactggagcttacaatgcttatagatgcagggcttgagccagacgtaagtccaatcatgccgcggaatataatgggtccgctgaggaagtatgactggggagctttgtcatttgatgtaaaagtgtgtaagacgaattgtctgagtagaacagcgatgagagctcccggggaagttcaaggttcttacatagcggaatccattatcgagaatgtagcttcttctcttcaaatggatgttgatgcagtgagaaaaataaaccttcatacttatgatagccttagaaaattctacaatcacattgctggtgatcctgatgaatatacactgcctttattatgggagaaacttgagatatcttcaaagttcaaggaaagatctgagatggtgaaggagtttaatctttgtaatgtatggcgaaagagagggatttctcgagtacctatagtccatcaagttatgcagagaccgaccccggggaaagtaagcatactgagtgatggttctgttgtagttgaggttggaggaattgagatagggcaaggattgtggactaaagtacaacagatggttgcttatggtctcggtatggttaaatgcgaaggaaacgaaaagctcttggatagaatacgtgtagttcagtccgatacactaggtatgatccaaggaggtttcactgctggtagcacgacatccgagagcagttgtgaagccgttaggctttgctgtgttatcttggtggagagattgaaacctataatggatcagatgatgatggagaagtcaggttccgtgacatggaacatactcattcaacaagcgtatggtcagtatattaatttatcggcgagtacattgtataagccagagtattcttccatggaatatctcaactatggagttggagtcagcgaggtggaagtggaccttgtgacaggaaaaaccgagattttaagatccgatattatttatgactgtggaaagagtcttaatcctgcagttgatttaggacagaccgaaggagcatttgttcaaggcatcgggtttttcatgatggaagagtacactactgatgagaaggggcttgtggtgcaacaaggcacttgggactacaaaataccgactgtggacacaatcccaaaacacttcaacgttgagattgtcaacactggtcatcataaaaaccgcgttctctcctccaaagcgtcgggtgagccgccattgcttttagcagcttctgttcattgtgcaacaagatcagccattagggaagctcggaaacattccctttcatcgaacttcattgatgggtctgattcggaatttgagttacctgttccagcgactatgcctgtggtgaagtctctttgcggattgtatagtgtagagaaatacttacaaggaaagatcaaaggacaataaaggcaaagcaagtaagcaactctcgttgctgctaagttacagtgttacatatactaaagttattcagattttatatacagcaaaaataattgctttgtgcataactaatggtttcaaaaccgcatcaatcctgcgaccggggggtctctttc

SEQ ID NO: 606 - DNA, 1489 bp, Arabidopsis thaliana
  Clone ID: ARATH-23APR03-CLUSTER23028_1
ctctctcgctttctctctataaaaagctcctctttcttcaccataactcttcaaactttactttcttacagaacaagaacataaatatcttaaactcatgtctgaatgtggatgtttttcggcaacaactatgttgagaatttgtgtagtattgataatatgtttgcatatgtgttgtgcctcgagtgattgtacaagtcacgatgatcctgtgtctcaagacgaagcagagaaagcgacgaagctaaagcttggttcgatagctttacttcttgtagccggaggagtcggcgtgagtctaccgttgatcgggaaaaggattccggcgttacaaccggaaaatgatatcttcttcatggtgaaagcttttgctgcaggagtgatcctctgcacaggtttcgttcatatcttaccagacgcgttcgagagattgagctctccatgtcttgaggacactacagctgggaagttcccgtttgctggttttgtagcgatgctgtcggcgatggggactcttatgatcgacacattcgcgacagggtattacaagaggcaacattttagcaataaccatgggagcaagcaagtgaacgtagtagtagatgaagaagagcatgcgggtcatgttcacattcacacgcacgctagtcacggacacacacatggttcgaccgagttgatcagaagacgtatagtgtcgcaggtgcttgagattgggatagttgtgcattcggttattatagggatatcacttggagcttcacagagcatagacaccataaagccactcatggctgcactatctttccatcagttctttgaaggtcttggcctcggtggatgcatctccctggcggatatgaagtcgaaatcgacagtgctaatggcgacatttttctcggtgacggcgccacttgggataggaatagggttggggatgtcaagtggtttaggctacaggaaagagagcaaagaggcaataatggtggaaggaatgttgaatgctgcatctgctgggatactcatatacatgtcacttgttgatcttcttgctactgattttatgaatccaagattgcaatccaatctctggcttcacttggctgcttatctctctctcgtcctaggcgcaggttccatgtctctcctcgccatctgggcctgattcttgatctgaaactaacaaacaaacaaaccaaatgccgctcttttttctcaaatctgtaatggtgtttctaatctcagaatcaatactattctatcttgaacacaatgactgcctttgatagatacaaacaatagttaaaggcagagaggccagctaataatccgcattcattgattcgagggactgctttttgggagaaaaagagaaaaggtaatgagcatgataggaagcatcaatcattctatgtaatgagcatattccaactgtaacatcatacatacatttcacatctatattaaaaaaaaaaagatcatcactttc

SEQ ID NO: 607 - DNA, 3576 bp, Arabidopsis thaliana
  unsure (1)..(3576): unsure at all n locations
  Clone ID: ARATH-23APR03-CLUSTER23063_1
ctttcactcttcccttctctctccccaaaataaatcagaaacctatcaacattcttcaacagccacaagtaaaatttatagacatttctgtctgaagaagaaaaagattgaatttttttgcttgttgtgggttctttaatggatccaagaacaagacttgactatgctctgtttcagctcacaccaactagaacaagatgtgatcttgtgatattctctggtggtgagaatgagaaacttgcttctgggatttttcaacctttcgttacgcatctcaagagcgttagtgatcagatttctaaaggtggatactccgttactctccgtccttcctccgttggtgttccttggtttactaaagtgacccttcagagatttgtgcgatttgtgactactccggaggttcttgagaggtctgtaacattagagaaggagattgagcagatcgaggattcgattcaagctaatgcagccgccattgccggtgaagctgaaggaaacgagttgggtggtacatggacttctcaaaagtctacggctttatcaaagacgaaaggggaaactgatggagacactgtggaagaaaattcgaaggttggtcttcagcgtgttctggagaaccgtaaagcggctttgtgcaaagagcaagcgatggcttatgctcgagctttggttgttgggtttgaacttgactacatggatgacctcttttcgtttgctgatgctttcggagcttcgcggttaagggaagcgtgtgttaactttgtggacttgtgcaagagaaagaacgaggatagaatgtgggtggaccaaatcactgctatgcaagcatttcctaggcctgaattaacgttcatgggtgactctgggatcgtactcgctggtgaagagaatgatttgttgaatgctacaaacgtaaagcatggaaactctatggatgcctcgagccagggtagctttgagactggccaagaagggagagctcaaatggcaatgccgtggccaaaccagtttcctcagtacatgcagaactttcaaggacatgggtatccgcctccttatatgtttccggggatgcaaggtcaatcaccatatttccatgggaatatgcaatggcctgtaaacatgggagatgtggagtcaaatgagaagtcttccaagaagaaaaagaagaagaagaagaataagaagaagtcgaagcaagatgaatctgccgagccaagcgataattccagtactgagaccgaatcagaagacggaaatgaaggaaagaaacaatccaggaaagtggttatccgcaacataaattatataacttcaaagaggaatggagcgaaggagagtgattcagatgagtctggagaagaagaagggtttgtggatggagattctattaagcagcaagtagaagaagccattggctcagtggagagacgtcataaatcgacttcacaccgtcagaggaaacacaaaagtcacaacggtgatgatgattcaagtaacaaggaaactaaggggaatgataattgggatgccttccagaatcttcttttgaaagacaatgattcagagccagaagaattactacgtatatcatcaactgcgttaaatatggcgtctgaagttgtgagaaagagagaaccgccttctgatgattcattcttggttgcaattggaaatgaggattggggaagagaaaccagcattgagaaattcaatgcaggtgagaatgttcggataataaggaaagggaacaactatgacgaggagatgttgaatccgggtagaagcgatgaatcaagaagctattcgcaggcagagatgtcggttcatgatgggaagctcagaaccagaaatgaggcggaagaagactggttcatacgtaaccaagctggtccagaaacagatccaagtcttgtcaaaacatttgtaggagaccatttccacttaaataagagcagtgagagagatgtcctgaccgatgactctttcatgatccattctcgtgttgagaaccaagtagaagattctcggttaaggacagaaatcatggacttagacgtttacggaaccacccaacaagaaaacagtgccccggagaacactccgcatgaaccagatgacctatacatggttcttggacgggaacaagatgttaaacctacattgttaccatggacccctgaaattgactttgagactaacactttggctcaaagaacaagcagaatcgatttgataactgccacaaaggcctctgcaggtgaacaaaccttagatggtaaagaaaagaagagtcgtggtatctccaaggggaaggatgcaaagtcaagagcatcaagtagacctgacccggcgtcaaaagccaagagacctgcttggggaagtagagctgctgtctccaagtccaaatccgagatggaggaagagagaaagaagagaatggaggaacttttaattcagaggcaaaagagaattgcggagaagagttccggtggtagtgtatcaagttctttagcgtccaagaaaactcctactgtgaccaagtcagtgaagagctcgataaagaatgagaagactcctgaagccgcgcagtcaaaggctaagccagtactgagaagttccaccattgagcgccttgctgttgctcggaccgctccaaaggagccacagcaaaaaccagtaatcaaaagaacatcaaaaccttcaggatacaagacagagaaagctcaggaaaagaaatcgagtaaaataggtcaatcagatgcgaaaagtgtggaactttctcgtgacccgagtctcgaaatcaaggaaacggtggtggaagattcacattcttacttgtcagagaagcaagttgatgcacttcctgctgttgcttctgttgatgatttcaaagacattaaagaattgcatagcttgccatcagaagaaacggccagagtaaagaacagaccgaatgaaatcatagcagagaaagtacaagatcagacgaagatcgatgatcaggaaacagtgaagaatacatctgtttctgaagataagcaaatcaccacgaagcattactcagaggatgttggagaagtccaggcttcacaggaaaaaccggtgtctccaaagaagtcggtgactttttcagagacaaacatggaggagaagtattatttctcaccagcggtctcagagattgacatctcaacgccacctgctactgaagcagatcattcgaggaagaaatggaacagtgaagagacgtctcccaaggcaacggctaaagtcttcaggaagcttcttatgttcggaaggaaaaagtaaaaccgacgttggaattcttcttctccggcatcatcgaacctttgttttgagacgacgtcatgttgagttcagttaaaaagcctctcttattctttaaatttttccttgtgtgatattaaatactgtttttcattttattgttgttatcagtttgatttgtctgtttatattacatttgttgatgtgttgtttatagcattgaaagtgggcatttgagtgtgtataaaaaattggtttggtgaaaaaaaaaaaaaaaaaanc

SEQ ID NO: 608 - DNA, 953 bp, Arabidopsis thaliana
  unsure (1)..(953): unsure at all n locations
  Clone ID: ARATH-23APR03-CLUSTER231024_1
ccccggtaatacgactcctataagggcgaatgggtaccggccccccctcgaaggtcgacgtatcgatagctttttttttttttttttgaaatctaaaatcatttatatatgaaactcaataaccgattttacaaaaaaaaaagtttcttcagtaaacgaaatattcagctgaagatgagggaaatagagcacaacattactcttattcatcaatctcaacaccacatgagagaagtcttcacttcttggtggttacacgaaggccagcagcaggaaggtcccggtacaacttgcgtataggcttccatttactgttctctaatgcctcacagtgcggtgtagcaaaactagccgtccaatatgcacaaggcgcaaccacatcgcagacataacagtaacactgattacaatgtgatgagtgttgacttgattcaaaggggaatttcaagcagagatgccttggatgtggaaaatccctacaagccacctggcctttctcatggacaatcgccacgtcgtcgtcacattcagatgcagggctatcggagagctttcgtgcatcaaatgaatcgttgggatcgaaatcgaggataaagcaatcctctttctcttcgaaaatcttcatatcttgtcgtgttttgagacaaaatatacctctgagaggtgttccctcttcttcttcttcctcctccttactaagtctctttcttcgcttgcttttcgttttcttctttgtctcacatggatctggtgtgatacccactacaactcttcgctttctcaccatttttttccttcctacgactgtaaagtttcgatctttttgttgcttttattgaaagagttgttcgaaattcgcaaatgaccgttgttgttcctacacaagcaccccaagcttttttgattagatggtctagggaaagggcctcggcgaatccggcaancccggggaa

SEQ ID NO: 609 - DNA, 2067 bp, Arabidopsis thaliana
  unsure (1)..(2067): unsure at all n locations
  Clone ID: ARATH-23APR03-CLUSTER2310_1
atcatngtcctctctgnttaaatcaggagaaagctcacgagaatccctcttcagatcagaacaccacaaaacatggctgcgtgtacactccacgcgctctcagtcaccttattcctccttctcttctttgccgtgtcaccggcgaaagctcagcaaccgtacgtcaacaaccaccagctcgcctgcgaggtccgtgtctacgacaacataaccaacggattcacatgtaacggcccaccttcttgccgctcatacctcactttctggtctcaaccaccgtacaacacggcggactcaatcgccaaactcctcaacgtctccgccgcagagatccaatcaatcaacaacctccccacagccaccaccagaatcccaacccgtgaattagtcgtgatcccagctaactgctcctgctcctcctccagcggaggattttaccaacacaacgccacttacaatctctccggtaacagaggagatgaaacctatttctcagtggctaacgatacttaccaagctttatccacgtgtcaagccatgatgtcacaaaaccgttacggcgagagacaactaacccccggcttaaacctccttgttcctctccgatgtgcttgtcccaccgccaaacaaaccaccgccggatttaaatatctcctgacttacttagtcgccatgggagatagtatctccggcatcgccgagatgttcaacagcacatccgccgccataaccgaaggtaacgagcttacatcagacaatatcttcttcttcacaccggttctagttcctctcacaactgaacctaccaaaatcgttatatctccgtcgcctcctcctccacccgttgttgctacgccgcctcaaacgccagttgatcctccgggatcttcttcttctcacaaatggatctacatcggaattggaatcggagctggtttgcttctcttactctcaatcttagctctctgcttctacaaacgaaggtctaagaagaagtcattaccgtcgtcgttgccggaggagaacaagctctttgattcatcaaccaaacaatctattcccacaacaacaacgactcaatggtcaatagatttatccaattcatcagaagctttcggtttaaaatccgccatagaatctctaacactatacagattcaacgatcttcaatcagctacttcgaatttcagcgacgaaaacagaatcaaaggctctgtttatcgcgcgacaatcaacggcgacgatgccgctgtgaaagtgatcaaaggagatgtttcttcctctgagatcaatcttttgaagaagctaaatcattctaatatcatccgtctctcaggtttctgtatccgtgaaggaacatcgtacctcgtcttcgagtattcagagaatggatcgatcagtgattggcttcactcgtcgggcaagaagagtttgacatggaaacagagagttgaaatagcaagggatgtggcagaggcgttagattatctccataactatataactccacctcatattcataagaacttggaatcaacaaacatacttctggattctaatttcagagccaagattgcgaatttcggtgttgcgaggattcttgatgaaggtgatcttgatcttcagttaacaagacatgttgaaggaacacaaggctacttagctccagagtatgtggagaatggagtcattacttcgaaactagacgtgtttgcttttggagttgcggttcttgagcttctttcggggagagaagcagtaacgatacataagaagaaggaaggagaagaagaagtggagatgttgtgtaaagtgataaacagtgtgcttggaggagagaatgtgagagagaagttaaaagagtttatggatccatctctagggaatgagtatccgttggagctggcttacaccatggctcagcttgctaagagctgtgtcgcaactgatcttaactcgcgtccatctgtcactcaggttctaaccacgctctcaatgatcgtctcctcctccatcgattgggagccttctgatgaccttcttcgttccggctctcttggcaactag

SEQ ID NO: 610 - DNA, 1236 bp, Arabidopsis thaliana
  Clone ID: ARATH-23APR03-CLUSTER231_1
tgagcgctctcttttgtctcctctgcttttttctcttctctcctcagagattcgaagctttttgtctcccctgagtaaccaaattcaatggccgacgattgggatctccacgccgtagtcagaggctgctcagccgtaagctcatcagctactaccaccgtatattcccccggcgtttcatctcacacaaaccctatattcaccgtcggacgacaaagtaatgccgtctccttcggagagattcgagatctctacacaccgttcacacaagaatctgtcgtctcttcgttttcttgtataaactacccagaagaacctagaaagccacagaaccagaaacgtcctctttctctctctgcttcttccggtagcgtcactagcaaacccagtggctccaatacctctagatctaaaagaagaaagatacagcataagaaagtgtgccatgtagcagcagaagctttaaactccgatgtctgggcatggcgaaagtacggacagaaacccatcaaaggttcaccatatccaagaggatactacagatgtagtacatcaaaaggttgtttagcccgtaaacaagtggagcgaaatagatccgacccgaagatgtttatcgtcacttacacggcggagcataatcatccagctccgacacaccgtaattctctcgccggaagcacacgtcagaaaccatccgatcaacagacgagtaaatctccgacgaccactattgctacttattcatcgtctccggtgacttcagccgacgaatttgttttgcctgttgaggatcatctagcggtgggagatcttgacggagaagaagatctgttatctttgtcggatacggtggttagcgatgatttcttcgatgggttagaggaattcgcagccggagatagcttttccgggaactcggctccggcgagttttgatctctcttgggttgtgaacagtgccgccactaccaccggaggaatatgattagattacgacggcttagaatactcttattaggacagatttataggattaaggaattattctcggagcatatgtaaaaataggataaaagaaaatgttctttgttactttttttcgggttttcttcctattgtttctaaacatcttagaaaaaatttaattgtatattccttaagctcgatacatcttgtttaactcgagtacgatttacttatggagttatggtctttgtctcgaaaaaaaaaaaaaaaa

SEQ ID NO: 611 - DNA, 2077 bp, Arabidopsis thaliana
  Clone ID: ARATH-23APR03-CLUSTER23223_1
agcaaggttactgcaaggttaaagcgggaagtgagcaacgagaggcagcggcggccgtcatggattcatcggcgaacataaacaaagctctaacggagacgcgtttctccgacctcgaacctccactctccggagatatcattgaggctcttaatcagtctgatttcgagttctgcactccggttcaagccgcgacgatccctttactctgtagttacaaggatgttgccgtcgacgctgccactggttctggaaaaaccctagctttcgtcgttcccctcgtagaaatcctccgtcgatccacctcattccctccgaagcctcaccaggtcatgggggtgattatatcgccaacgagagagctatcaacgcagatatataatgtcgcacaaccatttgtttcgactttggcaaatgtgaactctgtgttgcttgttggaggccgagaggtgaaagctgacatgaagattattgaagaagaaggatgcaatgtcttgattggtacacctggaagactttctgatattatggaacgaatggagattctggattttcgaaatcttgagattcttattctagatgaggcagataggcttttggagatggggttccaaaggcaggtgaattacattatctcacgcttgccaaagcagaggaggactggcctcttttcagctacacaaacagagggcgttgaagagctcgccaaggctgggcttaggaaccctgtgagagttgaagttcgagctaagtcgaagtcggaatcatcccagcaattgacaaactcgaaaaccccttctggtcttcatcttgagtatatggaatgcgaagcagataaaaaatcatcacaactagttgatctcctcatcaagaacagtgataaaaagcttatagtattcttcatgacctgtgcttctgttgactactggggactcgtactttcaaaaattcctgccctgaagtccatatctttaattcctatccatggggatatgaagcagaatgcaagagacaaggcattagcttcgtttactaaagcatcaagtggtgcccttctgtgcacagacgttgctgcacgtggacttgatattccaggcattgattatgttgttcagtatgatcccccacaagacccaaatatgttcaaccacagggccggcagaactgcaagattaggaagacaagggagggccattgtgtttttactgcccaaggaagaagcctatgtagagtttatgcgcataagaagagtccctttggaagagagaaaatgctctgaggacgcatccgatgtcatcccgattatacgttcagctgccatgaaggaccgagcagtgatggagaagggattaaaggcatttgtttcctttgtccgtgcttataaggagcatcactgctctttcattttcagatggaaagaccttgagattggaaagttagccatgggatatggcctcttgtatcttccttcaatgtctgaagttaaacaacacagactttccagtgagggtttcacaccagttgaaggtgtcaagtttgaagaaataaaattcaaggacaaatatcgggagaaacaaagacagcaaaacttacaagtaaggaaagagaaacggcaagaagagaaaaaagagaaaggcaagagaaaaagggttgatgcttctgctagtaatgatcctaagaaagcgtcgagaaagttaacggggaaacaaagacaaactattcaaactgctgaagatgaagaagtgatggatcgagattataagttgatgataaaagtaaagaaagggttaattaaagaagatgaatatgaaagacttacaggagatgatgatttattctgatgagaagaaacaaaacctgcatgctgagattggactaagcttagtgtctttctactctcatatcatatgtgattctgttaattttttttttttttttgggtgagaattaatatcggatcatgttatgtcctttttcgttctacgagtctcacttttatatcaaaaaaaaaaaaaaaatagcaaaaaaatggggaaaaaaaaaaaaaaaaaaaactcgagactagttctcctcgtgc

SEQ ID NO: 612 - DNA, 930 bp, Arabidopsis thaliana
  Clone ID: ARATH-23APR03-CLUSTER23235_1
aatttttcttcttcttctccatccatataaagaagaagaaagagatgagatgcaaggtagtatatgcagcaagaacaacaacaagaaccaaagaaacaaaaacaatctctaaaaccatatcaatgggactacaaggtcagctctccgacgtgtcatcagattcgatcccactgatgctactggctctcctcgcaactttcttcagacacgtccggtctcttctcctcttcccttcttctgcccccgttgttgttgttacttcaaacctcagcgtcctcgccgaccagctcaacctaaatcgcctcttctcgtaccgctactccgacaacgcagcctctgactgcatcgtgtgtctgtctaaactcaagaccggagaagaagtgaggaagctagattgcagacacgtcttccataagcagtgtttggaaggctggcttcaacatctcaacttcaattgcccgctctgtagatctccattgctacctcatcatcatcagggacatggcagtgatgcgtcgatctcagccttccctcttcgctctacctctactgcatcatctcattgatttttatgtgaagaaagaagaaagaagaaagcaagagagaagaagatggagggaggatgcttttttatttatcttccttctcctctttcctttttaggagaagattcttatttcttactacagaagattgattcttcttatatatctatatatataaccttctatatttagctatgtttttgaggaatctcagatcggaagagaggtccttttgtttttcagatttccactctgtaaattcttagtatgaaaagaatcaaattaagcttcatgtaaaaaaaaaaaaaaaaatcctccttggctggtaaatctttttgtagtatatttgacaaagcctactactatttaattttgcattctagac

SEQ ID NO: 613 - DNA, 1333 bp, Arabidopsis thaliana
  Clone ID: ARATH-23APR03-CLUSTER2323_1
gaaaagggattcatttgttgtgtgtgtctttctctttcctctatataccggccctcctcaccggcatccgcttcgctcgtaacatttccacaactgtagccaaacttttgtgttctgatagtgatgatcatgatcatcacatgaataagtagaagatatctcttaccttctccttcttctaataagatcagagttttggttcttatttctttgctctcaaaacaatgggtagatcaccgtgttgtgacaaattgggtttgaagaaaggaccttggacaccagaggaggatcagaaacttttagcttatattgaagaacatggtcatggaagttggcgttcattgcctgagaaagctggtctccatcgatgcggaaagagttgtagactaagatggactaactacctaagacctgacatcaaaagaggcaaattcaacttacaagaagaacaaaccattatccaactccatgctctgttaggaaacagatggtcagcgattgctactcatttgccaaagagaacagacaacgagatcaagaactattggaacactcatttgaagaacggttagtgaaaatggggattgatccagtgactcataaacccaaaaacgagactcctttatcttctcttggtctatccaagaacgcagctatacttagccacactgctcaatgggaaagtgcaaggcttgaagctgaagcaagactagctagagaatcaaagcttcttcatttacaacattaccaaaccaaaacatcatctcaacctcatcatcatcatggattcactcacaagtcattgttacctaattggacaacaaaaccacacgaagatcaacaacagcttgaatctccgacatctacagtgtcattctctgagatgaaggaatcaatcccggcgaagatagagtttgtcggatcatcaactggtgtgactctgatgaaagaacctgaacacgattggatcaattcaacgatgcacgagtttgaaactacgcagatgggagaaggaatcgaagaagggttcacgggtctcttgctcggtggtgattcaatcgaccggagtttctccggcgataaaaacgagacggccggcgagagtagtggtggtgactgcaactactatgaggacaacaagaactacttggacagcatttttaactttgtagatccttcaccgtcggattcaccgatgttctgaatctaagggttgatatttgttgggaatgtttttgattcttttttagtttctagtttttgtgcttaaactctgattagacaatttttaaactaatccaatttttgcgctttaaaaaaagggcggccgcaa

SEQ ID NO: 614 - DNA, 1699 bp, Arabidopsis thaliana
  Clone ID: ARATH-23APR03-CLUSTER2329_1
atataatccaaacaccaaaaacaaaatggagaaattgctcgtgatctctttgctactactgatctcaacatcagttacaacttcacaatccgtgaccgatccaatagctttcctccgatgtctcgatagacaaccaacggacccaacaagtcctaactccgccgttgcttacatcccaacaaactcttctttcaccactgtcctccgcagccgtatacctaacctccgtttcgacaaacccactactccaaaacccatctccgtggtggctgccgccacgtggacacacatacaagctgctgtaggatgcgcacgtgagctctctctccaagtcaggatcagaagtggtggccacgacttcgaaggactctcttacacttccaccgtccctttctttgttctcgacatgttcggttttaaaaccgtggacgtaaatctcaccgagagaacggcttgggttgattctggtgctaccctcggagagctttactatagaatctctgagaagagcaatgttcttggatttccggcgggtttgtctaccacattgggcgttggtggacactttagcggcggaggatacggtaatctgatgagaaagtatggtttgtcggtggataacgttttcggctccgggatcgttgattcgaacggaaatatcttcaccgatcgggtttcgatgggggaagaccgtttttgggcgattcgtggaggtggtgcagcgagctacggtgttgtcctcggctacaagatccagctagtaccggtgcctgagaaagttacggtttttaaagtcggaaaaactgtcggagaaggagccgttgatcttataatgaagtggcagagttttgctcatagtacggatcggaatttgttcgtgaggttaactttgactttagtcaacggtacgaagcctggtgagaatacggttttagcgactttcattgggatgtatttaggccggtcggataagctgttgaccgtgatgaaccgggatttcccggagttgaagctgaagaaaaccgattgtaccgagatgagatggatcgattcggttctgttttgggacgattatccggttggtacaccgacttctgtgctactaaatccgctagtcgcaaaaaagttgttcatgaaacgaaaatcggactacgtgaagcgtctgatttcgagaaccgatctcggtttgatactcaagaaattggtagaggttgagaaagttaaaatgaattggaatccgtatggaggaaggatgggtgagatcccgagttcgaggacaccattcccacatagagcaggcaatttgttcaacattgagtatatcatagactggtcagaagctggagataatgtggagaagaaatatttggcactcgcgaatgaattttatagattcatgaccccgtacgtgtctagtaatccgagggaggcgtttttgaattaccgtgatcttgacatagggtcaagtgttaagtctacgtaccaggaaggtaaaatctacggggctaaatatttcaaggagaatttcgagagattagtggatattaaaaccacgattgatgcggaaaacttttggaaaaacgaacaaagcattccggttagaagataatacgtacgagatgaatgttgtgagttgtgaagttatgatcctgtgacatgaaaagaaaagaaagaaatgtattaaaatctttggtttgat

SEQ ID NO: 615 - DNA, 1221 bp, Arabidopsis thaliana
  Clone ID: ARATH-23APR03-CLUSTER233347_1
acaacaacattgaaacccatttcttcgcctttaaccttacttgaatttttgtgtgggtcctttttttttctttctccaagccattgaataaaaaggcagagaaaatggagttttttggtaaaatgataatttcattgagtcttattatgatgataatgtggaagagcgtggatggttacagtagtggttgggtcaatgctcgagccacattctatggaggagctgatgcttctggcaccatgggcggcgcgtgtggttacggaaacttatacagtcaaggatacggcactaacacggcggctctaagcacggctctattcaacggcggccaaagctgtggtgcttgttttcagataaaatgcgtaaacgacccaaaatggtgtatcggtggaacaatcaccgtcaccggaacaaacttttgtccacccaactttgctcaagccaacaacgccggaggttggtgtaatcctcctcaacaccacttcgatttagctcagcccatcttcctccgtattgctcaatacaaagccggcgtcgtccctgtccaataccggagagtggcttgccggagaaaaggaggaataagattcacgatcaacggtcattcatacttcaacctcgtacttataaccaacgtcgccggcgccggagatgttatctccgtctccattaaaggaaccaatacacgttggcaaagcatgtcaagaaactggggacaaaactggcaaagcaatgcaaaacttgatggtcaagctttgtcctttaaagtaacaactagtgatggccgtacagttatatctaacaatgctacaccacgtaactggagctttggacagacttataccggaaaacagttccgggctcagaggtgatgatgacgtggactgtctggagggaaaaaaaaaagttttacttattactgattttggagttttctagagtttgcatagtttgaaaaaagttttcaggaattaaccctaatcaaaataaccaatttctaaatggcggaaatcgaggttttttctcactggcagcttttgtaattcgccggtgagactgaggtgttttcacccgccgcctgagtgattgagttttttttttttttttttttgtactttgtttggcttttaagatgttcaatggtctgtttctttaagacattgtctactgaaataataataaaatcaagttaatttataatttttaaaaaaaaaaaaaaaa

SEQ ID NO: 616 - DNA, 3572 bp, Arabidopsis thaliana
  Clone ID: ARATH-23APR03-CLUSTER23428_1
atggattttgcgtctagcgttcagcgccagagtatgtttcacggtggtgcggattttgcgagttactgcttgccgaatcgaatgataagtgcgaaactctgtcccaaaggactcggcggcactagattttgggatccgatgattgattctaaagttcgctcagctattagatcgaaacgaaatgtatcgtatcgttcttctttgactttgaatgctgatttcaatggaagattttacggtcatttgcttcctgcaaaaccccaaaatgttccgctggggtttaggttactttgtcaaagtagcgattctgtaggagatttggttgggaatgaccggaatttggaatttgccaaggcatcgtttaataaatcctcccgtttcttttctgcatctttcttctcttctaatccagatgggaccgcgacagtgtttggtagtctggttggttctgtcaaacagcaatggcccaaactagttcttgggcttgctcttcttggagcaggactgacattatactccaatggagtaggggggaacaaccagttgcttcaacagccagatgttaccagcactagtacagaagatgtctcttcaagtacgaagccactgatccggcaagtgcagaaacttcccaagagaattaagaaactacttgagatgatccctcaccaggaggtcaatgaggaagaagcttccctctttgactttttgtggttactgctagcaagcgtcatatttgtgcctctatttcagaaaattcctggaggcagccctgttcttgggtatttggcagctggaattctgattggtccgtatggtctttcgataatccgtaatgtgcacggaaccagggccatcgcagaatttggagtagttttgttgcttttcaacatcggccttgagctatctgttgaaagactgagttccatgaagaaatatgtttttggattaggctcagctcaggttctggtgacggcagcagtagttggattgcttgcccattatgttgctggtcaggctggtccagcagcaatagtgattggaaatggcctggctctgtcgtccactgctgttgtccttcaggttctacaagaacgaggcgagagtacatctagacatggaagggcttcattttccgtcttgcttttccaggatctagctgtagttgttttactgattctcatcccacttatttcacctaattcatcgaaaggagggattggatttcaagccattgctgaagctcttgggcttgctgcagtcaaagcagcagtggctattactgcaataattgctggtggccgtctacttcttcgaccaatctacaagcaaattgcagaaaatcgaaacgccgagatattctctgccaacacgcttctcgttattcttgggactagtttactgacagctagggctggactttccatggcattaggagcgtttttggctggtctactccttgcagagacagaattttcgttgcaagtagaatcagatattgctccatatcgtggtcttctgttgggactcttcttcatgacggttggaatgtcaattgatccgaaattacttctctccaacttccctgtcatagtgggaactttgggactcttgatagtgggcaaaactatgttagtcgtgattatgggaaaattgttcggcatatcaataatatctgcaattcgggtcggtctactattggccccaggcggagagtttgcatttgttgctttcggagaagctgttaatcagggtataatgtctcctcagttatcctcgttgctattccttgtcgtgggaatctcaatggctatcacaccctggttagctgctggtggccagttaattgcatctcgttttgagttgcatgatgttcgaagtttattgcccgtcgagagtgagacagatgatttgcagggtcacataattatttgtggatttggtcgagttggtcagataattgctcaacttctctcggaaagacttatcccatttgttgcccttgatgtcagcagtgatagagtgactatcgggcgttccttggatcttcctgtttatttcggagacgctggtagtaaagaggttctccacaaaattggagctgggagagcatgtgctgctgtggttgccttagacgcaccaggagcaaactacagatgtgtttgggctttgagcaagttttaccccaatgtcaaaacttttgtccgtgctcacgatgttgttcatggtcttaatctagaaaaagccggtgctactgcagttgtcccggagactctggagcctagtctacagttggcagctgctgttcttgctcaggcaaaattaccgacatcggaaattgcaaacacgattaacgagttcagaacccgtcacttgtctgaactgaccgagctatgtgaagcaagcggaagctctctaggctatgggtactctaggacgagtaagcctaaacctcaaccatcggatgcatctggcgataaccagataatcgaaggaggcacagtcgtaatctgatgacgttctccattctggtgagaaaaagaagagtatttctcctttggtgttcttcttaaaccaccatcaccaacttgggttgcagtgcgtggtgaagtgatggatccatcagatgatgtgtagtgtgactaatatattcattatatgttcagtacatatctctcatttaattacgtcacgataaaagttacaagatgttcgaagtttattaccagttgaaagcgagacggatgatttacagggtcacatcattatttgcggatttggacgaattgggcagataatcgctcagcttctttctgaaagacttatcccatttgttgccctcgatgtcagcagtgatagagtagcaattggtcgttccctagatcttccagtttattttggagacgctggtagtagagaggtactccacaaaatcggggcagatagagcatgtgctgcggctattgctttagacacacctggagcaaattacaggtgtgtctgggctctcagcaaatatttccccaatgtcaaaacctttgtccgtgcacatgacgttgatcatggtctcaatcttgaaaaagccggcgctaccgctgttgttcctgagacgctggaaccaagtcttcagttagcagctgctgttcttgcacaggccaaattacctacatcagaaatagcaacaacgatcaacgagttcagatctcgtcacttgtctgaactagctgagctatgtgaggcaagtggaagctctctaggttacgggttctcaagaagtacgagcaaaccaaaaccaccatcaccatctgaaacatctgacgataaccagattattgaaggcacactcgctatctaacccttttttctcgcttctgggtaagaccacacaaatttcaacttctttttgcttaaaacttgttacaggaacccaaaatcctttatttttgaaggatctttagcgggggaaaaaggtaacaacctctcaaaattttgatgggatgatgatgtgttgaaatttctctagtttctttcctctgggggaaaaacaaaggcaaataatatttgtattcaac

SEQ ID NO: 617 - DNA, 2890 bp, Arabidopsis thaliana
  Clone ID: ARATH-23APR03-CLUSTER23437_1
tttgtacttccggagctaaagagttatagctactgtagtagctggaagtgaagaagattttttaatagattgtacggaaaaattagggttttcaaagtttggtttcttgaagttgaattagacatgaagctgtcaacatctggattgggtcaacagggtcatgaaggagagaagtgtctgaattctgagctatggcatgcttgtgctggaccattagtctctcttccatcatctggtagtcgagttgtttactttccacagggtcacagtgaacaggtagctgctacaactaataaggaagttgatggtcacatacccaattacccaagcctaccaccacaattgatatgccagctccataatgttacaatgcatgcagatgttgagacggatgaagtctatgctcaaatgacacttcaaccattgacaccggaggagcagaaggaaacatttgtaccgattgagttggggataccgagtaagcaacctagtaattatttttgtaagactctcacagctagtgataccagtacacatggagggttttctgttcctagacgtgctgctgagaaagtgtttcctccattggattacacactgcagccaccagctcaagaactgattgcaagggatctccatgatgttgaatggaagtttaggcatatctttcggggacagcccaaacggcatctcctaactactggatggagtgtctttgtcagtgccaagcgactagtagctggagattctgtcattttcatcaggaatgaaaagaatcaactctttttgggaattcgtcatgccactcggccgcagactattgtaccatcatctgttttatctagtgatagcatgcatattggactccttgctgctgctgcacatgcttctgcaactaatagctgtttcactgttttctttcatccaagggctagccaatctgagtttgtgatacaactttccaagtacattaaagccgtttttcacacgcgtatttcagttgggatgcgctttcgcatgctcttcgagacagaagagtcgagtgtccgcaggtacatgggtactataactggtattagtgatctagattctgttcgttggccaaactctcattggcgatctgtgaaggttggttgggatgaatcgactgcaggggagagacagccaagggtttctttatgggagattgagcctctgactacctttcctatgtatccatctctttttcctctcagactaaaacgtccatggcatgctggcacatcatctttgcctgatggaaggggtgatttgggaagtggtctaacatggctaagagggggaggtggagagcagcaaggtttgcttcctctaaattatccatctgttggtttgtttccatggatgcaacaaaggctggatctcagtcaaatggggactgataataatcagcaataccaagcaatgttagctgctgggttgcagaacatcggcggtggagatcctttaagacagcagtttgtacagctgcaagagcctcaccaccaatatcttcaacaatcagcttcccataattctgatttgatgcttcagcagcaacagcagcaacaagcgtcacgccatctcatgcatgctcaaacacagattatgagtgagaatcttccgcagcagaatatgcgacaagaagttagtaaccaaccagctggacagcagcaacagctacagcaaccggaccaaaatgcatatcttaatgctttcaaaatgcaaaatggccatcttcaacagtggcagcagcaatcagagatgccatctccctcgttcatgaagtcagattttactgactcaagcaacaaatttgcaacaactgctagtccggcttctggagatggcaatcttttgaatttttctataaccggtcagtctgtactccctgagcagttaacaacagagggctggtctccaaaagcatccaacactttttctgaaccgttgtcacttccacaagcctatcctgggaagagtcttgctctagaacccggaaatccgcagaatccctctcttttcggtgttgatcccgactctggactcttcctccccagtacggttccccgctttgcttcttcatcaggagatgctgaagcttcccctatgtcactaacagattcaggatttcagaattccttatatagctgcatgcaagacacaactcatgagttattgcatggagctggacagattaactcgtccaaccaaaccaagaactttgtaaaggtttataaatctggttcggttgggcgttcattagacatctcccgattcagcagctaccacgagctgcgagaagagttagggaagatgtttgctatcgaagggttgttggaagacccccttagatcaggctggcagcttgtattcgttgacaaggaaaatgatattcttctccttggtgatgacccatgggagtcatttgtgaataacgtttggtacataaagatactatcaccagaagatgtgcatcaaatgggagatcatggagaaggcagtggtgggttattcccgcaaaacccgacccatctctagaagctgcttcggtgttagtctcatcatgctacaacgcgggagccctttgtttcccatttgaagtcgtttccactcatctttatatgccattcgttcgcatctctctcgttttgacgtttttagaaagaaacataatcatatttgtgagtatgggtcctgaaactttaggacgtactttagcttgtattagacagacactctcgtcataaacataagaacctttatgtagctgtctcagggtaactaaacttttctagtatttattcttattctatttttgtagccacatcgttacacattaagtttcctcacaccaattagattccataaa

SEQ ID NO: 618 - DNA, 1598 bp, Arabidopsis thaliana
  Clone ID: ARATH-23APR03-CLUSTER234708_1
aatcacacaaatcccttttttggtttctccaaatcttcaaatcttcttcaatcatcaccatggtacgttttagtaacagtcttgtaggaatactcaacttcttcgtcttccttctctcggttcccatactctcaaccggaatctggctcagccttaaagccacgacgcaatgcgcgagattcctcgacaaacccatgatcgctctcggtgttttcctcatgataatcgcaatcgctggagtcgttggatcttgttccagagtgacgtggcttctctggtcctatctctttgtgatgttcttcttaatcctcatcgtcctctgtttcaccatctttgccttcgttgtcactagtaaaggctccggcgaaactatccaaggaaaagcttataaggagtataggctcgaggcttactctgattggttgcagaggcgtgtgaacaacgctaagcattggaacagcattagaagctgtctttatgagagcaagttctgttacaacttggagttagtcactgctaatcacactgtttctgatttctacaaagaagatctcactgcttttgagtctggttgctgcaagccctctaatgactgtgacttcacctacataacttcaacaacttggaataaaacatcaagaacacataaaaactcagattgccaactttgggacaacgaaaagcataagctttgctacaattgcaaagcctgcaaggccggttttctcgacaacctcaaggccgcatggaaaagagttgctattgtcaacatcattttccttgtactcctcgttgtcgtctacgctatgagatgttgcgctttccgaaacaacaaagaagatagatatggccgttccaatggtttcaacaattcttgatttgcgccggttcaagctagactttgatttttcattaatacatcatattacatttatgattagaacaaaacagctttcaaaatttaagaaacagtagaatggaagaatattgaattagtatagttgttgatgtgtttggatttcttctgttgatttgggtttggacaacagaggattcttcagatctttattacagattgttgtgtttgaagaatcttctatatgaatcttcacttctgacttctgatcaaaaaaaaacagatcttgattcatcatgacatcttttgctttaccccagagcacagtgtaaagtcccaatatcacgcccaatcctccgattaaacttccagtgtaaatctcttcatggaagaacaaagcagccaagattgtgacaatgactgtacaaagaggattaaacagtgcagaaaacacaggacctctctttgcaatagcccaagcttggaccgtaaaagaaagtgctgacgccccaattcctgcatagagacatgtggcaaactcggagtaggaatggagaatccaagcgtttgggtctttctcaaggaagaaagtgacgactgcacattgtattgttccgaataaacacatccatgctgataaagagaggttatctggatagtaggcagagattggaacctagggttttgttgaaacaaaactcacatttcttgtaagacaagaaacataacaacaacaaaaagt

SEQ ID NO: 619 - DNA, 3484 bp, Arabidopsis thaliana
  Clone ID: ARATH-23APR03-CLUSTER23473_1
cattaccagtgagaggacttcttgttatatatcatatcttcttcgttctcgatttacgagatccttgattctctctttctctaatcttatctcatctgaagtatagttaagaattcactcgttgttcgagagtagtaagctgaagaaatggagagctacttgaacgaaaacttcggcgatgtgaagccgaagaactcgtccgatgaggcgttgcagcgttggaggaagctctgctggatcgtcaagaatcctaaaaggagatttagattcactgctaatctgtctaagcgttccgaggccgaggcgattcggcgttccaatcaggaaaaatttcgagtggcggtcttagtttcacaagctgcacttcagttcattaatagtttaaagttgtccagtgagtatacactatctgaagaagtaagaaaagcagggtttgagatttgtcctgatgagttgggatcaattgtagaaggtcatgatttgaaaaagttgaaaattcatggtggaactgagggcctcactgaaaaactttccacgtctattgctagtggaattagtacatctgaagacctgctgagtgtaagaaaagaaatttatggaatcaaccaattcacagaaagccccagccgtggcttttggttatttgtttgggaagcccttcaggatacaacacttatgattctagctgcatgtgcgtttgtttcacttatagttggaatactgatggaagggtggcctattggtgcccatgacggacttggtatagtggcgagtattctgcttgttgtgtttgtcactgccactagtgattataggcaatccctgcaattcaaggacctggatgcagagaagaaaaagattgtggttcaggttacgagagacaaactgaggcaaaaaatctcaatatatgatctactccctggagatgttgttcatcttggcattggagaccagattccagcagatgggctttttatctcagggttttctgttctgataaatgaatcgagcttgactggagaaagtgaaccggttagtgtcagtgtggaacacccgtttcttctctctggtaccaaggttcaggatggatcttgcaaaatgttggtgactacagttggaatgaggactcaatggggtaaactgatggctacactaagtgaaggcggtgatgatgagacaccgttgcaagtaaaacttaatggtgtggcaaccatcattggtaaaataggtctattttttgctgtcattacgtttgctgttttggttcaaggattggctaatcagaagcgcctagataattctcactggatctggactgctgatgaattgatggcgatgctagaatattttgctgttgctgtaacaattgttgtggttgcagttccggagggtctgccgttggctgtgacattaagtcttgcttttgccatgaaaaagatgatgaatgacaaagcgctagtgcgcaatcttgctgcttgtgagacaatgggatctgcaacaactatttgtagtgacaaaactggaactcttacaacaaatcacatgacagttgtaaaagcctgcatctgtgaacaagccaaagaggttaatggtcctgatgctgctatgaaatttgcctctggtatccctgagtctgctgttaaacttctactgcaatctatatttactaacactggtggtgagattgttgtgggcaaaggaaacaaaaccgagatactgggaactcctacagaaactgctctgttagaatttgggttgtcactcggaggggacttccaagaagtaaggcaagcctcaaatgttgtgaaagttgagccctttaactctacaaagaaaagaatgggagttgtcattgagctgcctgaaagacatttccgggcacattgtaagggtgcttcagagatagttttagattcttgtgataagtacatcaacaaagatggtgaagttgttcctctcgatgaaaaatcgaccagtcacctgaagaacataattgaggaatttgctagcgaagcacttcgaactctttgcctagcgtatttcgaaattggtgatgaattctcattagaggctcctattccaagtggtggatacacttgtataggtattgtgggcatcaaagaccctgtacgccctggtgtcaaggagtctgttgcgatttgtaaatctgctggcatcactgtcagaatggtgactggagataaccttactactgcgaaggccatagccagggagtgtggcatattgactgatgatggcatagctatcgaaggtcctgaattccgggagaaaagtgatgaggaactgctcaagctaatcccaaaattgcaggtgatggcacgatcctcgcccatggataagcatactttggtgagactcctccgcacaatgtttcaggaagtcgttgcagtgacaggtgatggaacaaatgatgctccagcacttcatgaagctgatattggactcgcaatgggcatttccggaactgaggtggcaaaagaaagtgcggatgtgattatcctagatgataacttctctacgattgtcacagtagccaaatggggccgttctgtgtacataaatattcagaaatttgtccagttccagctgacagtaaatgttgtggctcttattgtcaacttcttatcagcctgcctcactggaaacgcgcctctgactgctgtccaactactgtgggttaacatgataatggacacacttggagcactcgcgctagcgactgaaccaccacaggacgacctgatgaagagatctccagtgggaaggaaaggaaacttcataagtaatgtaatgtggaggaacatccttggtcagtcactctaccagcttgtcatcatatggtgtcttcaaacaaagggaaagacaatgtttggtctcgatggccccgactctgatctaacactcaatacccttattttcaacatttttgtcttctgccaggtattcaatgagataagctcgagggaaatggaaaaaattgatgtgttcaaggggatactaaagaactacgtattcgtagcggttctaacatgtacagtggtgttccaagtaatcataatcgagctgctgggtacatttgcggatacaacaccattaaatttgggacaatggttggttagcatcatactcgggttccttggcatgcctgttgctgctgccttgaagatgatccctgttggttcacactaagcaacacattgtataatgtgattccttgtgccacaactttggcattgaaaggtaccaattttttctccggcctttggaagtttgatatcccaagatggccttggactagttacggtgcttttttatgttttcattttggccaaatgtataagtgatttggaggagcatttgcttcgtaaatatttcaatgttgtggaacttgttactttatcttttgttcttctgttagataccttttactgaataagtgaagcataggctaaattgtctctca

SEQ ID NO: 620 - DNA, 1935 bp, Arabidopsis thaliana
  Clone ID: ARATH-23APR03-CLUSTER2349_1
gatccgagatttcatcatcttcttcggaaggagcttatcgttccacaccaatggcttcttctgtccttaatctcttcaaatcatgtagacccttcactccaatacgcttctcttctcttcccaagtctcaattcagaatccaatttcccctcagacccggaaaagaaactcaactacgtcgctgtttcacgactctgtcatcattaacggacggtggagcaccaatttccggtgggaaggagctgtggctgcacaacacgatgagccggaagaaggagctgtttaagcctaaggtcgaaggtaaagttggaatgtacgtttgcggtgtcactgcttacgatctcagtcacattggacacgcacgagtctacgtcactttcgatgtactcttgaggtaccttaagcatctaggatatgaagtgtcttacgttcgaaatttcacggatgtggatgacaagattattgccagagcgaaagaattagaggaagatccaatcagtttgagcagacgtttctgtgaggaatttaatcgagatatggaacagcttcaatgtttagatccgtctgtccaaccacgagtttcagatcatatacctcaaatcatcgacctgatcaagcagattcttgataatggctatgcctacaaagttgatggagacatttacttctcagtcgacaaatttccaacatatggaaaattgtctgggcgaaaattagaagataaccgtgcaggtgagagagtcgcagttgacacgaggaagaaacatcccgcagattttgctctgtggaaagctgcaaaagaaggggaacccttttgggagagtccgtggggaagaggaaggcccggttggcacatagagtgcagtgcgatgagcgcggcttatctcggttatagttttgacatacatggtggcggaatggatcttgtgttccctcaccatgaaaatgaaattgctcagagttgtgctgcatgtgatagcagcaacattagctattggatccataatggttttgttactgttgactccgagaagatgtcaaaatccttggggaatttcttcactatcagacaggttatagacctttatcatcctcttgctctgagacttttcctaatgggaactcattatcggtctcctatcaattactccgatttcctcctcgagagtgcttcggagcgcattttttatatttatcagacgttacacgactgtgaaagcgctttaggcgagaaagattcgacatttgagaatggttctgttccttcagacactttgacaagcatcaacacattccgtactgaatttgtcgcctcgatgtctgatgatcttctcacacctgtaactctggctgcaatgtcagaaccactgaaaactatcaacgatctcattcacacccgaaaggggaaaaaacaagcaagaagagaagagtcacttaaggctctagagacaacaatcagagatgttcttactatcttagggcttatgcccacaagttactcagaggttctcgagcagctaaaagagaaggcactaaagcgagctggactaaaagaggaagatgtgttgcagagagtgcaagagagaacagacgcaaggaagaataaagaatacgaaagatctgatgcaattaggaaagatttggcaaaagttgggatcgctttgatggatagtcctgagggaacaacttggagaccagccattcctcttgcacttcaagaacctgtaactactacaccttgagtttttaatcctatactacaatatctattctttttcttagtggttcatagtatttttgtatcagttttgttgaattcgaccaaaagattaaagaagtaacattggattcttgtactattcgtttttgtgtaagtccagcgaacttgttatacaatgcctatgctcaataatcagaggagaaaaaaaaaaaaaa

SEQ ID NO: 621 - DNA, 1299 bp, Arabidopsis thaliana
  Clone ID: ARATH-23APR03-CLUSTER23511_1
gctcatgattctttgtctcttcctctgatttctcaatcctctgttttctccgtctcctctgtttttttcacatcaatggaagcgtcattgttgatgagatcgtcttgttgctcctctgcgattggtgggttcttcgaccatcgacgtgaattatcaacctcaacacccatttccactcttcttcctcttccatcaaccaaatcttctttctctgttcgttgttctcttcctcagccatcaaagccacgctctggaaccagctctgttcacgccgttatgacactcgctggatcgttgacagggaagaaacgagtggatgagagtgagagtttgactcttgaaggtattagaaactctttgatccgtcaagaggacagcattatatttgggctattggagagagccaagtactgttacaatgctgatacttatgatcctactgcttttgacatggatggtttcaatggttctttggttgagtacatggttaaaggcactgagaagcttcacgctaaggttggtaggtttaagagtcctgatgaacatcctttcttccctgatgatctaccagagcctatgttgcctcctcttcagtacccaaaggtgttgcattttgctgctgattcgataaacataaacaagaagatatggaacatgtacttcagagaccttgttccaagacttgtgaagaaaggcgatgatggtaactacggctcaacagctgtctgtgacgctatctgccttcagtgtctctcaaagagaatccattacggtaaatttgttgcagaagctaaatttcaagcctcacccgaagcatacgagtccgccatcaaagcacaagataaggatgcactgatggatatgctgacattcccgactgtggaagatgcgataaagaagagagttgagatgaaaacccgaacatacgggcaagaagtgaaagttgggatggaggagaaagaagaagaagaagaagaagggaatgaatctcatgtttacaaaatcagtccgatcttagttgtgacttatatggagattggatcatgcctttaacaaaagaggttcaagtggagtacttgctcagaagactggactgaggcaacaacaaaataaacaatatggctttggtagtagagtagaaaggtttttgaatgttctttggttttttttttactttacaatatttctaaacgttgttacactattattccactgtacaaagcgtgcatggtcagtggtattgaagaagggtaattagccgttactcaaacggtgtcgtttaaaaaaaaaaaaaaaaaa

SEQ ID NO: 622 - DNA, 1981 bp, Arabidopsis thaliana
  Clone ID: ARATH-23APR03-CLUSTER23582_1
tgaggggaggccaccccgcgagcgtacttcaccgggctctcccgcttaggcgcccaggccttaactccgactgcgatttccagacgtgggacgacgccccccccagaaacactccggttaaccgccttttcacaacggcctatgttgtcccccgttcgtacagcaaccctgagcctagtctccgtcctccgagttgcggccctcacaatgttttggggacccctggggtcacctggactccgatgagccctttccctcgaacatcctaatcgaaaaatcttcttcttcctcttcccctaacattccattccccgtatgggtctcaccacttcctaactcttctctctctcttatctcttcttgttttagctatgaagaagcaatctcaattcagatccagtcacacacttctcttctttcttctctgatcatcaacaacaacgattcgggttctgtaattttactaattggagagaaaatggcgatgttagttgagccaccaaatgggattaagcaacaagggaaacattactactctatgtggcaaacattgttcgaaatcgatactaagtatgttccgattaaacccattggaagaggagcttatggtgtggtttgttcttctatcaatcgtgagactaatgagagagttgctattaaaaagattcacaatgtgtttgagaatcgtgttgatgctttgagaacgttgagggaacttaagcttcttaggcatgtgaggcatgagaatgtgatcgcgcttaaagatgttatgttgcctgctaatagatccagtttcaaggatgtttatttggtttatgagctaatggatactgatcttcatcagattattaaatcctctcagtctctttctgatgatcactgcaagtacttcttgtttcagttgcttagaggattgaagtatcttcactctgcaaacatacttcaccgggatttgaagcccgggaacctcttagttaacgcgaattgcgatctcaagatttgtgatttcgggttagcgagaacgagccaaggtaatgaacagttcatgactgagtatgtggttacacgttggtacagagcacctgagcttcttctttgttgtgataactatggaacctccattgatgtatggtcggttggttgcatattcgcggagattcttggtaggaaaccgatttttccaggaacagaatgcttgaatcagcttaagctaatcatcaacgttgttggtagccaacaagaatctgatattcggttcatagacaacccgaaagctcgaaggtttataaagtctcttccttactcaagaggaactcatctctccaatctttatccacaagccaatcctctagctatagatttgttacagaggatgcttgtgtttgatccaaccaagagaatctctgtaaccgatgcactcttacacccgtacatggcggggttgtttgatcctggatccaatccgcctgcacatgtcccaatctctttggacatagatgaaaacatggaggaaccaatgatcagagagatgatgtggaatgagatgctttattaccaccctgaagctgaaatctcaaacgcctaaatcatcatcaatgatcatcaagagtaagctttttccagttttttttgttttgctttctaaaatgcagcttcgatgttatgttatatatagcgagtccacaaacgcgggaacagatcgattaaaaccccggtgctttgatctcgtctggtttgatttagttgcagtgagtgagtagtagtaacagagtttgaaaagtggctctcagtatctttaccactttgtaaatgtggctgtttgttactaagttaaggcttgtttttgttacattaaaaaaaaaaaaaaaactttgagttgatgagttttactactgattttcaggccaactcttgtattttgtatagctttgccattgccccacttgctagccacacgaaataattttttaaaaaaaaaaaa

SEQ ID NO: 623 - DNA, 3431 bp, Arabidopsis thaliana
  Clone ID: ARATH-23APR03-CLUSTER235_1
gacatctcttcttcatcctctcttctactttcctctttcctctttccttcttcgaataaatttctagggtttttcttttctctaaagttttcatttttatttcaatgagagctcgaagaaggagaatatgggtttgagaactgataatattatggcttcgtttcgaggtggaatcggggtttctaatggctgagtcaactcggtgattctgtgttatagtcacgagcaaatataaaaaagtttgtaactttcttgtttttttaggtgtgtgtgttcagagaaaaggtcgaatcttttttcggtgtttgtaaaagggaaagttgtaatcttaaagtctgtttttctttcttgtgttttggtatttagctcataaaagccgaggagtaatataaaggataggttttgtctttgtgtgcccttttgagattgcatgaagaaaaaaagcctctagtgtgttttgaaggaaacagaattcgatatttatgcggtaatgtgatttgtgaagctactccaagtgcttaggatttgagatggcttagatttggtagttgttcaagctgtggagtttgtggtggactaagaagctctctgtctcctttgtttagtatgttgtggttatcttctgtttagaaggatttagttattcatctggagggggtagtagggtcatttgtgagattctgtgattgtgaaataagaagagttttgctgaggagtaatggcaatgtcttgcaaggatggtaagttgggatgtttggataatgggaagtatgtgaggtatacacctgaacaagttgaagcacttgagaggctttatcatgactgtcctaaaccgagttctattcgccgtcagcagttgatcagagagtgtcctattctctctaacattgagcctaaacagatcaaagtgtggtttcagaaccgaagatgtagagagaaacaaaggaaagaggcttcacggcttcaagctgtgaatcggaagttgacggcaatgaacaagctcttgatggaggagaatgacaggttgcagaagcaagtgtcacagctggtccatgaaaacagctacttccgtcaacatactccaaatccttcactcccagctaaagacacaagctgtgaatcggtggtgacgagtggtcagcaccaattggcatctcaaaatcctcagagagatgctagtcctgcaggacttttgtccattgcagaagaaactttagcagagtttctttcaaaggcaactggaaccgctgttgagtgggttcagatgcctggaatgaagcctggtccggattccattggaatcatcgctatttctcatggttgcactggtgtggcagcacgcgcctgtggcctagtgggtcttgagcctacaagggttgcagagattgtcaaggatcgtccttcgtggttccgcgaatgtcgagctgttgaagttatgaacgtgttgccaactgccaatggtggaaccgttgagctgctttatatgcagctctatgcaccaactacattggccccaccacgcgatttctggctgttacgttacacctctgttttagaagatggcagccttgtggtgtgcgagagatctcttaagagcactcaaaatggtcctagtatgccactggttcagaattttgtgagagcagagatgctttccagtgggtacttgatacggccttgtgatggtggtggctcaatcatacacatagtggatcatatggatttggaggcttgtagcgtgcctgaggtcttgcgcccgctctatgagtcacccaaagtacttgcacagaagacaacaatggcggcactgcgtcagctcaagcaaatagctcaggaggttactcagactaatagtagtgttaatgggtggggacggcgtcctgctgccttaagagctctcagccagaggctaagcagaggcttcaatgaagctgtaaatggtttcactgatgaaggatggtcagtgataggagatagcatggatgatgtcacaatcactgtaaactcttctccagacaagctaatgggtctaaatcttacatttgccaatggctttgctcctgtaagcaatgttgttttatgcgcaaaagcatcaatgcttttacagaatgttcctccggcgatcctgcttcggtttctgagggagcataggtcagaatgggctgacaacaacattgatgcgtatctagcagcagcagttaaagtagggccttgtagtgcccgagttggaggatttggagggcaggttatacttccacttgctcatactattgagcatgaagagtttatggaagtcatcaaattggaaggtcttggtcattcccctgaagatgcaatcgttccaagagatatcttccttcttcaactttgtagcggaatggatgaaaatgctgtaggaacctgtgcggaacttatatttgctccaatcgatgcttcgtttgcggatgatgcacctctgcttccttctggttttcgtattatccctcttgattccgcaaaggaagtatctagcccaaaccgaaccttggatcttgcttcggcactggaaattggttcagctggaacaaaagcctcaactgatcaatcaggaaactccacatgtgcaagatctgtgatgacaatagcatttgagtttggtatcgagagccatatgcaagaacatgtagcatccatggctaggcagtatgttcgaggtatcatatcatcggtgcagagagtagcattggctctttctccttctcatatcagctcacaagttggtctacgcactcctttgggtactcctgaagcccaaacacttgctcgttggatttgccagagttacaggggctacatgggtgttgagctacttaaatcaaacagtgacggcaatgaatctattcttaagaatctttggcatcacactgatgctataatctgctgctcaatgaaggccttgcccgtcttcacatttgcaaaccaggcgggacttgacatgctggagactacattagttgctcttcaagacatctctttagagaagatatttgatgacaatggaagaaagactctttgctctgagttcccacagatcatgcaacagggcttcgcgtgccttcaaggcgggatatgtctctcaagcatggggagaccagtttcgtatgagagagcagttgcttggaaagtactcaatgaagaagaaaatgctcattgcatctgctttgtgttcatcaattggtcctttgtgtgagatttattgtattttgtattttcagactaagcttttgccttttggctgtattgtaaaacggtcatgttgttgttgttgttgttgttgttcttgatgttgctgtgaacacgtaaaacagtgttttgtttcaaaactcaagaaatgcttgcttaatttgtagtttgattaagagtgataatgatgatccttttcttttcttgtt

SEQ ID NO: 624 - DNA, 944 bp, Arabidopsis thaliana
  Clone ID: ARATH-23APR03-CLUSTER23674_1
aataaatacaagcctcctaactcataaaataagcataaccctaactctacaaagttcttctgattctttctctctctctctttctttcaagagcggttttcaatccattcgctaaagaccatgaacctagaagagaaaccaaccatgacggcttcaagggcttcccctcaagccgaacatctctactacgtccggtgtagcatctgcaacacaatcctcgcggttgggataccattgaagagaatgcttgacacggtaacggtgaaatgcggccattgtggtaacctctcgtttctcaccacaactcctcctcttcaaggccatgttagcctcacccttcagatgcagagctttggtggaagtgactataagaagggaagctcttcttcttcctcttcctccacctccagcgaccagcccccatctccctcacctccctttgtcgtcaaacctcctgagaagaagcagaggctcccatctgcatacaaccgcttcatgagggatgagatccaacgcatcaaaagtgccaatccggaaataccacaccgtgaagctttcagtgctgctgccaaaaattgggctaagtacatacccaactctcctacttccattacttccggaggccacaacatgatccatggcttgggattcggtgagaagaagtgaacaaaactcaggggaaaagaagcctaaaaataacaaacgcatgcacgtgtgcgagtggctgcgtcgtttttctcatcttgtgttgttcttctgtgtaattttcttatgtatgtcatgttgcagaaaatgatgttgccttagtttttatgactttatatttctgtctgtctttagatttgaaagtaacgtcacttgctatgtccctttggacgtttatgtctggtctttatttgtcttaatcctatcaaaattttatatgcgtattccttaaaaaaaaa

SEQ ID NO: 625 - DNA, 1854 bp, Arabidopsis thaliana
  Clone ID: ARATH-23APR03-CLUSTER236811_1
atggattctgattctgagagagcttctctggagtcgattaaagataattctgaatgtgttcatgtttccaacgaacctaatctcacggcaacatgcgttgattcgtctgttggagaggaaggagttacggatgtaaattcgtccgccgctgtgtcggagctcgtgccgccggagcaaggagaaggtgcgcttttgaattccgtccctgagatcagtgaaagggggattcctgttgatgtcgtttcctcggtagatggaggaggagaagaaaatgcagcttttaatattcaggagattgattctgttggcggtgacgctgcggcggtggaggaggttcctctgaaatcgtcttcggtggttggggaaggaagagaagaggaagctggggcttcaatcgtcaaagaagaggattttgtagctgaagctaatttgtcaggagataggcttgaggaaaacaaagaagtttccatggaagaagaaccttcatcacatgagctctcggtttgtgaggtaaacggagttgattctttgaatgatgaggaaaatagagaggtaggtgaacagatagtttgtggaagtatgggtggtgaggagatagagagtgatttagagtctaaaaaggaaaaggtagatgtgatagaggaggaaaccacagcgcaagctgcttccttggttaatgcaattgaaattcctgatgataaagaggtagcttgcgtggctgggtttacggaaatttcctctcaagataaagggttagacgaatcaggaaatggatttttagatgaagagccagtgaaagagttgcaaataggtgaaggagctaaagatctgacagatggagatgcaaaagaaggtgtggatgttacagaagatgaaatggatatacaggtattgaagaaatctaaggaggaagaaaaggttgatagtactactgaattagagatagaaactatgcgcctagaggtgcatgacgtggctactgagatgtccgacaaaactgttatatcatcagctgttgttactcagtttactggggaaacaagtaatgataaggaaactgttatggatgatgtcaaagaagatgttgacaaggattcagaagctggtaaatcactggacatacatgtaccagaggctacagaagaagtagacacagatgttaattacggtgttgggatagagaaagaaggcgatggggtgggtggtgcggaagaagcagggcagacagttgatttggaggaaattcgagaagaaaaccaagaactgtctaaggaactggctcaagtagatgaaaccaagatttctgaaatgtcggaagtaacggagacaatgatcaaagatgaggatcaggagaaagatgacaatatgactgatttggcggaggatgtggaaaaccatagagattcctcagtagctgatattgaggagggaagggaagatcatgaagatatgggagtgacagagacacagaaggagactgttttgggtaaagtagacagaacaaaaattgctgaagtgtcagaagaaacagacacaaggattgaagatgaggatcaggagaaagatgatgagatgactgatgttgcggaagatgtgaaaacgcatggagactcctcagtagctgatattgaagagggaagggaaagtcaagaagagatgacagagacacaggaggacagtgttatggctgatgaagagcctgaggaagttgaggaagaaaataagagtgctggaggaaagaggaaacgggggagaaatacaaagacagtcaaagggacaggaaagaagaaagaggaagatgtttgttttatgtgctttgatgggggtgatcttgtcctttgtgaccgcaggtga

SEQ ID NO: 626 - DNA, 1728 bp, Arabidopsis thaliana
  unsure (1)..(1728): unsure at all n locations
  Clone ID: ARATH-23APR03-CLUSTER23713_1
ccggtctagaattacgggtcgagtcagcgtccggagacagagaatttaataagagaggaagagtattaaggtgatggcggcgttgcagagcgcgagacagagaaagaaacctctctgagatacatctctctctctctctctatcccctcttaaatacactccataccgacaaaccaacttttttctcagtactaaaagaaacctctattcgatttctaaacaaaccctagatatagactactctacattcttccattaagttaatctctttcgtcttcttcttcttcatcctctcataattaaagatctctatcaagagagagatcttttattgtcttcttctgttaaaatcttttgatagatcttcactctctgaaagtcaagatcttagtctaggcaagtaaatatgtggtaaagtcaagatcttagtctaggcaagtaaatatgtggtaaagcaaagcccttcttgaaattggtcatatatggctggtggtatcggaaaatggcaggatttttctcgttaggacacggcggaggaggaaacactccagacaaccacagaacaaacactaataatccttcttcatcgggaacagaatcttggctttggtgcagaaaccctaactctaacgctgacggtggagaagctggtccttcttacaaaggaacccttgagctatggcaacacccaaacaatcaagaaatcgttttccagcagcagcagcaacagcaacaaaggctggatctttacacttccgctgcgggtttaggtgttggaccgagcaaccggagcttaattgaaacttccggcggtgcgttgagccaggattgtgggaatcaatctaagaaagactgctctcacatgagatgtaggacttgctgcaagagccgtggccttgactgtcccactcacgtgaagagcacgtgggttcctgccgctaaacgccgagaacgccagcagcagctttttaccggtcagcaaccgcagcaactgggagggagcgtccctaaacgacagagagagcgtatcccggcgagaccgacttccaatggcctacactcgtataccttctaacaacacttcagggttggaggttgggaattttccgccggaagttagctcgtcggcagtttttcggtgcgtgcgtgtgagttccgtagatgatgaagaagaagagtatgcatataaaacagctgtgagtataggcggtcacgtcttcaaaggtgttctctacgatcaaggcccggccgagagaagctcctcgggcggtggatctcagccgttgaatctcataaccgcaggcccatcggcctcatcatcaagcccaaacgtgagctgcaacaatggagtcgttggctccacttcagatcattatatcgatcctgcctcacttaattatcctactcccattaacactttcatgactggtacgcacttcttctccaactcaagatcttgaattccacacagagagagtacaacaaatcataacttttttttagattcttacggtagaattagggttttaaaacatcttcggaggtgaagattataacgtactaatcttggttttcaaaagtaattaactaagggagataatgttctattaaaacaattgttacctgatcttttattattaagttcaaattttgtaggtntaatgttaatgtaataatatactccaattttcaactgttacaaaagtccggtaccaagcgncaancccn

SEQ ID NO: 627 - DNA, 851 bp, Arabidopsis thaliana
  Clone ID: ARATH-23APR03-CLUSTER23728_1
agaacaaaacaaacaaaaagtcatgtctccgacgacgacatcgttacgatccctaagcttctcgctttacgcttcttctaattctactccgatttctacaccaattgaggcccgacagttactgagttcatgcagtagattctacggtctgtcctcttcgagctcttcttcctcccttactacttcatctttgatcggaaatcttgttttctcatcaaggaatcagtctctctccgtaaaggtccaagcgttagctgctgaaaccgaacagccaaaatggtgggagaggaaagcagggccaaacatgattgacattacctcagctgagcagtttctcaacgcgttaaaagatgcgggagatagattagttatcgtagatttttacggaacttggtgtggttcttgccgtgcaatgttcccaaagctctgcaaaacggcgaaagaacaccctgacatcttgttccttaaagtaaactttgacgagaacaagtctctctgcaaaagcttaaacgtcaaggtgttaccgtatttccacttctaccgcggtgctgatggccaagtcgaatccttctcatgctctcttgccaagttccagaaactgagagaggcgatagagagacacaatgtaggaagtatcagtaacatctcttcttcagcttctgagaaagttgaagattcaagtgaataatcaatgcctggttcagattgatcacagattattttgttaaatcgcttccctgtatatatgttgactgcattttccatgtggtgcatcataatttttgtacataaataaatgagtctgacttcgagttaaaaaaaaaaaaaaaaaaaaaaaaaaaaaaaaaaaa

SEQ ID NO: 628 - DNA, 3432 bp, Arabidopsis thaliana
  Clone ID: ARATH-23APR03-CLUSTER23734_1
tccgtatgcagcagagaaggaagaggagggtgaagattagtatcgctaaagttagtttggtggagaacacggaggagcataataagcctgagtctgagtggaacaataacgttgagtacttcatcaagaagaaacttcgagtttggtgtcgggtatctaatgggcagtggcaactggggaagatacagtctacttccgctgatacgtcgcttgttatgttgtccactgcaaatgttgtgaaagtgtctactgaagagctttttcctgcaaacccagatatattggaaggtgttgaagatcttatacagctcagttatctaaatgaaccatctgttctttataaccttcgtgtcagatatttgcaagacgtgatttatagtaaagcaggacctgtattgattgcggtcaatccattcaagaatgtagaaatttatggaaatgatgttatctcagcttatcagaagaaggttatggatgctccacatgtctatgctgtggcggatgcagcttatgatgagatgatgagagagaagaatcagtctcttataataagtggagaaagtggagctgggaaaactgagactgcaaaatttgcaatgcagtacttggcagctctcggtggaggtagctgtggagtagagtatgaaatcctaaaaacaacctgcatactcgaagcttttggaaacgctaaaacatcaagaaatgctaactctagccgatttggtaaactcatagaaattcattttagtgcaatgggaaagatatgtggagccaaacttgaaacttttctgctagagaagtcaagagtggttcagctgttcaatggcgaaagatcctatcatatattttatgagctgtgtgcaggtgcttcaccgattcttaaagagagattgaagcttaaaacagcaagtgagtatacctacctgagccagagtgattgcttgaccattgccggtgttgatgatgctcagaaatttcacaaactactggaagcttttgacattgttcaaatccctaaagagcatcaagagagggcatttgcattgcttgcagcagtgttgtggctaggaaatgtatcttttcgagttactgacaacgaaaatcatgtggaggtggtagcggatgaagctgtcgccaatgccgctatgttaatgggctgcaacacagaagagcttatggtggttttgtccacccgtaaacttcaagctggtacggattgtattgctaaaaaactgacattgcggcaggcaactgacatgagggatggaatagcaaaatttatttatgcaaacctatttgactggcttgttgagcaaataaacattgcattggaagtcggtaaatcacgtacaggaagatctataagcatccttgatatatatgggtttgaatcatttaagaataacagctttgaacaattctgtataaactacgcaaatgaaagattgcagcaacacttcaaccggcatttatttaaacttgaacaagaggaatatgaagaagatggaattgattggactaaggtcgaatttgtagacaatcaagagtgcttagatctaattgagaagaaaccaattggtttgttgtctctactagacgaggaatcaaattttccaaaagcaactgatttgacctttgccaacaagctcaagcaacatttgaagaccaactcttgcttcaaaggagagagaggtcgagccttcagagttaatcattatgctggagaggttctctatgatacaaatggctttttggagaagaacagggatccgttacctgctgatcttatcaatcttttatcatcatgcgactgccagttgctgaaattgttttcaactaaaatgcgtggcaaatcgcaaaagccacttatgttatcggactccacgaaccaaactgttggaacaaagttcaagggtcaacttttcaaattgatgaacaagttagagaacacaagtcctcacttcattcgatgcataaagccgaattcaaagcagcttcccagagtttatgaagaggatcttgtcttacaacagcttagatgttgtggcgtgttggaagttgttagaatatcaagatctggatatcctactcgtttgacacatcaagagtttgcaggaagatatggtttcttattgtcagacaaaaaggtcgctcaggatcctctgagcgtatcaattgctgttctgaaacaatatgacgttcatcctgaaatgtatcaagtgggttacacaaaattgtacctccgaactggacaaattgggatctttgaggatcggaggaaaaaggttcttcaaggcatagtgggcttacaaaagcatttccgtggtcacttgtctcgtgcatacttccaaaatatgcggaaagtaacattggttcttcactcctatatacgaggtgaaaatgcccgaaacttgtttgtcactcaagcaaagttcaatgcgcgtcctttatctgaagcaagcacaggtgagttcagggcagacatacacttgcaatctgcggttcgtggatggttggctcgcaaacatttcaatagtatgcaaagacaaaaagaactacgcaatgtggcgacaaaatcaaagaggaaagctggcaggaggatttcagaagacaaggatattcctctggagcagccacaagttcaaccaacatctatgtctgatctccagaaacggattttgaaatctgaagcagctttatcgcagaaggaagaagaaaacacagctttgagagagcagttgaggcaatttgaggagagatggtcagagtatgatataaagatgaagtcaatggaggaaacatggcaaaagcaaatgtcatcattgcagatgagtcttgccgccgctagaaagagtctagctgcagagagcattacgggtcaagcaggaggaagacaagacacatcgatatcacctttcggttatgactcagaggacacgatgtctactggaactccgggagtaagaactcctactaataagttcacaaacggaaacactcctgaactcagaatcagagagctcaacggaagtttgaatgcggttaatcatcttgcaagagagtttgaccaaaggagactcaatttcgatgaagatgcaagagctattgtggaggtgaagctcggacctcaggcaactccaaacgggcagcaacagcaacatccagaagatgaatttaggagactgaagctaagatttgagacatggaagaaagattacaaagctagattaagagatactaaagcaagactccatagagtagatggtgataaaggtcgtcaccggaaatggtggggaaaaagaggctaggggtcttattacttattagtgtgtgtggaatcttcatccacttagctttgtattagtatcacgatcccaaaatgttagattaagagcattgtagatttagctgtgagagacatgtatttttgag

SEQ ID NO: 629 - DNA, 626 bp, Arabidopsis thaliana
  Clone ID: ARATH-23APR03-CLUSTER237490_1
ctcacttttgttctctgttgcatcatcttccaaactcccgaagaagaagaaaataactacaatgagtcaacaacctcctgctgttggtgttcctccttctcatgcttatccggcggaaggaccacccaaggacgcttatccacctccgggacaaccctatcctcagcaaggatatcctcctccgcagggatatcctcaacaaggttatcctcctcaaggttatcctccgcaggggtaccctgaacaaggatatcctcaacaaggttacccacctcagcaacaacagcaacagaaacacagtcctggtatgcttgaaggatgtattgctgctctgtgctgttgctgtgtcttggacgcttgcttctgagtggaggtctccgcttgaagctgcaaaattggtttataccgatgatctcatctcattctctttcgtttctctacagacttgactctcttctaagcattttatcttagttactattagattatttggattttgccaaatgggaatgtaaatggttgggtgacccaattcatgttgcacattattggcttttaccctctgctttttcttcctagcttcatctaatgattgcaccctatttattttaaaaaaaaaaaaaaaa

SEQ ID NO: 630 - DNA, 1335 bp, Arabidopsis thaliana
  Clone ID: ARATH-23APR03-CLUSTER237585_1
aggaaaaaacttcagccatggccaattgcttcgcgccacaattaaccttcccgtccttctcgccacgccatttcagccctagaatgtcgcaccaatcaccaaaaccaagcacgagcaccaccacaagcatcttcacctccgccacaaagctactatggggaccatctcttcctccaggtctacttatctccaccgctcgaacagcttggacaaccgtgtggcagctcatgatgacccaactcgctccatccgattcatccgggtcatacacccgacccacttcaaaatttcgtctcgacccgacccaattcacttccgctgcttcctccgagctccacctctacgttggtcttccttgcccttgggctcaccgaaccctaattgtccgtgctctcaagggtttaaacgacgccgttccggtctcaatcgcatcacctggtcaagatggatcatgggaattcaaggataataatatcccaatcaaggataaggataaacttatcccgagtttggataaagcaaaccggtgccggaatcttaaggaagtgtacaaatctagaagtggaggttacgatgggaggtgtactgttccaatgctgtgggatttaaggaagaaagatgttatttgtaacgaaagctatgatattatcgagttcttcaattcaggtttaaacaaattggcccgaaatgataacttggatctctcgccaccagagttgaaagagatgatacaaggttggaatcagattgtgtatcctaaagttaacaatggcgtttacaggtgcgggtttgcgcagagccaagaagcgtatgatggagcagtgaatgaactctttagtaccttagatgagattgaggatcacttgggtagtaatagatacttgtgtggagaaaggttgacattggctgatgtatgtctgttcacaactctgattcgttttgattcggtttacaacattctattcaaatgcaccaagaagaagcttgttgaatacccgaatctctatggctatttgcgcgagatttaccagattcctggtgttgcggctacttgtgatatttcggctataatggatggctactacaagacgctgtttccgctaaacgctagtggaattcaaccggccatttcttcatctggcgatcaagattctctctggagacctcataaccgagacttggtaggtaaagccattgaagcacagctttcggtttaagcgtagaaaactgtacataactcaatgataggattatccaacagcactcaaaagtatcatacaatgtaataagctttgatcttgtactattatcattcctcaaaaaaaaaaaaaaaaa

SEQ ID NO: 631 - DNA, 2936 bp, Arabidopsis thaliana
  unsure (1)..(2936): unsure at all n locations
  Clone ID: ARATH-23APR03-CLUSTER2375_1
gtctgaccccgaccccccccctgaccctaacctgaccccgcccnnnccgaccccgagacagagcgagagacggacccccctcccgntccgnccctccccccccccatcctcttcttcttcgtcttcatccgcgcatcaccagtttctctctctctctacaaatcttcttaacggcctttcatcaatggtcagcagacttagctttcgaacataggctaagaacgagcatgtcttcttgtcttcttcctcagttcaagtgcccacctgattctttctctcttcacttccgaacctctttctgtgccccaaaacacaacaagggttcagtcttcttccaaccgcaatgtgcagtatccacttcaccggcgttattaaaatcttcttaacggcctttcatcaatggtcagcagacttagctttcgaatataggctaagaacgagcatgtcttcttgtcttcttcctcagttcaagtgcccacctgattctttctctattcacttccgaacctctttctgtgcccctaaacacaacaagggttcagtcttcttccaaccgcaatgtgcagtatccacttcaccggcgttattaacttctatgcttgatgtcgcaaagcttagactaccctctttcgatactgattcggattcccttatatcagacaggcagtggacttatacaaggcccgatggtccttccactgaggcgaagtatttagaagctttagcctctgagacacttctcacaagcgatgaagcagtagttgtagcagcagcagctgaagcagtcgcccttgcaagagctgctgtcaaagttgccaaagatgcaacattatttaagaacagtaacaacacgaacctattaacttcgtcaacggccgacaaacgctccaagtgggaccagtttactgagaaggaacgtgctggcatattggggcatctagcggtttcggacaatggaattgtgagtgataaaatcactgcatctgcctctaacaaagagtctattggtgatttagaatcagaaaaacaagaagaaagttgagcttctagagtatcacccttcagagaagaagatgagctatcggcacgaatacaggaccttctgaagttagaaagacttcaaacagagcttacagagcgtagtggacgtcagccaacctttgcgcagtgggcttctgctgctggagtcgatcagaaatcattaaggcaacgtatacatcatggcacactatgcaaagacaaaatgatcaaaagcaacattcgactcgtaatttcgattgcaaagaattatcaaggagctgggatgaacctccaagatcttgtccaggaaggttgcagagggcttgtaaggggagcagagaagtttgatgctacaaagggttttaaattttcaacttacgcgcattggtggatcaagcaagctgtgcggaagtctctctctgatcagtccagaatgataagattgccttttcacatggtggaagcaacatatagggtgaaagaggcacggaagcaactgtacagtgaaaccggtaagtacccgaagaacgaagaaattgcagaggcaacagggctatcaatgaagaggctcatggcggttctactctctcctaaacctccgaggtcgctagaccagaaaattggaatgaatcaaaacctcaaaccttcggaagtgatagcagatccaaaagccgtaacgtcagaagatctcctaataaaggaataaattgggcaggcaccaggactgagtattagactcctcatggcggttgtactagctcctaatcctccgaggtcgctagactggagaatcggaatgaatcaaaacctcaaaccttcggaagtgatagcagatccagaagcagtaacgtcagaagatatactgataaaggaattcatgaggcaggacttggacaaagtgttggactcgttgggtacaagggagaaacaagtgatacgttggagatttgggatggaggatgggagaatgaagacgttgcaagagataggagagatgatgggagtgagcagggagagagtaagacagatagagtcatctgcattcaggaaactaaagaacaagaagagaaacaaccatttgcagcaatacttggttgcacaatcataattctttttctcttcaatatggaatgttttgtgcatagaacccacccacctgagcataacaagcagtaaattattactttttagtcgaagctaaagaatcgccgccatggacgccattgattccgtcgttgatcctctcagagacttcgctaaggatagtattcgtctcgtcaagcgttgccacaagccagatcgcaaagaattcacgaaagttgcagttcgtaccgcgattgggtttgtggtaatgggattcgttggcttctttgtgaagctaatcttcattccgatcaacaacatcatcgtcggtgccacttagaaagcaaaggatacacaagtcagttctatgttttgagaaaggaagatttagaggttatcgtgttttaagtgaaaggcacaagtcagttctgtgttttgtgtaatcggatcccatttgtttcaatgtttttttggttcttcttttttgttcacaactgaaaaatcggacgtgttttgaatgtagagcaaactaatttaaaaagctgtggatttcgtagtccagcttggtctgttaaaacttttgcatccaaagctcgacctatannnnnnnnnnnnnnnnnnnnnnnnnnnnaaaaaaaaaaaaaaaaaannnnaaaaaactcaagggggggcccggnacccaattctccgggggggggccgggacccaaatccccccaaaggggatttaaattacattccctgggccgaccttgttaaaccccgggttgggaaaatcccgggggtcccccatttaacccgctgtggaaaaatcccccatttcgccactggggg

SEQ ID NO: 632 - DNA, 1313 bp, Arabidopsis thaliana
  Clone ID: ARATH-23APR03-CLUSTER2376_1
gccttgagagttctggtttctgcatctctctccttcttcgtttagactttagccattgaaggtcgcttcgattcgaaatcatggcggccgtaccgagaggcctcctttctcgaatcaatcagtttctatcaatacggtctataactccttcatcctctgaatctcttcctcattgtagtagcttctttctcctccgacgattcagctccgatactgggttgatggacggtggtggatctgatattatcggggctcagacccgaatcattgaggcgaaacaaggtgagatgtctagtagatccaagaggactgggatcatcgccgttaagtgtgggatgactgcgctctgggacaaatggggaaagaggattccgatttctattctttgggttgatgataatatcgtctctcaggttaaaactgttgagaaagaaggcatttttgcgttacagatcggatgtgggcaaaagaaaccgaagcatttgtcaaaagctgtggtggggcatttcagagcacaaggtgtgccgttaaagaggaagttgagggaatttcctgtgactgaagacgctcttcttcctgttggtacttcactcggtgtccgccattttgttccgggacagtacgttgatgtcactgggatcactcgaggaaaaggttttcagggatgcatgaaaagacatggtttcagtggaatgccggcatcacatggtgcttcattgtcccatcgaagcgggggttccacagggcaaagagatgctcctggaaaggtgttcaagggcagaaagatggctgggagaatgggtgcagatcagaggacagtaaagaacgtttgggtctacaagatcgatcctgcgaggaacctcatgtgggtgagaggacaagttcctggtgcagaaggaaactttgtgttcataaaagatgcatggtgcaagaaaccagacatctcaaagcttccgtttccaacttacttagctccagaagatgaagatccatcagaattagaaccgttggttgcagatcttggagaagttgacccatttatgttggcagagtgatgaaaacagcatgatcttgatctttatttgggcttttacaatgattagagaccagaaagaagctgtggaagtgaaggaatcacagagctaaagctttttgcagatgaatttgtctttttcttattttagttgtttggatgtatgatttgaaaacgattaaatagaggaatttaggcttgctcgcatttgttatatcacaatgcttaagagtttgcaataagcaatgaggaaaacacaagatcaaaaaaaaaaaaaaaa

SEQ ID NO: 633 - DNA, 1222 bp, Arabidopsis thaliana
  Clone ID: ARATH-23APR03-CLUSTER23797_1
ataattttttaaaaagtcatggattatcatcttagggttttgttctctgtttctcttatctttgtgttcgtctctgtttcggtttgtggagacgaagatgtgttgatcaggcaagtggttgatgaaacagagccgaaagttttgtcatcggaggatcactttactctcttcaagaagaaattcggcaaggtttacggttccattgaggagcattattacagattctctgttttcaaagcaaatctcctgcgagcgatgcgtcaccagaagatggatccttctgctcgtcacggcgtaacgcagttttcggatctgactcgttctgagtttcggagaaagcatttaggggttaaaggtgggtttaagcttcctaaagacgctaatcaagccccgattctccctactcagaatcttccggaggagtttgattggagagatcgcggcgcggttactcccgtgaaaaaccagggatcttgtggttcttgctggagttttagcactacaggtgcccttgaaggtgctcacttcctcgctactggcaaactcgttagtctcagtgaacaacagctcgtcgattgtgatcacgagtgtgatccagaagaggaaggttcatgtgattctggttgtaacggtgggcttatgaacagtgcctttgaatacacgcttaaaaccggagggcttatgcgagagaaagattatccttacaccggtactgatggagggagctgcaagttagacaggtctaagatcgttgcctctgtctccaactttagtgttgtgtccatcaacgaagatcaaatagctgcaaaccttatcaaaaacggtcctctagctgtggcgatcaatgcagcttatatgcaaacctacattggaggagtctcgtgtccttacatatgctcgaggcggctcaaccacggtgtgttgttggtaggttatggctcggctgggttttctcaagcaaggttaaaggaaaaaccgtattggatcatcaagaactcgtggggtgagtcttggggtgagaatggtttctataagatatgtaaaggtcgtaacatttgcggtgttgacagtttggtctccaccgtcgctgctaccacttcttgagcttttcattattctgctgcaatgctatttaaagtctgtaaataaatgattaacaaaaacatatttcttggtgaattcgaaacaacaatgccataggcttacaaaaaaaaaaaaaaaa

SEQ ID NO: 634 - DNA, 1174 bp, Arabidopsis thaliana
  Clone ID: ARATH-23APR03-CLUSTER23831_1
gtgaacctccggccactctcgccgaaatcactctcggcccctgagctagacttctttgtcgtcacccccccccccccggggggcctggccccctcgttgccgccgggtccccccccagggcgggttgattgagtctcactcttgctcagtagagctcccatcaatggcttcaatcaacctcttcctcttcgctttccttcttcttctctctcacgcttcagcttcaacggtaatcttctacaacaaatgcaaacacccagtttggccaggtatccaacccagcgccggtcaaaacttactcgccggcggtggttttaagcttccagctaacaaagcccactctcttcaactcccaccactctggtccggccgtttctggggtcgccacggctgcaccttcgacagatctggccgtggtcactgcgccaccggagattgcggcggttctctctcctgcaacggtgccggcggtgaacctccggccactctcgccgaaatcactctcggccctgagctagacttctatgacgtcagcctcgtcgacggttataacctggccatgtcgattatgccggttaaaggttcaggtcaatgtagctacgccggttgtgttagcgatctaaaccagatgtgtccggttggtttacaagtccggtcacgtaacgggaaacgtgtagtagcctgtaaaagtgcttgctctgccttcaattcaccacagtactgttgcaccggcttgttcggtaacccacagtcttgcaaaccaacggcttactccaaaatcttcaaagtcgcttgcccaaaagcttactcttatgcttacgacgacccaaccagtatcgccacatgttccaaggctaactacatcgtcaccttttgccctcatcatcgccattaaattagccagtaaagaagaagaaacatttctctattagcaacaaactcttgtcatgtttcgaattcttgagtttctatatctacttttgtaacactatgattgaatgcagatcctattatcaataaaaaaaaaaaaaaaaaaaactcgagggggggcccggtacctcaaccaacttagtgatgtgtcttgtgagtgttaatctccaaattctaaatccttttatgttcagtggcttatgtactagacaatgcaagattaatgctatttttttgctgggtc

SEQ ID NO: 635 - DNA, 1137 bp, Arabidopsis thaliana
  unsure (1)..(1137): unsure at all n locations
  Clone ID: ARATH-23APR03-CLUSTER239050_1
aaaaaaaacaaaaaaagaatcaatggaggatcatgagaagattgatgggaagaagaagaagaagaagagtgtggctttgattccggctaactacgtctccattcttcagcttcaggaacgttggctgaaggagaaagagaagaaacaaaaggaaaaagactttgtagagagaggagtgaaacagcaggttgatcagagacaacgaaggagagaagaagaagaaaatgtagtgaaggccatggaaacaaaagtgaagctcgaggaacatagtttaagcggaggtgttcgtatgcattgtagtgtgaatcggtggaaaagggatcaagtatgcgttaagaaagaggaaattaaggtttctggaattgtgagcaacaaggacgaagatagtgtagattcgaggaagaaaaagaagaagaatccggtgaaagagaacactaggagggttttcaagtccaaaggagagaatgctgctaaggaagtaactcaatgctggatcaagaagaaagtagaagaggaaagagagacaagtgaggtcaagggaactgccagattgattagcaaacaaggttattaccaaaacaagagacatgattggtcgtctacacgtgttattagggcaacaacaagtactatggtttgggtgaagaagggtaagaaagatggagcagttggtgaaaataaagtctgaattatcctttcaaggtttgaactttggatcatttgttttctaggtcttagagtaattgaatcggagctgaataataatgtgtgatgttatcgattatcatggtcttcaggtgttgtaggattattagaactttcccataagcatttgcttgtcaatgtctaaggtttgattcttatcttgtgtctacaattccttggggattgcattgtagtaggtgtgtatgtaagtaaatgtatacaaataaacacttcaacttaagcaatataatatcatttctactaaaaaaaaaaaaaaaaaaaaaaaaaaaaaaaaaaaaaaaaaaaaaaaaaaaaaaaaaaaaaaaaaaaaaaaaaaaaaaaaaaaaaaaaaaaaaaaaaaaaaaaaaaaaaaaaaaaaaaaaaaaaaaaaaaaaaaaaaaaaaaaaaaaaaaaaaaaaaaaaaaaaaaaan

SEQ ID NO: 636 - DNA, 1281 bp, Arabidopsis thaliana
  Clone ID: ARATH-23APR03-CLUSTER23998_1
gtcttgattttataaacaaaagaaagaaagagagagagatcttcctcgggattgcaacatgttggactacgaatgggataatccttcctccatcgttctctccggagatgaaagaaacccggactctgacccgacccggtcatccttctcctttttcgaccccatctcccattacaacaacgaccaccgtcacatcaccatttctcctcccctcctctcttccttctctaaccaacaacaacagcatcacctcaccctctacggtcagaccaacagcaacaaccagtttcttcatcatcaccatcaccaccactccttgtacgggtccaccaccaccaccactccttacggcgcctccgatcccatctaccatccccactcttccgctccgccagcctccttgttctcctacgaccagacaggaccgggctcgggatccggatcttcctacaacttcctcatccccaagacagaagtggatttcacgtccaacaggatcgggctgaacctgggaggccgtacgtacttctcagcggcggacgacgacttcgtgagcaggctatacaggaggtctcgaccaggtgagtcagggatggcgaactcgctgagcacgccgcggtgccaagcagagggatgcaacgcggatctgagccacgcgaaacactaccacagaaggcacaaagtgtgcgaattccactcaaaagcatcgacggttgtagccgccggactaagccaaaggttttgccagcaatgcagcaggttccatttgctgtcggaattcgacaacgggaaacggagctgccgtaagcgacttgctgaccataaccgccgccgccgtaaatgtcaccaatcagcctccgccacccaagacaccggcaccggcaagactactccaaagtcaccgaacgattcgggtgttaaagcgtcatcgtcaccgtcgtccaacgcgccgcctacgatatcactggagtgcttccggcaaaggcagttccaaacgacagcgtcttcatccacgtcagcgtcttcgtcttcaaattcaatgtttttctccagcggatagttataagctttactcatatgatatattatgcttaaaatgagaaatcaaaggactcttcaatatcactagttaatgctagctgtctatcatctgaattagtcggtaatgtgtaacgttttatttcatgtctctcgtttcgtttgtcgttttcatattgtttttgacttagtagaggtttatttaattaaccaacaacatatcagatttctgattctattatc

SEQ ID NO: 637 - DNA, 1231 bp, Arabidopsis thaliana
  unsure (1)..(1231): unsure at all n locations
  Clone ID: ARATH-23APR03-CLUSTER2403_1
gctcactagtccccccccccccnacccaaaacaatgccacttctcctccgtcgatttccctctccctccgtcgtctcctccttcttcctccgtcgctcaatggcttcctcaacaatctcctcggatataatcactccatcaaacaccaaaatcggatggatcggaaccggagtcatgggccgatcaatgtgtggacacttaatcaaagccggttacacagtcaccgtcttcaatcgaaccatctccaaagctcaaactctcatcgacatgggtgctaacgtcgccgactcaccaaactcagtcgctgaacaatccgacgtcgttttcaccatcgttggttatccttccgatgtccgtcacgtccttctcgatccaaagtccggagctttatctggtctccgtcaaggaggtgttctcgttgatatgactacttctgagccttctttagcagaggagatagctaaagctgcttcctttaagaattgtttctcaatagacgctcctgtctcaggtggagatttaggagctaagaatgggaagctatctatattcgccggaggtgatgaaaccaccgtgaaacgtttagatccgttgttttcgttaatgggtaaagtcaacttcatgggaacaagtgggaaaggtcaatttgcgaaattggctaatcagataactattgcttcgactatgttaggacttgtggaaggtttgatttatgctcataaagctggacttgatgttaagaagtttcttgaagcgatttctactggtgctgctggttctaagtctatagatttgtatggagataggattctgaagagggattttgatcctggtttttatgtgaatcattttgtgaaagatttagggatttgtttgaatgaatgtcagaggatgggtttggctttgcctggtttagctcttgctcaacagctttacttgtctcttaaggctcatggtgaaggtgatcttggtactcaagctcttctcttggctcttgaacgtctcaacaatgtctctgttcaatcatctgactcttgatttaggttctgttccactttctgataatgcatctgttggagattttatgttgttatgaagtaaagatttgatcttttgtgtacccatttgttggtaaaacatgatttgaagtaaacttttgtgtacgcatatgagattcatacacagtagttttatgtgtacccaaaaaaaaaaaaaaaaaaaatctttatat

SEQ ID NO: 638 - DNA, 1740 bp, Arabidopsis thaliana
  Clone ID: ARATH-23APR03-CLUSTER24041_1
gttaaatattttctcctgagatttttttcttcaattccaattcagtgagcatttttattgtttctccgatctgaattccggcgatcaaattacgacagcgactaattcaacgttttaaattactctgtgtgagagaaatttgcgctctggatttgcatttttctaatcctttatgcaaagcagtgtgtatcgtgataaagctagctcgatcgcgatgatcttagaaactcagaggaatgttgaattccctcatcggatcgttgataagcgtcccaggaaacgtccccgattgacttgggatgctgctccgcctcttcttcctcctcctcctccacccacggtatttcaacctccgttgtactatggtccggagtttgcgagtggtttagttcccaattttgtttacccaaacatgttctataatggccttcctcgtcagggctctcctccctggagaccagatgataaagacggccattatgtctttgttgttggggatactttgactccacgatatcaaattctcagcaaaatgggtgaaggtacatttggacaagtattggaatgctttgataataaaaacaaagaagtcgtggcaatcaaagttatacggtccataaacaagtatcgtgaagctgccatgatcgaaattgacgtgctgcagaggcttacaaggcatgatgtcggtggttctcgttgtgtgcaaatacggaattggtttgactatcgtaatcatatttgtattgtatttgagaagcttggaccaagcttatatgattttctccgcaaaaacagctaccgttcatttcccattgatcttgttcgggagcttggcagacaacttttggagtctgttgcatatatgcatgatttacggctgatccacacggatttgaagccggagaacattcttttggtatcgtctgaatatatcaaaatacctgattataagtttctatcccgacccacaaaagatgggtcatacttcaagaatctgcccaagtcaagtgccatcaagctcattgatttcggaagtacaacatttgaacatcaagaccataactacattgtatccacaagacattaccgcgcaccagaagttatcctaggggttggatggaactatccatgtgatctgtggagtattggttgcatacttgttgaactttgttcgggagaggcgcttttccaaacgcatgaaaacttggaacatttggccatgatggaaagggtcctaggacctttaccacctcatatggtgctcagagccgaccggcgctctgagaaatacttcagacgaggtgcgaagttagactggcctgaaggtgcgacatcaagagacagcttaaaagcagtatggaaacttccccggctaccgaacctgataatgcagcatgtggatcactcagccggtgatctgatagacctattacaaggtctgcttcgatatgatccaacagagaggttcaaggcaagagaagcactgaaccatcccttcttcacaagaagccgggaacagagtataccacccttcaacccaaaccctcatccatttttatacaaccaaaagaactaaaaaagaaaagaaaaaagaaacagcagataatgtttggatacatctgcagtttctgtgtatccttcagtttcctgtgtttttgtagcattttattatatatatgattatcatgtatagaaatgaaagaaagagagaaaggtttgtgcctaattttttcgagaaaa

SEQ ID NO: 639 - DNA, 2540 bp, Arabidopsis thaliana
  Clone ID: ARATH-23APR03-CLUSTER24078_1
ttttttttttttttttttcttttttttcttttttttttttttaatttaaagcccatcttggcccaatagatagtaaaatattcgtaatcggtcaacgcttgccggcgatttgccatacaagtacaactttacgtagccatacagattcacctttaaagtttacagaagtaaccctctctctctgtcttcttcgtccttgggctttattatatataagtcatcgaatcagttgacgctaaaatcaaaaacagaaagcgcgacgtgcccaatcatttcttctgatccgatctgactctgcacccacccatcaatggcctccagatctctcaatggcgattccgacattgtgaagccgaggaagattgcactggtcaccggaatcactggccaagatggatcttacctgaccgagttcctgctcgagaaaggctacgaagttcacggcctcatccgacgatcctccaattttaacactcagcgactcaaccatatctacgttgatccccacaacgtcaacaaagctctcatgaagctccactacggtgatctctctgatgcctcctccctccgccgttggctcgacgtcatcaagcctgacgaggtctacaaccttgctgctcagtcccacgttgccgtctccttcgagatccctgattacactgctgacgttgtcgctactggagctcttcgtctcctggaggctgtcagatctcacaacattgacaatggccgcgccatcaagtactaccaggctggctcttcggagatgttcgggtcaactcctcctccgcagtcagagaccacgcccttccatccgagatctccctacgctgcgtccaaatgcgctgctcattggtacacagtcaattaccgagaggcctacggtctgtacgcctgcaacggaatcctcttcaaccacgagtcacctcgcagaggcgagaacttcgtgactcggaaaatcactcgggccttgggaaggatcaaggtcggattgcagaccaagctcttcctgggaaatatacaggcttcaagagactggggtttcgcaggagactacgtggaagcaatgtggctgatgctgcagcaggagaaaccagatgactatgtggttgcaactgaggaatcacacaccgtcaaggagtttctggacgtgtctttcgggtacgtggggctcaactggaaagaccatgtcgagatcgacaaaaggtacttccggcccacggaggtcgacaatctgaaaggagacgcaagcaaggcaaaggaaatgttggggtggaagccaaaagtagggttcgagaagctggtgaagatgatggtggacgaagaccttgagctggccaagagggagaaagtgctcgccgacgctggttacatggacgctcagcagcaaccttgatatggggaggtggcaaagaagagtaatcattatctgctttttcattgaaatgtaattttgtttcatttgttgttgttctctttcgttgtttcaagttgttcaactccatacactgccaatcgtccattgtggattttgtatcaaaaggcaaacaaagcatatttattacatatgaattttccccttatcagaacaatggtttcttactggtcacaagcgattgtacaaatcgaaaagcctaaagatgaaatgacaaaagaaaacaatgatttgtaacaaaaagatcaatcaatagcatcatcatgcatctatgcaaaatcagaggagatcagaaagtatgctgtagaactacacgtattcgattcaccaatctaactaccattaagagtatttactcttatgcctcgggtttagaagacagagttgtagtagtatttatactgaccgaatcgggagatgcaagagaaaaaggcgccactgtggacctcagagattcaggtccctcagaattaattctcttacataatgtatcgcagttgctgatcacctctgtcaatcttcctttaagctccccgagctccacctgcaaaccatgaacttgagataaatgctgggcagttgtcctcattgcagaaacagagtggttaaacctctgtaaaagtttagtcgccaaagcatctgcgacttctatcttgttttctatatcttcctgtctcttggtaatttcttgagctttgttctcttgccattctcggtaaatggagaagagctctacaagtatttgaggatcaaccgtattggaagaggaactggatagagcttttctcactaagatatctgttaagctactttccgtgggaggagacttcaatattggcctacttactgtgagagctttaagattctcgagaatgggatcgactatttctgatcgatgagatatagtcgtaatcacatcacctcgattttcctgagagcctagcagagttgaatctgatgctcccatttgcttcacagactccgattagggaattttattcaaggaatcagcagttccgttttgggagaaatctggaaacgctcgtagcaaggttttctcaactccccccttctgtcgtcttctccagccgtacggacgcgtggg

SEQ ID NO: 640 - DNA, 2810 bp, Arabidopsis thaliana
  Clone ID: ARATH-23APR03-CLUSTER24093_1
tcactagtccccccccccccgatcatattcatcaccaaccgaaaacgcctctggatctcgccagatccaattcggaccaaatcagaacccaaaattcgactcacttgtctcactcgactcgaatctccattctttgtctgaaagtttcttcctttttgtttaaccaatggcgacctttatcaatctggaggattccccaatgtttcagaaacaggtttgttccttggaggggacagctgacgagcttaaagatcgttgtcagaagctatacaaaggtgttaagaagtttatggggactttgggagaggcatctaaaggagaaagtgcttttgcagcttgtctggaagaatttgggggtggacctgatgatcctatcagtctttcaattggagggcccgttatatccaaattcataaatgcacttcgagagcttgcctcttataaggagtttctttgctcacaggtggagcatgtgctacttgagaggttgatgaactttattagtgttgatctacaagaagctaaggagtctcgccatcgatttgataaagctgctcattcgtatgatcagtcgcgcgaaaagtttgtgtctttaaagaagaatacaagaggagaaattgtggcagagttggaagaggatctggagaattcaaagtcaacatttgagaagagccgtttcaatctagtgaattcactgatgactattgaagcgaaaaagaagtatgagtttttagaatctattagcgcaattatggatgcccatctgagatatttcaaacttggatatgacttgttgaatcaactggaaccatttatccatcagatattaacatatgctcagcaatcaaaagaacagtctaagattgaacaagatcgactagcaagacgcattcaagaattcaggacccagtctgaattagacagccaacagctggtcgctaatgcagagtcgtctggtgctaacgggaaccgtgttggtgggaatatcccttacaaaaataccgaaacaagtttaacagcagacaaggaagtaattaaacaggggtatctattaaagcgttcgtcaagtttgagaactgattggaaaagaaagttttttgtccttgatagtcatggctccatgtactattacagaactaatggtaataaatcaatgggatctcatcatcactatagtggatcatctgaccataatactggagtttttggtcgatttcgggcaagacataatcgatcaggttcgctcactgagggcagcttaggctataatactattgatcttcgcacttctttgataaaactagacgcagaagacatggatcttcgtctctgtttcagaattatttctcctcaaaaaacttacacacttcaggctgaaaatggagcagataggatggactgggtaaataagatcacaaaagctatagggacgcttctcaattctcattttctgcaacagtcacctgtgcgatacttggataaagacaactccagttctgctcctgctaatgctgtcgtctccggggatcaaattcgacataatgattcaagacaaaatatcggggatgatgtctcaacaatactcagaggacttccgggaaataatgcatgtgcagagtgcaatgctcctgagcccgattgggcatcgttaaatcttggagttttgttgtgcattcaatgctctggtgttcacaggaatctcggggttcatatatccaaggtgaggtccctctcattagatgtgaaagtgtgggagccaacgatcttggacttatttagaaatttgggtaatgtatactgtaattcactgtgggagggactacttcaccttgacgatgactgcgaagacggatcagcattgtcgcatgcttcagtttcaaaaccatgtccagaagattcctttagtgtgaaggagaaatacattctaggaaagtacctggagaaagcattagtcatcaaggatgaaagtgaagcaaacctttctgctgcgagtagaatatgggaagctgttcaaagcagaaacatacgagaaatctatcgacttatagttactactggggatgtaaatatcatcaataccaagtttgatgatataactgatatcgatgcatatcaccatattgatgcagcagagaaagcagtaaagaaaagacatgatccaactgtatgtcagagaattaaagaatccaacgaaccaagaagctgtcttcaaggatgctccttgctccatgtggcttgtcacattggtgactctgtcttgcttgaattgttgttgcagtttggtgctgacctaaacataagagattatcacggaaggactccgttgcaccattgcatatcatcagggaaccacaaatttgcaaagattctactgcgaagaggagcacgtccgtcgatagaggacgatggagggctaagcgttctagaaagagcgatggaaatgggagcgataactgatgaagagctctttcttctcttagccgagtgcgcataaaccttcactgcacaccgacatgcacagcttctttagaaacacctttggaagaccctaaaacgcaaaacaaggaggtggtacaagctactagattccgtaaaggcatgatgaaacagccttttgagtcgttgtttgtcaatgtacaagggatatgattttactgacctacagtttatctctactcacttttcaagtttcggaagttttgattttttttttaaacttcacttttgcatttacatttgagttttacatatgaaaaacaatttcaataaacatcattcttaaatatccaaaaaaaaaaaaattgtttgtt

SEQ ID NO: 641 - DNA, 1328 bp, Arabidopsis thaliana
  Clone ID: ARATH-23APR03-CLUSTER24126_1
aattaaaaaattcatccctattcgacttcactttctctctctgcctgaaaattttgatcggtttctggtttctcggcgaaagaagtaaagtggccgacaaatagtgatctcgtgaaggaatcagtgtgtacagtggaagaagatgatacatttggctggatttacatgttgcttaggcggcgtcgctctttatcttcttaccaggagcacaggcagagatatcaaatcaatcactagggtttaccaactcaaggatttggaacaattagtagaagtagagagcaaggtggtacctttgatcatcgcagtatcaggagatgttggctctgagacacctattaagtgtgagcatagtgatgttctcggtgtatttctcaagagaacggcagaacaacaggttttgagacgtaattggagattttcatgggttcgaaatagtacattgatgcagccgatgactaaggaagtcccctggtatctggacgacgggacaggtcgtgtgaatgtagatgtatctcaaggtgaattaggcttggcgttgacggttggtagtgatgtatttgaaaaggcagagccggtatcgcttgttcaaggagcgttgggttatcttaaaggctttaagatacttggagtaagacacgttgagcgtgttgtcccaattggtacaccgcttacagttgttggtgaggctgttagggatggcatggggaatgtcaggattcaaaaacctgagcaaggacctttctacgtcacttatataccgctagatcagctcatctctaaattgggagatttgtcaaggaggttcaagtatgcctccatgggtttaactgttcttggtgtgattcttatttcaaagcctgtgattgaatatattctaaagagaattgaagatactctagaaagaaggcggcgacaattcgcactgaaaagagttgttgatgcagctctaggagagccaaaccagtaactggaggtggtacaagcagagatggtgatacacctgatctctgtgtggtttgccttgaccagaagtataacaccgcttttgttgagtgtggtcatatgtgctgctgcacaccatgctccttgcaactaaggacctgtcctctttgccgggaacgaatacaacaagttttgaaaatttaccgccattgaaggacaaaactcagaacgatttttacaagcgaacaattactagtcttgtacatatagtaaagcctttgtatcatgagtttttgactagaaatttttttgcattgatagattgtgattgaacaaatgctaatataaatttcaagcttagatttgcaaaaaaaaaaaaaaaa

SEQ ID NO: 642 - DNA, 1689 bp, Arabidopsis thaliana
  unsure (1)..(1689): unsure at all n locations
  Clone ID: ARATH-23APR03-CLUSTER24133_1
aatttgttggtaaatggaaccactcatcagcccacaaccacgtttccgcctccaacccataccggaaaatccctcctcctcctcctcctccgcctccatcacaatccctcgctctatctcaaacacttccttcttccatgaaatctcccaagaacgtcttctccttcatcatcaagacctcgaacaatccgtacaagacgacaaagaagaccaagactcagactcagacgaaacaaatcgctttttatctcagacaagaccacttcaccgatctcgtacagctccagctatggtaatcatcaaagacttaagaaccaaacctccagaaaccaaaaaaccatcaccagtctctaaatccataatcagacaagcgattttcttgctaatcgtctacttaaccttaggcgtttcaatctactcattcaatcgtgaccactactcaggaatcgaaacccatcctgtagtcgacgctctctatttctgtatcgtcactatgtgtactattggttacggtgacatcgctccgttgactccatggacaaagatcttcgctgttgttttcgtcttgttcggattcgggttcttggatattttactcagtggtgttgttaactacgttttggatcttcaagagagtatgattctcaccggaatccaaacgaggcagcatcatcaacaccatcatcatcatagattctctgctaaagattatattattgattttgagaaagggaggatgaggataaggatgaaagtttgtttagcgttatgcgtcgtcgttttgtgtatcggtgttggtgctttggttttgcatttcgttgaggaattgggttttgttgattcggtttatttgtcggttatgtcggtgactactgttggttatggtgatcgtgcttttaaaacgcttcaagggaggctttttgcggcggtttggctacttgtttcgactcttgcggtggcgcgtgcgtttttgtatttggcggaagcgagaattgatcgccggcatcggaaagctgttaaattggcgttgaatagagaaatcactgttgatgatttgctcaaagctgatacttatcaacatggtttcatcagtaaatcagagtatatagtgttgaagcttaaggaaatggggaagatcactcagaaagacattgaccaagttgtgattcagttcgagaaacttgatcctaatcaaataggaaaaatcacattacctgatcttttgggggatcctttgtgacagaagaacattctctgtctctgcttttttaggttttcttcttattcaattatctttttttttttaattcctttttaaagaaaaataactgaatatatgtagcaacagtgattcatacaaagaattatctctcagtttataagagataatatgaaaatgtatatgctttatttttgctctctataaaaaaaattatgttcaaagaanancannngnncgtnncanannnccnncccnncnnnccccccnaacngngcgccnaancangnaacncnccccnncngngggnccnnannccnncnnanncccccggggggggggnccgggccccnatcccccnntaangggggcnnttaanannnncngggcgcnggntttnnnncaggncgggngggggaaacccnngggggtnccccnanttaaatcgntnnggnanantacccctttgc

SEQ ID NO: 643 - DNA, 1319 bp, Arabidopsis thaliana
  Clone ID: ARATH-23APR03-CLUSTER24157_1
aaatccaccaaaaacaaaaaatgtcgacttctaaagccataaccttaactctcttcattgcaacaacattactagcgccctgcaatccataaaaacaaaaacaaaaatataatgtggacttctaaaaccataagcttcactttcttcatcacaacaatacttctcgcgtcctgcaacgcatccgcaaaggccaaaacgcaaccgctgttcccagcgattctaatctttggtgattcaacagtcgacacaggcaacaataactacccttcacaaacaatcttcagagctaaacatgttccttacggtattgatctcccaaaccactcacctaacggaagattctcaaacggaaaaattttctccgacataatcgcaaccaaactcaacatcaaacagtttgttcctcccttcttacaaccaaatctcaccgaccaagaaattgtaaccggagtctgttttgcatcagcaggtgccggttacgatgaccaaaccagtctcacgacacaagcgattcgtgtctcggaacaaccaaatatgttcaagagttacattgctcgtcttaagagtatcgtaggagacaagaaagccatgaagatcataaacaatgctttggtggttgtgagtgcagggcctaatgatttcatcttgaattattacgaggtttcccgcatggcgtcgcatgtatcctagcatttctgattaccaagattttgttcttactatgcttaacaatttcgtgacggagctttacagcctaggttgccggaaaattttggtcggaggtttaccgccaatgggatgtttaccgattcaaatgactgctcaattccgcaacgtcctaaggttttgcttggaacaagagaacagagactctgttttatacaatcagaaacttcagaagctcttacctcagacacaagcatctcttacaggaagcaagatcctttactctgatgtctatgaccctatgatggagatgctccaaaaccctagcaaatacggatttaaagagacgacgagaggatgttgtggaacagggttcttggagacgaacttcatgtgtaatgcttattcttccatgtgtcagaatcgctcggagtttctgttctttgactcgattcatccatctgaagctacctacaattacattggtaatgttctggatactaagattcgtgggtggcttaaggcttaagttatcaagatttgcaaagattgaacaaaattatctgtttcataatgtgactatttgtggacttcgtttgtttatcaactattaactttggctcttaaaaaaaaaacaaaaaaaagaaaaaaaa

SEQ ID NO: 644 - DNA, 926 bp, Arabidopsis thaliana
  Clone ID: ARATH-23APR03-CLUSTER24159_1
aatactttttactcctaccttctcaattcgtccgatttcttcacaaattcacgagagagataatggaagtaggatctgcaacgaagaagcttcagtgccaacgtattggctgcaacgccatgttcaccgatgacgacaatcctcaaggttcttgtcaatttcatgcttccggaccattttttcacgacggaatgaaagagtggagctgctgcaagcaaagaagtcatgatttcagtttgttcttggaaattccaggatgtaaaacaggtaaacacacaactgagaaaccagttctggccaaatcggttccaaaacatcctgttgcggctcctacttcatctccagatgccaatgcagcaacaaaagactcttgctccagatgccggcaaggcttcttctgctcagaccatggatcccaacccaaagaacagatcaagcagaccctgaacacaccgggacaagcagaagaagaaaaaattgaacccttagcgcctccagtacaaaaggctgtgatagacattaatcaaccgcaagtctgcaaaaacaaaggatgtggccaaacattcaaagagagagacaatcatgagactgcatgtagccatcatccaggtcctgcggtcttccacgacagactgagagggtggaaatgttgcgatgttcacgtgaaggagttcgacgagttcatggaaatacctccttgcactaaaggatggcatagcagcagccctgatccggcggtctgatatattttttttcctgagattttcgattcaaagattaatcatcttttctaattgtgttttcatgttcttcttatcatatggaattctattttagatttgttatagaactttcagttgacagatatatgtaatggttaaatgctcatcttctgtgttttggaaaaaaaaaaaaaaaaaaaagaa

SEQ ID NO: 645 - DNA, 2547 bp, Arabidopsis thaliana
  Clone ID: ARATH-23APR03-CLUSTER24279_1
gagagggatctacaaccctgttaccgcccaatttcgcagtcactggttcattcctttctcttcttcctcttccactctctctctcgacccaagttttgaaaccatgaaagaccacgatttcgacggcgacaaagggcttgccaagggatttctcgagaatttcgccgacgctaatggcagatctaagtacatggagattctccaagaggtttcaaatcgtaagattcgagctattcaagtcgatctcgatgacttattcaattataaagatgaaagtgaggagtttctcggacggttgacggaaaacactcgccgatatgtttcaattttctccgccgctgttgacgagttgttacccgaaccaacggaagcgtttccagatgatgatcatgatattctcatgactcagagagcagatgatgggactgataatccagatgtttctgatcctcatcagcagattccttctgagattaaaagatattatgaggtttattttaaagctccttcaaagggaaggccatctaccatcagggaggttaaggcttcacacattgggcaacttgttaggatatctggtattgtgacccgttgttccgatgtcaagccattgatggcggttgctgtttacacatgcgaagattgtggtcatgagatttaccaggaagttacatctagagtcttcatgcctttgtttaagtgtccctctagtcgctgtcgtcttaatagtaaagccgggaatcctattcttcagctcagagcatcaaagtttctaaagtttcaggaggccaagatgcaagagttggctgagcacgttcccaaagggcatattccgaggtctatgactgttcatctaagaggagagttgacaagaaaggtatcaccaggtgatgttgttgaattctcagggatttttcttcccattccttacactgggtttaaggcacttcgagctggcttagtagcagacacctatctggaagcaacgtctgttactcatttcaagaagaaatatgaggaatatgagtttcagaaagatgaggaagaacagattgcacgtttggctgaggatggtgatatatacaataagctgtcgcgatccctggcccctgagatttatggacatgaagatattaagaaagctttgcttctccttcttgtgggtgctcctcacaggcaattaaaggatggaatgaagattagaggagatgtgcatatctgtctgatgggtgatcctggagttgccaaaagtcagcttctcaagcacattataaatgttgctccaaggggagtctacacaacaggcaaaggtagcagtggagttggtctaactgccgctgttatgagagatcaagtaacaaatgagatggttttagaaggaggagcactggtgctggctgacatgggaatctgtgcaattgatgagtttgataagatggatgaatcagatcgtactgctattcatgaagtcatggagcagcaaactgtaagcattgcaaaagctgggattaccacgtctttgaatgctcgaacagctgttcttgccgcagccaatccagcctggggaagatatgatttgcgaagaactccagctgaaaacattaatcttccaccagcccttctttcaagattcgatctgctgtggttgatcttagatcgagctgacatggacagtgaccttgaattggcaaagcatgtgcttcacgtacatcagacagaagaatctcctgcgcttggtttcgagccgctggaacccaatattctccgtgcatacatttcagctgcaaggagattatcaccatacgtcccagcagagttggaggaatatatagcaactgcttattccagcatcaggcaagaagaagcgaaatcaaacactcctcattcttacacaacagtgaggacactgctcagcattctgcgcatatccgctgcattagcaaggttgagattttcagaatcagtggcacagagtgatgtggatgaggcgcttagactaatgcagatgtcgaaaatatcattgtatgctgatgaccgacaaaaagcaggactagatgcaatatcagacacatactcaatcataagagacgaagctgcaagatcaaaaaagacccatgtgagctacgcaaatgccctgaactggatctccagaaagggatacagtgaggctcagctaaaggagtgtttggaggaatatgcagctttgaatgtttggcagattgatcctcacacctttgacatccgttttatctgagtaacaccacccaaaaaaaaaaaatggaaacaaaccaagtctctcttgttatgttgtgtgctttatctctattatcttatcacatttcttaacgtagagaccttagaagtggaatctatagaagtgatctcttgattgcagaacaaactttacttttggaaatttagatgtgactttgtactcttgcagttcttttcactctcgcaaatttaatacggttttgatctaggtttgattaaaacacttcttagtctaattttgtatccatgtcagtaatatactttcagtttggt

SEQ ID NO: 646 - DNA, 1546 bp, Arabidopsis thaliana
  Clone ID: ARATH-23APR03-CLUSTER243032_1
aaatcctttcacccctcccgttcccactttattgtgtcgattcggtaccgggccccccctcgagtttttttttttttttttaaataaaaactaaacaagcattgataatataactccataattaatcaaagtgactgtttacagtactagtttacaggcacaagattgaagaaaggccaaaactcaaacaaaaagtcgttattaccaaactccataactcctaaacctggctgctttcgtcggacactgaactagtcatcttcttcatcactctagacggggacgagcttggagtgggagtctccatcaagctatacgattcgatatcaccagagatcgccaaattcgtactcggcctcagtatctccgctaatggtccaccaggtgtggtagacatcggagcaagccagcttgacatctcctctagtgaagaagtcacaccataaggaccatacccgtgatgatcctcactacccgacccgattacacctaagcccatttgtatcaggcccatttcgtcttggcccattaagttgtttcctcccattgagagatcaagcgagtaaagagagagattgccattggaagaagaaacaggtgttgaagttgtactctgtttttcagatgatcttactccatcggaccatacatctatgaaattcagatacttgttctcttgctctgttgttgccaatacagtaaatttttcacttcctctggagtctctatagtttgagattgatgatgaaacctccattggctcaagtgttttgtctttgatggaactactagataacttttgaggaagctttttgagatctctgtttttcacagaaccaccattgttgttagggcgagaataaggaggttccacatgctttcttgaacgaggacgacctctgtgtaagtgtttctcacagtatttgtgattagagacgacttctttcgcgcatctacatttctttccgtctgttctccggcatcttcccggctctaaatctccggcgatgtttttattgttacaaggagaggcagaggatggtgaagaaacaagtagatcgaaaggaacaggaatagatgcgatcatgtacttgtagatcattgcttgtctctcaagctccttcaattgtgcgtttgtgaaagggtaatagtaataacaacccaaaagtccatttcctgcatatggagtaggatgcggatgaatctccatgtctctgaatccaaaagaagactctttgtattgttgctgattcaaactaaacaaagaatcacttctatatggaattgttgtcttgtctgaaactttgagaaagtccatgaaggttagagattttaaaaactcttgtaaagattgtgagatttttcttttgccctttatattatcatgagaagagactgaagaacatgtgacttatttcaaaagaaagaaagtaaaagatccgttgtgggctataaatttggtgagaagataatgagtaaaacgttgcttgcctttcctttcatatcatactaatgtaacatatatagagagagagggagagagatt

SEQ ID NO: 647 - DNA, 1490 bp, Arabidopsis thaliana
  Clone ID: ARATH-23APR03-CLUSTER24313_1
aatgaattttggggtcaaattcatttcaactgattcaatcaattctcatgaattccatcttgtcaagcgtccttcctgctcccgaagatcctgttctcagtgtaatttttgcttgtagagatgatcctagtccggttaagttgaatttgagcgcaggtacctatcgaactgaggaaggaaagcctcttgttcttgatgttgtgagaagagcagagcaacagttagccaacgacctggacaaggaatatcttcccctcaatggacttcctgaatttaataaattaagtaccaagctcatcttaggtgatgatagtcctgcattgaaagagaatagagttgttacaacccaatgtttgtctggtactggttctttgagagttggagctgagtttctagcaacacacaacaaagtgagtgtcattttcgttccaaacccaacgtgggggaaccatccccgtatttttactttggcgggtttgtctgtccagtatttccgttattatgatccgaagagccgaggactcgacttcaaaggcatgctcgaggatcttggcgctgcacctcctggagctatagtggtacttcaagcttgtgcgcataaccccacaggagttgacccaacattcgaacaatgggaaaagtttcgacgactagtgagatcgaaaagcttattacctttctttgatagtgcatatcagggttttgctagtggtagccttgacgcagatgcacaagcggttcgtatgtttgtagccgatggaggtgaatgtttgatagctcaaagttatgccaaaaatatgggcctttatggggagcgtattggctctcttacgatcgtatgcacatcagaagatgtcgctaagaaagttgagaaccaagtgctacttgttgtgaggcctatgtatcttacaccacctattcatggtgcatctattgttgccacaattctaaaaaacagtgatatgtacaatgactggaccattgagctgaaaggaatggctgaccgcataattagcatgcgtcaacagttatatgcagctctagaagctagaggaacacctggtgattggagtcacattattaaacatattgggatgtttacttttaccggattgagtgaggagcaagttcgcttgatggccaaagaatatcacatttacatgacttatgatgggaggataagcatggcaagtctaagttcgaagacagtgcctcaactcgctgatgctatacatgctgttgttactcgcatcgcctaattaaatttgcgattctgttcttttgttgtttaatttatgaacacaattagagaataaaactgcgttcttggtttacatttaataagatagcacaaagaagcaatattatggatgatattgtttctagttggtagtcaaacctaccaaaatgaggattgggacctttaaaccaacacagttttttttattttgttttcattttcaatttatataataaagattacatcaatt

SEQ ID NO: 648 - DNA, 3191 bp, Arabidopsis thaliana
  Clone ID: ARATH-23APR03-CLUSTER24348_1
acttcctctgcttcttcttcttcacatcactgtgtgcgtctctctatctctctattctatcatttcgaaatcctctctatccgaatttgaactcgtctcttcttcgtaaagagttcttaatctccgtctctgtgatttcggaatctggaggttttgaatttcttgttcgtatcaatcaaatggtggatcgatttagtgagattgctttacctcattagcaatgacttctgcttcttccatgtccgtgtctgtggaatgtgtgaacatatgtaatctaacgaaaggagatgggaatgcaagaagcgattgcagtgctctctcctgtgcttggaaagctccaagagcgttaactgggtttctagctagcactgctcatccacctgtgtgttctgtgtattcatgtggcagaaatggaagaaagagcagaatgaaagcttgcgcctggcagaggtatgaatatgaagtaggcttttctgaggctccttactttgtaaatgtgagaaatatcttgaagtccagattatcttgtggtggtcataaaagatgggaactgtattgcgtatcagctgaatcttcttctggtgcatccagtgatgttaccgtcgaaacattgtgggaggaccttttcccatcaatatcttatctaccccgtaaagaattagaatttgttcaaaagggccttaagttagcgtttgaggcacatcatggtcaaaagagacgtagtggggaaccattcattatacatcccgttgcagttgctcgtatccttggggaacttgaattggattgggagtctattgttgctggattactacatgacacagtcgaggatacaaatttcattacttttgaaaagatagaagaagagtttggtgcaactgtgcgtcacatcgtagaaggggagaccaaggtgtcaaaactgggaaagttaaagtgtaaaacggaaagtgaaacaatacaagatgtaaaagcagatgatttgcggcagatgtttctggcgatgacagacgaggtccgcgtcattattgtcaaactagctgaccggttgcataatatgcgaactctctgccacatgcctccccataagcagtccagcattgcaggggagactttgcaggtctttgctcctttagcaaaattattgggaatgtattcaataaagtctgaactggaaaatctgtctttcatgtacgtaagtgctgaggattatgatagagtcactagcaggattgctaacctctacaaagagcatgaaaaagaactcactgaggcaaacagaattttggtgaaaaagattgaagatgatcagtttctggaccttgtgactgtgaatactgatgttcgatctgtttgcaaggaaacttacagcatctacaaagctgctctcaaatcgaaaggatcaattaatgattacaaccagattgctcagttacggattgttgtaaagccaaaaccatctgtaggggtcgggcctttgtgcagtccacaacaaatatgctatcacgttctggggcttgttcatgagatctggaaacctattccacgaacagtaaaagattacattgcaaccccgaagcccaatggataccagagcctccatactactgtgattccattcttgtatgagagtatgtttcgactggaggttcagatcagaaccgaggagatggacttgattgctgaaaggggcattgctgtttactacaatggcaagtctctatctactggattagttggaaacgcggttcctttaggtagaaattcaagggggaagacgggttgcctcaacaatgcagattttgcactcagggttgggtggctaaatgcaataagggaatggcaagaggagtttgtgggtaacatgagctctagagaatttgtggataccattacgagggatcttttaggtagtcgtgtgtttgtattcacacctaaaggagagataaagaacctcccgaaaggggccaccgttgttgactacgcttatctgattcacaccgaaatcggaaacaagatggtagcagcaaaggtcaatggtaatcttgtttccccaactcacgttcttgagaatgctgaggtcgtggagatagtcacctacaacgccctctcaagtaaatctgctttccaaagacataaacagtggttgcaacatgccaaaacaaggagtgcaagacacaagattatgaggttcctaagggagcaagctgcacaatgtgctgccgaaattacccaggatcaagtgaatgactttgtggcggactctgatagtgatgtggaagatctcacagaagattcaagaaagagcctacaatggtgggagaaaatcctcgtcaatgttaagcaattccagtcacaagacaaaagtagagatacaacacccgctcctcaaaacggaagcgtttgggccccaaaggtgaatggaaaacacaacaaagccataaagaactcgagttctgatgagccagagttcctcctacctggagatggaattgccaggattttacctgctaatatccctgcttataaggaagtgttgcccggcttagacagttggcgagacagtaaaattgccacatggcatcatctcgaaggtcagtccatcgaatggttatgtgtagtatccatggatcgcaaaggcataatcgcagaggttacaacagtcctcgcagctgaaggcattgcattatgttcttgcgtggccgagattgacagaggaagaggattagcagtaatgttatttcaaatagaagcaaacattgaaagtttggttagtgtttgcgctaaggtggatttagtcttgggtgtgttgggatggtccagtggttgtagctggccaagatcaacagagaatgctcaagttcttgagtgttaaagccaaaggactcacgttcttggccttgaagttttgtcatgttcactggaaaaataagcgtactgaagaagagagtctggttgctccatgtagaggtagagagctcttataatattcttgaaaatatatatcactttgttttgaaaaacaaaagaaaaagagagtcaaattcttttagatgtgttatgttcaataaatcaaggtcattgtatataaagaccaaaagagtgggatgaacatacgatgtaatatgtagatactcctgtaaaacatatacttgcacatagaaaaaaaaaaattgaatgcatttcccaaaaaa

SEQ ID NO: 649 - DNA, 2691 bp, Arabidopsis thaliana
  Clone ID: ARATH-23APR03-CLUSTER24349_1
aaaccacaacgactctttcgagtttcgagctaaacactcctctctccctccgccacttcactatcacatcccacctaccaacaatgatacccgtaaccgccactcttatccgccaccgtctccggcacttacgccaccgcattcgattcaaatccacctctgtttctcctttccatttaccactcaaccaccctacctacttaatttggtcagccaacacttctctcggcaaaaccctcgtctctacaggcatcgccgcctctttcctcctccagcaaccttcatcttccgccacaaaactcctctatttgaaacctattcagaccggcttcccttccgattccgattctcgtttcgtcttctccaagctcgattccctctccctccgtcgccaaatccctatttcaatctccgactctgtcctccattcttcactccccgccgcaaaatctctgggattgaatgttgaagtcagcgagagtgggatgtgctctttgaatttccgggatgagaaaaccgtcactggagcaccggaacttttatgcaagatcgttctatgcttttctccagcgcatcagtcaaatcttcatcttcttcctcttgctcatactcaaccgcagtagatgagttctcttcactacgctatgatcggagtgatgatttgaaagatctgagctttagcagctcctttggttattctccggcgaaatttgtgaattcatttagacgagatcaccaaagccctatctctgtgcttcatggtccggtctcgtgtagttgtagccctccgatgagaatgtctcgtgatcggaatctagatggttcgtttcgtttaggagctagtagattgttcaatggtttcgttaggaaagctcttggatcatgtgttgattacgagttgggatcggattctggtctcgttgatgagctaacgtttcctatggaggttgatacgataaagccatatgctagggatttgctaagacgtgcacaattgagacacaagattttcaatgatgaatctgtgatcaaagctttttatgaggcagagaaagctcatagaggacaaatgagagctagtcgtgatccttaccttcagcattgtgttgagactgctatgttgttggctaatatcggagctaactcaactgttgttgttgctggccttcttcatgataccgttgacgattctttcatgagctatgattatattctcagaaacttcggagcaggagttgctgatttggttgaaggggtttcgaagcttagccaattgagcaaactcgctagagagaacaatacggcgtgtaaaactgttgaagcagatcgtttgcacacaatgtttcttgcaatggcagatgcaagagctgttcttataaaactggctgatcgattacacaacatgaagacgctttacgctttgtccccagtgaagcagcagaggtttgctaaagagacgttggaaatatttgcacctttggctaatcgtttgggaatctctacctggaaagttcagcttgaaaatctttgtttcaaacatctttacccaaaccagcataatgagatgtcaaccatgctcgaggattcattcgatgaagccatgattacttctgcaatagagaaattggatcaagctcttaagaaagcaggcatttcttatcatgttctttgtggccggcacaagagcttgtatagtatttacagcaagatgttaaagaaaaagctaacagtggatgaaattcatgacattcatgggttacgtttgattgttgacaacgaaggagattgttacaaggccttaggagtagttcatagtttatggtctgaagttcctggaaagctgaaggattacataactcatcccaaattcaacgggtatcaatctttgcacacggtagtgatggacaatggaacagttccacttgaagtccaaatacgtacacaggagatgcatttgcaagcagaatttgggtttgcagctcattggagatacaaggaaggtggctgcaaatactcttcgtttgtgcttcagatggttgaatgggctcggtgggtcgtaacctggcattgcgaagcaatgagcaaagaccgatcttccataagttcttcagattccatcaaaccccccttgcaagtttccgtctcactcttgaggactgcccagcttcttacaagcctaacagtagccaggatggaccagtctatgtcattgtaatcgaaaatgataagatgtctgtgcaagaatttccagcgagttcaacagtctcggatctgctgagccgggcggggccagggagctcgaggtggtccatgtatggcataccagcaaaggaagaactaaggccaagactgaaccaaatacctgtaagtgacctcaagtggaagctgaagatgggtgatgtggtggagctgactccaacaattcctgatgagtctctgactgaatacagagaagagattcaacgcatgtatgatcgaggactcgcgttttcccgccccggaaccatggtcggatggggaagctgatgggtcctcaaattgttaactagtccatgtatcatgtatgtatgtatatatatagtccccatatgattaatttgttgtacataacaatggctccgttggttcaatgtaagcttaataaaaagaaagcaaaaagttagtattaaaaaaaaaaaaaaaaaaaaaaaa

SEQ ID NO: 650 - DNA, 1237 bp, Arabidopsis thaliana
  Clone ID: ARATH-23APR03-CLUSTER24412_1
ttttttttttttggggatggacttttatagaaaacgatagaattttgtttggggttactattagagacaaacagtagcatgtattaaaacaaacgaaaaatcacaaaggtcgttgcctacataacaaatacatgtatttacatcacaccagagacagaacatagaccaaataaatataccctcaaatcttcaagtgtacgtgtatactctttagatgcaaacaaagtttaacttcacttcaagcacctggaaatgacaatctccgcggtttcactgtgtttctagctccaggaaacggagttttggctggaactgatgataatgacactgttctctttgctggtgaatttgagtctgtctttgagctctttggtttcttaggagtcactgaatatcttacttcccaaggccgagcagatatccaacgctctttccagctccaaccccaattagtgtttcctagctcataacttcccaaccactgagtcttaccatcagctttccactgatgagagaaagcatatgccaaggctctttctcgcttaatcgtcgcttcttccctttgaagtatcctctccaagatttcatcttttgtctctgacccaccattccattcaacctcaacatcatgaagctttgcctcaagcttttgctgatgctctaatcttttattcttcagtcgccattcggttaccatgcaaactcggcgagcctttatctctgactgtattttactccatgagtgaagatacctcaatgtgaccacagcttggttcttcacagattgtttctcagttgataactttgctcttgcaattccttttagacgccgtaagctttttctagccttataggctttaaaagcagtctgaatccgagtagcagcccaatcctcactacgagtaactagtgatgtacccttcttcttggaacctttttttggtttcacagcactagtttttttcttttcagttccttgtttactcttcttcaatctaattattgccttaatcaaattcccagaacccatcttagagtctatcaattgtcaccaaaacaccttgtatatatgcaaatgctgctctaaccctgagttcaggaccaatgaaagaagctcgtcaaagaactgaaaaactggtaaaggccgcgaagaacactgaagcagagagacagaaaaacagaacaagagatttggtgactgaatgaatgattaaagggtttttgcttgctctgtttt

SEQ ID NO: 651 - DNA, 762 bp, Arabidopsis thaliana
  Clone ID: ARATH-23APR03-CLUSTER2442_1
aatttctcttacatattctctcatttctcacccaacttctcctttttattagtcttcccaacatcatcccaatatcacactctcttaaaacccttaattagttttcaaaccaatgggaaagctccagaagattgggagagtatgggattgtctttttcttccgacaaatcagtgttcatgtttttgtctaaacactctaggagatgaagaagaagagtttgagaaagagccattgatagattcttcaacagagaaatctgggaaagtcatgaggttaaaagatgttgtagctgctgatcatcgtcagactcttgcctttcatcttaagcctaagatagtggagctaaaggtgtcaatgcattgctacggatgtgcgaagaaagtcgagaagcatatttctaaattagacggagtgacatggtacaaagtggagctagagagcaagaaggtggtggtgaaagggaacatattgccggtagatgtgttagagagtatttgtaaagtcaagaatgctcagctttggtcttctccttgaatcactcttttctttccacatgggcctttcatgtcaatctccatctttcatgttatattattgtcattatctaattttgcgtacatacacatgcatgcatctattttctctgaatctctaatctatatcccttttttgttttgttcaattccactctattttgtaacattttgaatctatctcatttgtcatatatacaaattaaaaaaaatgcttttaacggccgc

SEQ ID NO: 652 - DNA, 1432 bp, Arabidopsis thaliana
  unsure (1)..(1432): unsure at all n locations
  Clone ID: ARATH-23APR03-CLUSTER24464_1
ggttctgaaattctttggagaatcaaagcttctccatttacagcattaccaaaataataacaaccttaacaaatcagcagctcctcaacaacattgcttcactcaaaaaacatcaacaaactggactaaaccaaaccaaggtaagggacacatcgtcttaaaaaaaactctcaactttgattggttttgataacgtatcaatggaaaattgtgacaggaaacggagaccaacagcttgaatctccgacatcgacggtgacattctccgagaatcttctgatgcctttaggaatccctacggatagcagaagaaatagaaacaataacaacaatgagtcctcggcgatgattgaactcgccgtatcttcgtcaacctcctccgatgtatgggcagatcgccatgttgtgataaggccgggttgaagaaagggccttggactccagaagaggatcagaaacttttggcttatattgaagaacatggccatggaagctggcgttctttgcctgagaaagccggtctccaaaggtgtggaaagagttgcagactcagatggactaactacctaagacctgacatcaagagaggcaaattcactgtacaagaagaacaaaccatcattcaactccacgctctcctcggaaacaggtggtcagcgattgcaactcatttaccaaagaggacagacaacgagatcaagaactactggaacacacacttgaagaaacgtctgatcaaaatggggatagatccagtgactcacaagcacaaaaacgagactctttcgtcttccacaggacaatcaaagaacgcagccacgcttagtcatatggctcaatgggagagtgcaagactcgaagctgaagcaaggctagctagagaatcaaagcttctccatttacagcattaccaaaacaataacaaccttaacaaatcagcagctcctcaacaacattgcttcactcaaaaaacatcaacaaactggactaaaccaaaccaaggaaacggagaccaacagcttgaatctccgacatcgacggtgacattctctgagaatcttctgatgcctttaggaatccctacggatagcagcagaaatagaaacaataacaacaatgagtcctcggcgatgattgaattggccgtatcttcgtcaacctcctccgatgtgagtctggtcaaagaacatgaacacgactggattaggcagatcaactgtggtagtggaggaataggagaaggattcacgagtctattgatcggtgattcggtcggccggggtttacccaccgggaaaaacgaagcgacggcgggcgtggggaatgagagtgagtataactactatgaggataacaagaattactggaatagcattctcaacttggttgattcttcaccgtccgattccgcgacgatgttctgatctaangg

SEQ ID NO: 653 - DNA, 1343 bp, Arabidopsis thaliana
  Clone ID: ARATH-23APR03-CLUSTER24482_1
tcataataaacggtaaaataataggaacgatgagcgagcggatctagctttcgtcaaaatcatcatcactgagtacatctgccacgtcagcttgattgggatctatttggtcgcccgtacacaaaatctcggctcactcactcacactactcaagtcaacgtttctaagattctccggcggagcgattatgtcaggatcttcttcaccgagcttgtggctggcaccgaatccgagcaagagatggggagagctcttcttcctcttctacactcctttttggctcactctctgtttaggcatcgttgttccttacaagctttacgagacattcacggagttggagtatctgcttctagctttggtttcagctgttcctgctttcgttatacccatgttactcgttggaaaggccgacagaagtttatgttggaaggaccgctattgggttaaggcaaatctctggataattgttttcagctatgtcggaaactacttttggactcactatttctttaaagttcttggagcgtcctatacttttccatcatggaaaatgaataatgtgcctcacacaacattcttcctaacacatgtttgcttcctcttttaccacgttgcatcgaacattactcttcggaggctacgccattccactgctgatttaccagattctctgaaatggtgttttgaggctgcatggatacttgcgctttcttatttcattgcatacttggagactattgctatcgcaaattttccttactatgagtttgtggaccgaagtgccatgtacagagttggatgtcttttctatgccatttacttcattgtgagcttcccaatgttcttcaggatggatgagaaatcaactgatgaatgggatttatctcgagtggctgttgatgctttgggtgctgctatgttggtaacaatcattcttgatctatggcgtctcttcttgggacctatagttcccttaccggagggacaaaactgccttcagtctggattaccatggttctccaattgaagattgaaagatcggttacttccaccaattcagggaattgacatgggactgagagagaaacctgcaaaggaatttccattaacactttacggaattgggaagcagttaatgcagggcatgtttctaaggcttttcttctccaactgctgatttgtttgttagttgtttttggttttcagtttctcttgatgaactttcccaatgtaacctttcaagttatcctttatagaacagaatggaacttcgttttaaaaaaaaaaaaaaaaaaaaaaaaaaaaaaaaaaaaaaaaaattaaaacaagaaagaccata

SEQ ID NO: 654 - DNA, 1793 bp, Arabidopsis thaliana
  Clone ID: ARATH-23APR03-CLUSTER2456_1
tcactagtccccccccccctgtctctcttcttcccgcggagctttcagtttttgtttggtattgcttggtgtggggaagattagatagtgaacacccaaaatcacaatctttcagctttattctgtttttccttgcttgagaattgtgttcgattcatgtctacgaactgaaatcacaaattttgccaacgttttatgatcactggtactgcttggtgtggggaagattagatagtgtgaagaatggcagtagctacacattgtttcacttcaccttgtcatgaccgtattcgatttttctcaagtgatgatggtattggtaggcttggcattacaagaaagaggatcaatggcactttcttgctcaagattttacctccaatccaaagtgctgatctcagaacaactggtgggagatcctcacgtcctttatctgcattcaggtcaggattctctaaggggatatttgacattgtgccattaccatcaaagaatgagctgaaagagctgaccgctccgctgttgctaaaactcgtgggtgttttagcttgcgcgttccttattgttccatctgcagatgcagttgatgcacttaaaacttgtgcatgcttattgaagggatgcaggatagaactcgcaaagtgcattgccaaccctgcctgtgcagccaatgtcgcgtgccttcagacctgcaataaccgtccagatgaaaccgagtgccagattaaatgtggggatctgtttgagaacagtgttgttgatgagttcaacgagtgtgctgtgtcgagaaaaaagtgtgttcctagaaaatctgatctcggagaatttcctgccccagacccttctgttcttgtacagaacttcaacatctcggactttaacgggaagtggtacattacaagtggcttgaatccaacctttgatgccttcgactgccagctgcatgagttccacacagaaggtgacaacaagcttgttggaaacatctcttggagaataaagaccctagacagtggattctttactaggtcagccgtacaaaaattcgtgcaagatcctaaccaacctggtgttctctacaatcatgacaacgagtaccttcactatcaagatgactggtatatcctgtcatcaaagatagagaataaacctgaagactatatatttgtatactaccgtgggcgaaacgatgcttgggatggatatggtggtgcagttgtatacacgagaagttctgtattacccaatagcattataccagaactcgaaaaagcagcaaaaagcataggcagagacttcagcacattcattagaacggataacacatgtggtcctgaacctgcgctcgtggagagaattgagaagacagtggaagaaggtgaaaggataatcgtaaaagaggttgaagagatagaagaagaggtagagaaggaagtggagaaggtcggtaggactgagatgaccttgttccagagattggctgaaggatttaatgaactgaagcaagacgaggagaatttcgtgagagagttaagtaaagaagagatggagtttttggatgagatcaaaatggaagcaagtgaggttgaaaaattgtttgggaaagctttgccaatcaggaaggtcaggtagaaacaagaaccaccattgttgtacaaactatattatacatactgtgttcggttcatataaagtaatatttttgtacacagtcatcatcattccataacaattggatacagaaaacacaaggattaaacatcctttgagcgaaacgaaaaaaaaaaaaaaaa

SEQ ID NO: 655 - DNA, 2412 bp, Arabidopsis thaliana
  Clone ID: ARATH-23APR03-CLUSTER24576_1
atggactctcgttctcagacatttatttctctcagtcttacaatataaattttcattcttaccatccataattttgtattgtcttctccacagatctattccagctcacgccatggagtcttcttcttcactaaaaggttctgcacttgggaaagcttgtggtgacctctggtctcttacatagctcatggagtaagatcttggagatacataacccaccttatttcgaatcatgatccgggtctacaagtttcaaaaaaaaaaagattcaggtctagaatttcagattcaccgagaagagaaattcacacttgtggtttttagcgcaccaccgatctgcagaagtagtagctctgattccactcttcttcatgtgaaagataaagaaaatcctttcccattcctctgctccgagaacaacccatcattctctcttcacacacctgcttttaacctttttacctctgctcctactagtctcacttacctcaaatcagagttgctccaaacgctcaagtctgagaaaccggtgatcatcaccggagctgcgttaggagggtctgttgcatctctctatacgctatggcttcttgaaaccatcgaaccgacgttaaaacgtcccttatgcatcacatttggctcgccattgatcggagacgcttctcttcaacagattcttgagaactctgtgaggaattcatgtttccttcacgttgtatcagcacaaactcgtatcaagatggacttcttcaaaccttttggaacgtttttgatctgttttgattccggatgtgtttgcatcgaggaccatgtggcggtcacagagttgctaaacggtgttcatgattcgggtctagtagactacagccaagttctaaatcgtcttgaccaatccatgttgtctctggcggattcaagattgatccctgaagatgttatcaaaggaatagagaaacgtgcagaaatgaaaaatctgcgatttgatatgatgtttaagaaactaaacgacatgaagatatcgatggcttatatagagtggtacaaaaagaaatgcaaggaggtcaagatcggttactacgatcggttcaagactcagctcgcgtttccgtcgaaagagtttgatataaacatcaagaatcaccacaaatcagagctaaaccgtttttggaaatcagtagttgaagaagtagagaggaggccgcagagcgatgcatcgattctcaagagacggtttctattctcggggaacaattacagacggatgatcgaaccactcgatattgctgaatattacctcgagggtcggaaagagtatcgaactacgggaaggtctcaccactatgttatgcttgagaaatggtttggaatggaatcgatattaatagaaaaggaaagatgcaaaaagagagatttgagtgatcttttgacgtttgattcttgtttttgggctgaagttgaggattcgttgattgtaattaatcagttgaatacaactgtggggatgagagacgatgtgagagaggtattgactagaaaactcgtggagtttgagggatacgtgtgggagataatcacaaaacgtgaggtttcgccggagatattcttagaggaaagcagtttcatgaagtggtggaaagagtacaaaaagatcaaaggctttaattcttcatacttgaccgagtttatgaacacccggaagtacgagagttatggtaagtcacaataatggaataatttggtaatttatttacatttcaggttactagtgtgtgattgttattattcatttacaacgagaattagtagtttctagtaaatttcgttaccaatcccctcccgtttacaagaaaaaaaagtattgtcttctccacagatctattccagctcacgccatggagtcttcttcttcactaaaaggttctgcacttgggaagcttgtggtgacctctggtctcttacatagctcatggagtaagatcttggagatacataacccaccttattcgaatcaagatccaggtctacaagtttcaaaaaaaaaaaaagattcaggtctagaatttcagattcaccgagaagagaaattcacacttgtggtttttagcgcaccaccgatctgcagaagtagtagctctgattctactcttcttcatgtgaaagataaagaaaatccttttccattcctctgctccgagaacaacccatcattctctcttcacacacctgcttttaacctttttacctctgcttctactagtctcacttacctcaaatcagaggtaatttaatctccatctcttcagtcttatctcgtttttaagactaattcagaatcttgaaagttagtgtctgcagaaatatatctctgccgtgtttgcaattcagtccaatagctttttaataaaaaaaaaa

SEQ ID NO: 656 - DNA, 1957 bp, Arabidopsis thaliana
  unsure (1)..(1957): unsure at all n locations
  Clone ID: ARATH-23APR03-CLUSTER245962_1
atggtatggtgtaaccattgcgtgaagaatgttcccggaatacgcccttatgatggtgcattggcatgtaatttatgtgggaggatattggagaatttccatttttctaccgaagttacattcgttaagaatgctgctggacagagccaagcatcaggtaacatagtgaggagtgttcaaagtgggattacaagctcacgtgaaaggagatttagaatagctagagatgagcttatgaatttgaaagatgcattggggattggtgatgagagagatgatgtgattgtcatcgcagctaaattctttgaaatggcagttgagcagaatttcacgaaaggccgcagaactgaactagtacaggcttcctgcctctacttgacgtgcagggaattgaacattgcgttgcttcttattgatttctcaagctaccttcgagttagcgtttatgagttaggttctgtatacttacaactctgtgaaatgctgtaccttgtggaaaatcggaattatgaaaagcttgttgatccttcaattttcatggatcgattctcaaacagcttattgaaaggaaaaaataataaagatgttgtggcaacagctagagacattatagctagtatgaagagagattggatacagaccggccggaagcctagtggaatatgtggagcagcactttacacagctgctctttctcatggtatcaagtgctctaagacagatattgtaaacattgtgcatatatgtgaagcaactctcaccaaacgattgattgagtttggcgatacggattctggaaatttaaatgttaatgagctcagagaaagagaatcgcataaaagatcttttaccatgaaaccaacctcaaataaagaggcggtgctctgtatgcatcaggatagtaaaccttttggttatggactatgtgaagactgctacaaagatttcataaatgtttctggtggacttgttggtgggtccaatcctcctgctttccagcgcgcagagaaagagcgaatggaaaaagcagctagagaagaaaacgagggaggaattagtagcctaaaccacgatgaacaactatatcacttgagaatctatttgggctgtgtcgcagagaaaggtgaaaaagataaagatggggctgaagaacatgctgatacttcggatgaatcagacaacttttctgacatcagtgatgatgaggtaaatggctatatcaacaacgaggaggaaacgcactataagacgatcacatggacagaaatgaacaaagattatcttgaggagcaagctgctaaggaagcagctctgaaggcggctagtgaagctttaaaagctagcaactctaattgcccagaagatgcaagaaaggctttcgaagctgccaaagctgatgcggcaaaatctagaaaggaaaagcaacaaaaaaaagctgaggaagcaaagaacgcggctcctccagccacagcagtggaggcggtacgcaccgcttgataaaaagagacttagttcggtgatcaactacgatgttttggagtcgctatttgatacatccgcaccttagaaatcacccaagaggtcgaaaacagagacagacattgagaagaagaaggaagagaacaaggaaatgaagagtaatgaacatgagaatggtgaaaatgaagatgaagatgaagaggatgaagaagaaggcaatgtagaatcatacgacatgaagacagattttcaaaacggcgagaaattctatgaagaggacgaggaagaagaagaggatggtaatgattttggattgtattgatgatatgtattgtgaaacacaagagttttaatttcttttgttttgccggatntagttgatttttatttgcattaaaataaggagaaccccccactaaatttattctttattatcagtaacaaatatttaagatttaaaagaaaaaaaagttcacac

SEQ ID NO: 657 - DNA, 1304 bp, Arabidopsis thaliana
  Clone ID: ARATH-23APR03-CLUSTER24626_1
aaccattctctcttctcttctttatctcaaactctttcttcttccaaatcataaaccatggcaacatgcatccacacatgccgaaccggtaatacccaagacgatgattcccggttctgttgcatcaataaattcttccgacccggtttctctgtcaaccggaagatccaccacacccaaatcgaagatgacgatgatgtctggatcaagatgctcaaagaagccgaatccgatactttttcttcttcccatttataaaccatggcaacatgcatagacacatgccgaaccggtaatacccaagacgatgattcccggttctgttgcatcaagaatttctttcgacccggtttctctgtaaaccggaagattcaccacacccaaatcgaagatgacgatgatgtctggatcaagatgcttgaagaagccaaatccgatgttaaacaagaacccattttatcaaactactactacgcttcgatcacatctcatcgatctttagagtctgctttagctcacatcctctccgtaaagctcagcaatttaaacctaccaagcaacacactcttcgaactgttcataagcgttttagaagaaagccctgagatcatcgaatccacgaagcaagatcttatagcagtcaaagaaagagacccagcttgtataagctacgttcattgcttcttgggcttcaaaggcttcctcgcttgtcaagctcatcgaatagctcataccctctggaaacagaacagaaaaatcgtagctttattgatccaaaacagagtatcagaatctttcgccgtcgatattcatcccggagcgaagatcggaaaagggattcttttagaccatgcgacgggcgtggtgatcggagagacggcggtggttggagacaatgtttcgattctacacggagtgaccttgggaggaacagggaaacagagtggtgatcggcatccgaagattggtgatggtgtgttgattggagctgggagttgtatattggggaatataacaatcggtgagggagctaagattggatcagggtcggtggtggttaaggatgtgccggcgcgtacgacggcggttggaaatccggcgaggttgattggtgggaaagagaatccgagaaaacatgataagattccttgtctgactatggaccagacatcgtatttaaccgagtggtctgattatgtgatttaacacaaatgtgtatttctttctttcttgtaactgatgatgatgaaacaagtcttgtctatttcttaatattttactatgtactaatcaaactagacttg

SEQ ID NO: 658 - DNA, 1457 bp, Arabidopsis thaliana
  Clone ID: ARATH-23APR03-CLUSTER2464_1
agagagaaggataaaagttttcacaaattaagtaagacccctaaacttatattttatttataaagagccccaaatattataatttcacaaatacacccatgtgttccagttgtttgagtaaagtcgacttcaattgatttgccaaaggcttgcctcatggcttattcttcagtaccaagctgtttccatggctatcttctccatcgttgttcgttctccaccacacaatttttctcgggttctctctcttgtggcttctctgcttctaccaattcaagactaagaacatgtgtcaaattcgagaagtttcagggtgactctcctcttgaacagaacacttcagtttcttcttcctcttctgtttcacaggaactaccattagaagaagctcaagaccaactagaagaagaagaagatgatgatgactgtttgcctaatgatttggaaggagctgttaggcaatcaggtgaagcaggtgctgcgtttgtgaactcaggaggaaatagagctattgtggagcttttgattcctcagctgcagtttttagacgatgaaggtgcacaagctgaactttgggacctttcgcgtgttttcttggagactctcattaaagaaacaggttgtgagagagttaaagctgtatttccagacgctggagctgctgcattgctaaaataccggtggaaagatgcaacgttcggatttgctagcttaagtgaccggaaacctgtggagaaagaagatgagatcattgtcatggttgttcctgattaccaaatgctggaatatgttgagaaaattgctaatgggcttgctgatgacccgccaaggcctctcattatgtggaaccctcgtcttataagcgaggaagtcggggttgggtttaacgtgagaaaactaaggcgttacttcctaagttcattcactacggtttactctatgagacctctggctgctggtgctgttttcaggtgttatcctggtaagtggaaagtcttctatgataacaaagacagaccaggccgatacctactcgctaaagaactcattggtcgacctgatgcagaggatcttgagataatatatgggggagtagaagagaaatcagaagaagggccatctttaatgagtcaagctgctggaattttctcatccattaacaggttcatgaaatcaatgtgaagatgatttcttctctgcagtgtaatactattcacatgtcctggtattagaaatgtaaccaaagggtattactgtatatctttctatgctattacatcatgaagagtataatacgtactggtaaagagttctgttccttctatacttcagtgaaccactctggtcgagaaaattaatccgaatcaacccaaaagtcagttttgcacctaaactgcagtctgcagatactatgtactagttctatcatcataacatgaaaatatcgaagttttgct

SEQ ID NO: 659 - DNA, 6455 bp, Arabidopsis thaliana
  Clone ID: ARATH-23APR03-CLUSTER24656_1
atggaggcactgacggagctttgtgacattatagcaaagaatccgaagcaattctcggagaagttagcttggatatgcggtcgttgtccacaaacggaatggcttctcgctgaatcgcccagggtttctcggagtcatctcaacgctgttttagccgttgctcggatcatctccaagaatccagaatcaatcgataatcgtgccaaatccgtcgttaatgagtttctcagcgctatacctgcatcgttccgccgttccttctggccgcattctttcccttcgcagctgatctcttcgttttattgtgatttcttgagttatctttcgtgtgcggcggatctatccccggaatttggtacagaggttgctaggtttacaggggaagttgtgatagccgctattgcaccgagttctggtgatagcgacggggatccagcaatttctaaggctttcttggtcgcgctttctcagcatttcccgtcgattctgcagtctgatggagataaattgataacaatgctgcttgatcagtttgttctgaaccgtgctcctgcttcgcccaaggaacagcggcagcagaactcggctaactctgaaactgatacttcgtcgtctcagggctctcctattagtacgaaccgttatccctcgggaaaaactgaaatggctagtcctggcgatgaggtggctagccatgggtccaatttatcctctaagagttcatcgtctgtagtgatgaatgggggtagtattgtgtggaagagtggtgttgatcagctgagctttggatttagcgaggggagtggaggtgctaaccctgtttttagacaacaagtggcttcttttgaagacgaatccattgagagcttggagaagcaagagattgcctttagattgataacccatattttggataaagtcaaaattgactctaaacttcaggatcaagtgagatttatagcgaagaggcagcttcagtccatgtctgcatttctgaagtcaagaaagcgagactggaacgaacagggccaagttctgaaaactagagtcaatgccaaactgtctgtttatcaggctgcagctaaaatgaaaatcaagagcctcgtgtctcttgaaacagatggaaaaacttctaaaaggttggtcctggagacgcttgcattacttttagatgctgcagatgcctgcttgacatctgtgtggcgtaaaatgaaggcctgtgaagaactgttcgactctctgctttctgggattgcaaagattgcagtggcaagaggagggcagcctcttcgcgtgttgctcatccgacttaaaccactggtactagctgtctgtgcactgccggatcaaggggctatgcttgagagcatatttaagactagttgtgagattattgaatctgcctgggccaaggaccgagctccagtggacaacttcattatggggttagcttcaagtattcgtgaaagaaatgattatgaagaacaggttgatagagagaagcaagtacctgctgtacagcttaatgtgattcggctgctagctgatctcaatgttgctgttaagaagccggaagtagctgacatgattttaccactttttattgaaagcttggaagagggtgatgcttcgactcctagctttttgcgactccaacttcttgatgctgtttctaggatagcaacattagggtttgataagtcttaccgtgagacagtagttctgatgaccagaagttatttgagcaaactatcaagtgtaggatctgtagaaagcaaaacgtcagcaccggaagccacaaccgagcgtgtagagactcttcctgcaggttttcttacaattgccagtggtcttatggatacaaaattgcgttcagactaccgccatcgtttgctttccttgtgttcagatgtaggcttggctgctgagtccaaaagtggagggagtggtgtggatttcttaggccctcttcttcctgctgttgcagaaatatgttcagattttgatcctactatggatgtggaaccttcacttttgaagttgtttcgcaatctctggttttatatagccctctttggcttagcacctcctattgtgaaaactccgacaccaccactgaagtcaacctccaattcagtgaacagtgtgggaagtatgagtgcaactgctttgcaagctgtgggcggtccttacatgtgggacaatcagtgggctctagctgttcagcgaattgctcaaggcactcctccccttgtcgtcagttctgtaaaatggcttgaagacgaattagaactcaacgcacttcacaatcctggtagccgccgaggaaatggaaatgagaaagtagcttcaacccagagacttgctctttcaactgccttaggtggcagagttgacgttgcagcaatgaacactatctcaggggtgaaggctacctatttgcttgctgtggcttttttggagatcatacgttttattagcaacgggggtatccttaatggtgaatcaagcgtttctgcctctagaagtgccttcagttgtgtgttcgaatatctgaaaactccaaatcttactcctgctgtttcccagtgtttgacggcaattgtgcatagagcctttgaaacagcagtctcatggctggaagatcgaatatctcttactgggaaagatgctcgtaatagagaactgacaacgtatgcacatgcatgtttcctcataaagagtatgtcacagagagatgagcacgtccgagatatctctgtgaacctgttgactcagctacgagacaaatttcctcaggtcctctggcattcgtcatgtctggatagtttgctgttttcagttcatgacaatacaccttcaactgttgtcaatgatcctgcttggactgctgctgttcgatccttataccagaaagttgtacgagaatggatcataatatcgctttcatatgctccatgcaccagccagggtctgcttcaggataagctgtgcaaagcaaacacatggcagcgagcacaaactacaactgatgtggtttctcttctatctgagataaaaattggaactggaaaaaatgaactttggtctgggataagaactgctaatatcccagctgtgatggctgcagcagctgcagcgtcaggggcaaacttaaaagtttctgaagcctttaacttggaagtacttggtactggtgtagtcagtgcaacggtaaagtgcaaccatgctggagaaattgctggcatgcgaaggttgtacaacagtattggtggatttcaatctggctcgacacctagtggttttggtggtggccttcaaagattaatatctggagcattttcccaggcaccacaaccagaagatgattcatttaatgagatgttaattgccaggtttgtgcgtcttcttcagcaatttgtaaatactgctgaaaagggtggagaggtggagaagtcgcaattccgagaaacttgttcccaagcaactgcattacttctgtcaaacctgggtggtgagtcgaaaacaaatgtcgaaggcttttctcaattactgcgtctcctttgttggtgtccagcatatatatctactccagacgctatggaaactggaatttttatatggacctggttggtttctgctgctcctcaactggtatctcttgtccttgccgagcttgttgatgcatggatatggacaattgatacaaaacgtggtctctttgcatctgatgtacgatactctggcccagctgcaaaattaagaccccatctttccccaggggaaccagaagatccacctgaaagtgaccctgttgaccagatagttgctcacagactgtggcttggatttttgatagatcgttttggggttgttcgacataatagtgcggagcaactgttgctgctaggtcggatgttacaacggagtacagaccttgaatggtgctttactcgccaccctgcagctgctggtacctttttttctttgatgctccttggactgaaattctgctcatgccaaacacaaggcaacatgcagaaatttcgatctggactccagcttttagaagatcgaatctataggacgtctttaggctggtttgctcatcagccagagtggtatgatgtaaatattccaaatttttgtcatagcgaggctctatctgtttcagtttttgttcactttttatcaaacgagctatcagaatcaagtcaatctgattccaaaggaaaacctcgtgaaagtgggaatttgattgatgtgactgatcagtatcatcccgtctggggtgagatggacaactacactctgggaaaagaaaaaaggaagcagttgcttttaatgctctgccagcatgaagctgacaggcttgacgtttgggcacaacctattagttcaaaggacagtccgtattcgcggctgaaaataagctctgagaaatggaccgaatatgctaaaacggccttttcagtggatcctcgcattgctttatcagttgcctcaagatttccggcaaatgcttctgtgaaatctgaagtcactcagctggttcagacaaatatagtagatcttcgtacaattcctgaggcattgccgtattttgttacaccgaaaaatgttgaagagaactcagtgctgttgcagcagctaccgcactgggctgcttgttcaattacacaggctcttgagttcctcacgcctgcttataagggacatccacgtgtcatggcatatgtcctacgagttttagagtcctaccctcctgaacgagttacttttttcatgccgcagttggtgcagtctttgcgctatgatgatgggaggctagttgaagggtatcttcttagagctacccaaagaagtgacatatttgcccacattctcatttggcatttgcaaggtgaggatgtgcaggaaactccgaaggatggttctatcgataagaatgcggcattccaagaaattttgccacaggttcggcagcatatcattgatggtttcagccccaacgccttggacatgttcactagagagtttgacttctttgacaaggttacttctatatctggggtgttattccctcttccaaaggaagaacgcagagccggtattaggagggagttggagaaaattgaaatgcagggagatgacctttatttgccaactgctcctaacaagcttgttaggggtatccgtgtagacagtggaatacccttacaatcagctgccaaagtccctatcatgataacttttaacgttattgatcgtgatggtgaccacagtgatgtaaaaccacaggcttgcattttcaaggttggagatgattgccggcaagatgttcttgcccttcaagtgatatctcttcttagagacatatttcaagcagctggtcttaacctttatctttttccatatggagtactcccaactggtgcggaaaggggcataattgaggtggtgcctaatacaagaagcagaagtcaaatgggtgagactactgacgggggtttgtatgagatttttcaacaagactatggacccgtcggctcaaccacctttgaaacagcacgggagaacttcctcatcagtagtgccggttatgcagtggctagtcttttactccagcccaaagacagacacaatggaaatctcctcttcgatgacgtgggaagacttgtccacatcgactttggtttcattttggaaacttcgcctggtgggaacatgcgattcgagagtgctcatttcaaactgagccacgaaatgactcagttgctagatccctcgggtgttatgaaaagcaaaacatggcatcagtttgtgagcttgtgcgtcaaggggtacttagctgctcggcggcagatggatggaatcatcagcacggtgcaaatgatgctagaaagtgggttgccttgctttagcagaggagatccaattggtaatcttaggaaaagatttcacccagaaatgagcgaacgtgaagctgcacacttcatgattcatgtatgtacggacgcatataacaagtggactactgctggatacgacttgattcagtatttgcaacaaggcatcgagaagtaagaagaagaagagggaacttaatgatatccgaaaccagagttatataatttgcaggattttgctatgcacaaaaaaaaaaagtaacaaaagagaaaggtaagagtgttgtggtgtgggcattttcgataacttgagatgtaagctactattatatatgatctttgattattcttgggtggaaatggtcacgtgtttcttgataattccatgcgttgtataaaacaatttatttgattcaatgccggatgataaactcattacaagtatagcttccagcatacaccagctcccatttttcttcggtcggttccgccgcgtctgtcttgatcaaaaatgtattctattaacatgtagaggtatttgtattc

SEQ ID NO: 660 - DNA, 2752 bp, Arabidopsis thaliana
  Clone ID: ARATH-23APR03-CLUSTER24761_1
tatcatttccactccctccaaaaaaaaaagcctctctctctcctctcctatttatacctctctcgatctctctcgccggcgctgcaaatccctaggtttttcaatcacacccaaaacatttgtagagccccaagtactcaatttcgcttattgatagagagagagagagattgagaatcgcgatttgattttatcaatcgatgccgtgaaaatctcgtaatcagattcaaaattgaggatggttagctgctaccgtaatccttgcgtgaagattgagaagaactaattttggtttgtgagcaactttcgaatcagctctgttagatttgatttgaacttttatttgaagatggatcggtgtgacacctcaggatttgtaagcggcggtggagatgcttataaggtcttctaactcttattagagctgtggctttattctcttaacccggaagttgttgttgtcctcttggcttcgcgtctttgcttttggtgttcttgacgaaagttttcatttttaagttgtgaccatgcattccagattccagaacattgcttttgctggtaattcctcttcgaattcttataagattttgggacgttcccttcaagttgaagtccctgaggccgcggatactactctgcgtcttgattcccttgcctctccgttgtctaatgccaagggaatcaaaaggaaatggaatttgattgatggagctgatcctttactctccttaagactcggtcactcttcaagctcttctgatagcaaagggagttcggcaactgcttgcacgagtttatcttctgccagagaaactgaggaggcgtcctccatggatattgagctcgactttagcctccatcttggcaacgagaaaccgacggctagcaacaaaaaaccagctaatttgaaaatgaaagggttgcaggtcccttccccgaaatttgatcttgaattgagtctttctggtggaggatcttgtcaatctgagatcactgcggtccagcagcacgccaaccgatttcaatctcttgcggacatgctgcgtgcaaataatgaagaatctgcaacgtgtggttggaggcaagggtttggattaccgacattgcaagcctcttcaagcaaggaaacaagctccttcttaggccatattcccaaaaatgtcatcattcctgctgctcatgttctggaactgtcatctaacacggcagcaacaacaccaataagctcgggtacatgtacttccggtttatctcagcagctgaagccacagcttaagaattcttctagttcaaagttatgtcaagtcgaaggatgtcataagggagcaagaggcgcatctggtcgttgcatttcccatggtggtggacgtagatgccagaaacatggttgccacaaaggtgccgaaggtcgaactgtgtactgtaaagcccatggaggtggtcgtcgatgtgagtttctcggatgcaccaaaagtgcagaaggccgtactgacttctgtatagcccatggaggtggtcgaaggtgcagccatgaagattgcacacgagctgctagaggaagatcaggactctgtatcaggcacggtggaggaaagagatgccaaagagagaactgcactaaaagcgctgaaggcctttcaggactctgtatctctcatggtggtggtcggcgatgtcaatctaatggatgcacaaaaggagcacaagggagtacaatgttctgcaaagcacacggtggtggaaaacggtgtacacactcaggttgcaccaaaggagcagaaggaagcacgccgttctgtaaaggacatggaggaggtaaaagatgtgcctttcaaggagatgatccttgctccaagagtgttcacggaggtaccaatttctgtgtggcacatggcggtggtaagagatgtgcggttcccgaatgcacaaagagtgctagaggaagaactgatttctgtgtcagacatggtggaggaaagagatgtcagtctgaaggctgtggcaaaagtgctcaaggtagtaccgacttttgcaaagcacatggaggagggaaaaggtgtgcgtggggtcaacccgagactgagtatgcgggacagtcttcttctggtccttgtacctcgtttgctcgcggtaagactggtctttgtgcactccataacagtctggttcaggataaccgggttcacggaggaatgactataacttccgagagccaagaaccgagagtaagcagcagcgaaacagagaacgaggaagagtttagcggttctcaagacatgaacatggatacaatgaaagcgagaagtgctaccggatctccagagactgatgttgatctcaatgagtatgaagcaggattggggttagctccggaaggaagagtccatggtggaagtttgatgatggcgatgttgggtagagatggtggctctggctctaccggtgggccaaagaggtggatgtaagttgtcttcagtttggttccagtcttgaattcaatgcgtgtgggcaagtgagagtgaaagagtctgtggttgttctagttttaggtttgcttagagtaaaaaaaagggtccaaagtctgtgtcttattggtctttgtagatattgaattaaagggtcgaagcataggttattgtgatgttgtgaattatacaggtaaaagcccacctgtggaaattgtcaaaaacagtcttatgatgatgatgataataataataaaactcatgtcttttgtttgcccccccag

SEQ ID NO: 661 - DNA, 1477 bp, Arabidopsis thaliana
  Clone ID: ARATH-23APR03-CLUSTER2478_1
ggtcaagtggcttggctatatgaagaagaggagactctctggtcagagacggcgatgattctaggccgatgggtttccttcagttgcggaaacacgccggtgactaattgttccgaacgacgacgacatacggagtttcgtcgtctctcctctgctagtacttgtcgaccttctctcatatgctcttgtctcaaaagcaaatcctcccaagaaactactcagattgaacagttggggaatggagaagggttctcagttttggcatcagagattccatgggaggatgataacatatggagcacatttgctctttacatgttctctctgcatattcctctcagttttgggggtttatccattgttgccaacatactccaccggcaggttcttgatcctcagacccaagtgctatcacttgtggttctccaaatggtagaacttgcagggacagtcttgctgctgaggaccacagcgaagcctcagtgcaaatcaatcaactttctaaagggtaataacgaaacaagggaaggaagaaactgggtggttggctcagcattgggtttgggatgtcttgtgggctttatcttcgtcacgtcgcttgtagctgatcaactctttggccctaaggctgtacatgaatcagaattggagaagataatggtgagcggggaagtggcgagaagcggatgttttgctctctactgcgtagtagctcccatccttgaggagatagtgtacagacgctttctcctgacctccttagcgtcgagaatggaatggtggaaggcactagtgatcagctcaggagtatttgctgcaggtcacttctcaggtgaggattttgtgcagctgtttgggataggttgcggtctcgggttatgttacagctggtcagggaacttagcctcatcagtgctcgtccactccttgtacaatgcattgacacttctcttctcttagccacgttcagatgacaaggaaaatttccccaccgaactctctttgttaaagacaagacaacgtataaactataaaccactacacttgttccaagcattgttcaaacgatcaaagaagatgggcaacaaagggcaagcatgatgaagatgatgattaaagatcaaattcttaaattttggaagccgtccttcaccttcacatcctctctatggttgatatataagagcttttctcctataactcactaggtccataccaagatatttttgcctgcacatcgagcttttcttacaacaataatcgaagaatctaaaccaaacgacttcgtcagtgctcgtccactccttgtacaatggcttgacacttgtccttacgctactcttttagccacgccgtaacagagaaggaaaatggttccaacgaatctttcgttgtcaagacaagacagcgaataaatagagtgtaaaacatagatgatctgttccttaaagctttagagaaagagtcgtctttatga

SEQ ID NO: 662 - DNA, 1234 bp, Arabidopsis thaliana
  Clone ID: ARATH-23APR03-CLUSTER2489_1
aatttaaatttctctttctatctactataaaaagtgactctctaagaactccaaagatgagaacattgaattgaattagccatggagaagaatacttctcaaaccatcttctccaacttttttcttctccttctcctttcttcatgtgtctctgctcagctccggacaggtttctaccagaactcatgtccgaacgtggaaaccattgtacgtaacgctgtccgtcagaaattccagcagactttcgttaccgctccggccactcttcgcctcttcttccacgattgcttcgttcgtggatgtgatgcgtcaataatgatagcatcaccatcggagagagaccatccagatgacatgtcattggccggagacggattcgacacggtggtgaaggcgaagcaagccgttgatagcaatcccaattgccgcaacaaagtctcatgtgctgacattttggctctcgccactcgtgaagtcgtcgttttgaccggaggaccaagctacccggtggagctagggaggagagatggcagaatctccacgaaggccagcgttcaaagccaattgcctcagcccgagtttaacctaaaccagctcaacggcatgtttagccgtcacggcctctctcaaaccgatatgattgccctctcaggagcacacactataggatttgcacattgtggaaaaatgtcaaagagaatatacaattttagccctacaacacgtatcgacccgagtataaaccgtggatacgtggttcagcttaagcaaatgtgcccgatcggtgtcgacgtaagaatcgcaatcaacatggatccgaccagtccacgtactttcgataatgcttatttcaagaatctccaacaaggaaagggtttgttcacgtcagatcaaatcttgttcacagatcaacggtcaagatctacagttaattcgtttgccaatagtgaaggagcttttagacaagctttcatcacagcgatcacgaagttaggtcgggttggtgttttgactggtaatgctggtgagattcgaagggattgttcacgtgtcaattagtgtgatttgaggttttctttcttttattccttaaagaggatttttttttttaataataaaatttaatttcttgttgtcaaaataaggagttcataagtgtgaaacatggaaacttaaattaataagatgggtttatttcgttgacaaaaaaaaaaaaaaaaaaaagggcggccgc

SEQ ID NO: 663 - DNA, 701 bp, Arabidopsis thaliana
  Clone ID: ARATH-23APR03-CLUSTER249330_1
aaataagcaacataaaatctttctctttatctctatagctcatacacaaacttcattctaatggctcagagaactcttgttgcaacattttttctaatcttcttcttgttgactaatctcgtctgcagcaaagagattattgtcggaggcaaaaccagctcctggaagatcccttcttcgccttctgagtccctaaacaaatgggctgagagtttacggtttcgcgttggtgacactctcgtgtggaagtacgatgaggaaaaggactcggttttgcaagtgacgaaagatgcatacattaactgcaacaccacaaacccagcagctaactacagcaatggagatactaaagtgaagctagagagatctggtccttacttcttcatcagcggctctaaaagcaactgcgttgaaggtgagaagcttcatattgttgtcatgtcctctcgtggtggccacaccggtggtttttttactggttcttctccttctcctgcaccatctccagctttgttaggagctcccactgttgctccagccagtggtggctctgcttctacttttgactcgccaagttggggttttgggatttgttggattattagcgattgttttgctttgatttaacctgctttgttcaacttctatctctgctttttgattctttgatccacaagatttgtcgaaaaaaaaaaaaaaaa

SEQ ID NO: 664 - DNA, 1288 bp, Arabidopsis thaliana
  unsure (1)..(1288): unsure at all n locations
  Clone ID: ARATH-23APR03-CLUSTER2503_1
ggagagagcaagccattgcaggaaatggcgattccagtgacgagaatgatggttcctcacgcaataccatcgcttcgtctctcacatccaaaccctagtcgcgttgacttcctctgtcgctgtgctccatcagaaatccaaccacttcggcctgaactctctttatctgtcggaattcacgcaatccctcatccagataaggtagagaaaggtggtgaagatgctttctttgtaagtagttatagaggtggagtcatggctgttgcagatggtgtctccggttgggctgaacaagatgttgatccttccttgttctctaaagaacttatggctaacgcttctcgtttagttgatgaccaagaggtcagatatgatcctggttttctcattgacaaagctcataccgcaactacttctagaggttctgccacaattattctagctatgcttgaggaagtgggtattctcaaaataggcaatgttggtgactgtggacttaagcttcttcgggaaggtcagattatttttgccactgctccacaagagcactattttgactgtccttaccaactaagctctgaggggtctgctcaaacttatctagatgcatcgtttagcatagtggaagtacagaagggagacgtgatcgtgatgggttcagacggacttttcgataatgtgtttgatcatgagatcgtttctatagtgaccaagcatacagatgttgcagagtcatcaaggttattagctgaagtggcgagtagccattcaagagatacagagtttgagtctccatatgcattagaagcaagagccaaggggtttgatgttcctctctggaagaaggtactaggaaagaagcttacaggagggaagcttgatgatgtcactgtgatcgttgccaaagttgttagctcatgaatcactctgttcatgataagatcttctctttattctttttgtacaagtccttgtaagaaacttgttcttcacagaaattgataaatggtatttcaaagttcaaacgataagaatcgaatctttatcattgaccttgtgaatggacactctttaagctcaaaatatataatgctaaagccaacatacggcgaagctgaaaacatgtttgggaaagccatngnntaacacagactttattgccatacaatggagatgggatcaaaagagaaagttccagctaaaatggtaacccaaacaaaaaatattggggggcccgtttaagaggatcaaatttatattcccctttcttggcaactaaaaatttttt

SEQ ID NO: 665 - DNA, 1285 bp, Arabidopsis thaliana
  Clone ID: ARATH-23APR03-CLUSTER2508_1
ttggcgcccggcctccctctcgtcccccttgccgccgtctacacctggctgctcacgcggtgccggacccggaagccgctgctcgcggctcgcgtaccgctcctccgcctccctctctcgggacgtcccccgcaggccttcacgtccacggcgcggagcgaactcagggcgtaccagccctgttccgctcctgccacatcgatctccggcaggccgttccgcaaccgtcttctgccaccgggacgcccactcgacccctgatggtctcagtgctggtgaggtttcgaagaacatcaatgcggcgtttgcgaagatcggatatcctggttcggtctaggaggttggtataataataggtacgaaagaaaaccctatttgcgccgcatctctctcgtcttcctttactccgtcaaaaccatgtttctaagtcagttccggagctgtaaacctttgctcgagtctcgtctacctttgctccgcctctctctctctaaatgtctcgatcagtccttcaaaaccacggctagtagcgaatacggtagtaagatcaacaaagtcacaaagcatgtcaatgaggaggatggtgcaactttctatgttactcgaaggggggcaatcgatagttctgcccctgctgaatcaaaagcatatccaaaagcagctaatatcagttcaatccatagtatgagggaatctcttctggaggaaacagaggaagactactacagacgcttggcactttttgccctgaggaatcatggtggagaggatgccataaatgttattatagaatctctaggtgttgagagttctatgattcgcattgaggctgcatttgtgttgggacaattggaatccaaaacagctatagcttctctaagcaagatcttgagagatgtgaaggagcaccccatggttcgagtagaggctgcaaaagcccttggtttcattgcagatgagaagagcagagaagtactccaagaactttcaggcgacctcgatcccattatcgctaaaggttgtgattcttcattgagtatcttggaatttaagaattcaaaaaaatatgaccctctcatataaaatggtgtgtgtgggtctgttgtgtaatgaaaacatctacgtttcatcttccttttgttaaactttgttttgtattcaaatgatttgcagacggtttaagctctgttttaagctaaaaaaaaaaaaaagaaaaaaaaaaaaaaaatctcagtgaaaggatcattaatttttacccgggtgaccacaagtataatcttttttt

SEQ ID NO: 666 - DNA, 1015 bp, Arabidopsis thaliana
  Clone ID: ARATH-23APR03-CLUSTER252206_1
ataattagatctatgtttttaaattgcaaaaaaaaagtgtacaaagagcgtgaaatccgcggtggcttggacccctcccgagtcctcaacacgatataagacactttcttctctaatctccatcacctcttattttcatctgcttttgaatttcaaaccttcacataaaaaaaatacttttgaatccgtgtttcattcatcgaatctttttccgataactatggctgaggaaatcaagaatgttcctgaacaggaggtgccaaaggtagcaacagaggaatcatcggcagaggttacagatcgtggattgttcgatttcttgggaaagaagaaagacgaaacaaaaccagaggagactccgatcgcttcagagtttgagcagaaggttcatatttcagagccggagccagaggttaaacacgaaagtcttcttgaaaagcttcaccgaagcgacagttcttctagctcctcaagtgaggaagaaggttcagatggtgagaagaggaagaagaagaaagacgacagaagggcaactactgaagttgaggtaaaggaggaagagaagaaagggtttatggagaagttgaaagagaagcttcctggacacaagaaacctgaagacggttcagccgtcgctgcggcaccggtggttgttcctcctcctgtggaagaagcgcatccagtggagaagaaagggattcttgagaagattaaggagaagcttccaggataccaccctaagaccaccgtagaggaggagaagaaagataaagaataagaagattatcattaaagatattaagaataatgatggttgatttgctttgtttttttttttttattgtgatgattgatcatcttttgcttttgtgatgtgtaagtttgttggcttttttgttgattacaatttcttattttctcttgtatatggttttaaaaacaaaagatctcaaggtattttaatggtatgaatattttcatttgattaagtgatatggatgatataattttatgt

SEQ ID NO: 667 - DNA, 1365 bp, Arabidopsis thaliana
  Clone ID: ARATH-23APR03-CLUSTER252987_1
ccgattgaagagtaactaacgccgaacaaagaagaaaaaacacaacccctaattttggtctctcaactcttcctccttcttcaacttctaaaaagctttagcaaactccttcagccatggcgcacggaggctatgccaagagaagggattcggaaccaaaacagacggcgggaagcagtcggaggtcgaaagtattgcgtgtagagaagaaacctaagactgtctccatcaagaatcagatgcgttctgttgaacgctttcttcgtaaagatttgcctcctgaagtaagagagtctctagtagagaagttggaagatttgaagaagcagcaagacgctcatgcccgtcttgctgttgaacgtaaaatattctttaggaacagaaagattaagttctttgagcggagaaagatcgaaagaagcattagacatcttgagaagttacaacgtacttcatctgctcatgtgggagatgtagatatagctgagcaactcagtaaactcaaagaagatcttgaatatgttcggttcttcccgaaaaatgagaaatatgtatcactttttactggagctgaggattcagaagtaattgagaagagaggtaaaatgcggcagcagatcaaagccaatattattgttgctgctgctagtgggaaggagttagaagagacggggagtgaagatgatggtcttctggaccttagtgatgatgatttctttgataaagggagttcaagcgatgaagcagacgcagatgatgaattgactgataaaagcgcaaaggaggctgcttctagtgcttctggtagagcaacttctggcatgtctagtgatgaacggaatcagaagcaaaactctgatagagctttaatgccaccaccacaagcaaggtttgaatcaaattctaggaagaatttatatgtacagaggaatgagatgccatcatcctcgagaaacaacacttcaaacagaagaagtgagtcttcatatacaagggcttctgcggcgaattcatatagcagtcagagtagcaacttgagctccaattctgatgctcataaacccaaaaggaagagaaggcctaagaagaagaagcaacagtgatcggatactcggcttctccaaacactacacactcttcatcagttccaattactctactgggatctaatgcagatatatgaaatttatatagatttttgttgtggtcatggaattcagagagatatgtgtttgttgtttttagcttttgaaatgaaactctaaagtttttgggtataaactcccatttgagtctttcatggagctttttaccagcacaattgaccattgataatttttttcccttgaaaaaaaaaaaaaaaaa

SEQ ID NO: 668 - DNA, 838 bp, Arabidopsis thaliana
  Clone ID: ARATH-23APR03-CLUSTER253601_1
aaaaccctaatcacaaatctctcatcaagttctcatcaagcaatacccttttgaggtttcaaccgaatggcgctactggacttggaaggtttgagagaactacaagactgcgcaaactatcttctcgatcactgtccagaagcaagagagtctctgtgccaacaagggaaagagaactggatcgagcaagtctctgaagcttcactaataatgttagatgtctgtaatgtgtcgaaagatgtcatggcactcgtgagacatggcctgcaagatcttcaactgactctgcgctgtaatggatcaaaccttagtgaaaaggttgcagcgtataatcggtataggaacaagctcaagaaggaaacgctcaagtgtttaaatagtctaaagagcattgaaggaggagggagagggatgatggagatgcagagcatagagcagaaccttctgtttgttgctgaggttttgaaagaagtgagaagagccgttgtgactatggttgagtctctgttctcactcgtatgtgttccttggctcgagagaaaaccgagcatagggtcattttcttctatctttacgatgcagttttgctgctttgatgatgcgtgggacgaagtagcgatgcggagcgcaagtacaaggttggaggctgcagagatcactgttgaggagcttgagatcgagttggagtgtattttccggcgactgattcagaccagagtttcacttcttaatattattacagctaaaatatctccggcttgatgcggataccactcctcgaagacatcaaacagatatataccatccggcttcacatttcagtcaggcaagcgcttgc

SEQ ID NO: 669 - DNA, 3556 bp, Arabidopsis thaliana
  Clone ID: ARATH-23APR03-CLUSTER25369_1
aaacttttttgctgtgcgtttttttttgtccaaagaatcatattcttttgccctctcacacgagtcatatttacctttttgccacaacaatcatggcggcgacggcggtggtctggcaaccccgagacgatggtctcgctgagatctgttctcttctcgaacaacagatttctccttcctccgtcgttgacaagtctcagatttggaagcagcttcaacacttctctcagtttcctgatttcaacaactatctcgtcttcatcctcgttcgcgctgagggaaagtctgttgaggttcgtcaagctgctggattgcttttgaaaaataatttgaggggtgcttatccatccatgactcaagaaaaccaaaaatatatcaagtcagagttactgccttgtctgggagcagcggacaggaatatacggactacagttggaactatcatcagtgttattgttaatattgagggagtttctggatggcatgagcttttgccagctcttgttacttgtttagacagtaatgaccttaatcacatggatggtgctatggatgcattgtcaaagatttgtgaggatattccgcatgtcttggatacagaagtgcctggcttagcagaacgccctatcaacattttcctgcctaggctattacagttttttcagtcaccccatgcttcactgaggaagcttgccctgggttctgtgaaccagtatatcattataatgcctgctgtaaggcaggctttgtacaattcattggataagtaccttcaggggttgtttgtcctagccaatgatcctgtaccagaagtcagaaaattggtctgcgcagcatttgtgcatctcacggaagtactcccctcatctatagagccgcatctcaggaatgtcatggaatacatgttacaagttaatagagaccctgacgaagaagtgtcgctcgaagcatgtgaattttggtctgcatactgtgatgctcagctacctccagagaacttgaaagagtttctgccacgcctaattccagtgttgctcgaaaacatggcttatgcagatgacgacgagtcacttttggatgcagaggaagatgagtctcaaccagacagagatcaggatttaaaacctcgttttcacacatcaagacttcatggatcagaagattttgatgatgatgatgatgactcgtttaatgtgtggaatttaagaaagtgtagtgcagcagctattgacgttctctctaatgtttttggagatgaaatccttccagcactcatgcccctaattcagaaaaatttatcagcttctggtgatgaggcctggaaacaaagggaagctgctgttttggctctcggcgctattgctgaaggctgcatgaatggtctttaccctcacttgtctgagatcgtggcatttcttcttcctcttttagatgataaattcccgctcatacggagcatatcttgctggacgctttctcgatttggcaagtatcttatccaggaaagtggcaatccgaagggttatgaacaatttgagaaagttcttatgggtcttctccgcagactcttggatacgaacaagcgggttcaggaggctgcctgttcagcttttgcaactgttgaagaggatgctgctgaagagttagtgccacacctgggtgtaatactgcagcatctgatgtgcgcttttggaaagtatcagagacggaatttaagaattgtttatgatgctattggaacactggcagattcagttagagaagagttgaacaagcctgcttatcttgagattctgatgcctccactggttgcaaagtggcaacaactttcaaattcagataaagatctatttccattgctagagtgctttacatccatttctcaggctttaggtgtaggattcgctccatttgctcagcctgttttccagagatgcatggatatcatccaattgcagcagctggctaaggttaatcctgcttctgctggggctcagtatgacagagaatttattgtttgttctcttgatttgctttctggacttgctgaagggcttggcagtgggatagagtctctggttcaacaaagtaacctaagggatctgcttctcaattgttgcattgatgaagctgctgatgtcagacaaagtgcttttgccttgatgggtgatctagcaagagttttcccagtctatctacaaccccgcctgcttgatttccttgaaattgcaagccagcaactgagtgcaaaccttaatagagaaaacctttctgtcgcaaataatgcttgttgggccattggagaattagcggtcaaggttcgtcaagaagtctcaccaattgtggccaaagttgtctcttccctaggcctgattcttcaacatggagagggtgtcaataaggcactagttgagaacagtgcaataacccttgggagactagcatggattcgtccagacctcgttgcaccacacatggaccactttatgaagccatggtgcatggcattgtcaatggtacgtgatgacattgagaaagaagatgcgtttagaggattatgtgcagtggttaaagtgaatccatcaggaggtgtcagctcacttgttttcatatgccaagccattgcgagttggcatgaaataagaagcgaggatgtccagaccgaagtctcccaagtactgaacggttataaacatatgctgggaaactcatgggcggaatgtttatctgctttggatcctcctgtaaaggaaaggcttgcgagatatcaagtgtaacattgatcatacacctgctagtatcagagagatctgctctagctttttcattgcaaacaacaaatagagtcacggagtttgagcaaaaggcgcttgagacatcatttttttttgcaagattcaatgaagggcaaaaatttctcaagagaagacatacagtacagagtttgtgtgtgtgtgtggggctcttcagattacatggttcctgtctttactattttccctatttctacatcgattcttcgtcctcgtttctattgcgggcaacgttgtatggtggtttgagcagttttggtaaaattattaaaccgaaagagcaaagtcaaaatttattgttcttcagctcgtgtgaactattggacctgtggataccaataagaaaaatgtgattgggattttgtgtattttcttccaagagtaagctgcaaaatacaaagtcgtgtatattttaagtattttcattgaacataaacaacaatagaagttatgcgagattatatgttataatgggcgctcgcgtctgctcaagctaaccgatgtgaccggcaactaaaaaaacctcgagggggggcccggaacccattcgccctaaagggaggggaattacaattccctggccggtgttttaacacggccgtgatctggggaaacctgggagtaaccacaatttaatcggcttggagaaattccccctttttgccagtgggggaaataagggaaaagggccgcccggatcccccttcccaaaagttgcaccgcctgaatgggcaatgggaatt

SEQ ID NO: 670 - DNA, 2395 bp, Arabidopsis thaliana
  Clone ID: ARATH-23APR03-CLUSTER2537_1
aaatccggacgactcgttcaaaatcttatcacaaaccaaaaaaaactttctttcaaaatcgttctctgaggcattttaacgaacagatggcggacttaaacggtgcgtattacggaccatcgattccaccgccgaagaaagtctctcacagccacggcagacgcggcggtggatgcggttgtttaggtgactgtcttggctgctgcggctgctgtatcttaagcgtcatcttcaacatcctcataaccatagccgtcttattaggcatagctgctctaatcatctggctcattttcagacccaacgctatcaaattccacgtcaccgacgctaaactcaccgaattcacactcgacccaaccaacaacctccgatacaatctcgatctcaatttcacaatccgtaaccctaaccgccggatcggtgtttactatgatgaaatcgaagtcagaggatactacggtgatcagcgattcggtatgagtaacaacatctcgaagttttaccagggacataagaacacgacggtggttggaactaaactcgtgggacagcaattggtgctgcttgacggcggagagaggaaggatttgaacgaggatgtgaattctcagatctataggatcgatgccaagctgagacttaagattaggtttaagtttgggttgatcaagtcgtggaggttcaagcccaagatcaagtgcgatctcaaggttcctcttacctctaattcaaccagcgggtttgtttttcagccgaccaagtgtgacgttgacttttgattgctagtcaagagtcaatgctattatagtcttcttcgagttcatcatattacacttgtttattgattcttattttagattgttttgctttattatcttccatacatatcgttggagagagatatttttcttatgtaatgttttattgtatggttccatgtaaataaataatcacattttgtttaatgctaataaaaaaaaaattaaaaaaaaaaaaatctcatgaagcattgatccaagtatcaaaaatgcggaatcttctgctttcccactgatccattttgtgtttgtagaatgagaacaagcaacattgtacccatggaggatttcttggcactttctccatctcttcacctcccaacaatctattcagcttcttgactagagcctcttcatcagattcgtcacacccgaaaaacttttccccttcatcagcatatagagaagcatggattctggcggttgcatcttctagtatagctaccaatttgatatttccgttgatatcacggagttttctgacgtctcggggatacacttgtatgaaccgaacaacaccacctgaatttagcagtcacattgtgataggtcaggatgtccatcagagaaacaaatggagcatcgtcatgggcaacccctgtgatttcagaatgtgaacgactaatgcaacgcgcgattgggttccatctcggtgaaaacttctccccacacattaggataagaaaaggtgtcagcagaaacctttgaggactaaaggcttccatctctctgctcattgtgtactgcatctttgtagagggagtaaaagtggcgttccataatcccatatttacttgaaagaaaaggttcagaagcttcacgtgttgaccaggttgaagacagtgaatggcctgcttctcactaactctatctactatgatcctcaaaacggaaccaaaagtaggaaacttacgtaacatgtatgtaggcaacatctcgggttctacacataaaggaagcctttctgacttaaccaagatgttgcagggtggcatctcagttccatcccaaacaaagaggtaccatctatctttatagaccttggaaatgtgaacaatctggcaagataggtttgaacattcgccttctttgatatctttcagggatgtgaaacagcatgacccatcttcaaacttgtacgtgatcatccattctctcagattcgataagaagttcttatcctgttctctcatcaggaatttaggtgaggactggtaaggtatagaatccacgctatgtttcccattgaataaagcaaaagacgaagaggttgtttcattgcagagagctgtgattttccggttaatcagcacaatctttacacgtgaaagtaagatgatatctccgatcgattcaacacgaggaaggtctcgaatggtacgagcgacgaacttaacgggaaggccagatcccgaataccatggatcaacgattttgagcgtacatgaacaatcagagccattggagaatcctagctcaacgatgactccaatgaggttaacatgaagatgcaatgctttgaaagcgtcttgaattctcaggaatttgtagtcatctcttctctcctcctccat

SEQ ID NO: 671 - DNA, 1379 bp, Arabidopsis thaliana
  Clone ID: ARATH-23APR03-CLUSTER253_1
gttttcttcttccttcatagatagcctttttgactcttctttctctcttctactttttttcaggctctctctctatatctctatcttcttctccggttaactaaaagagaaatgaaaagccgagtgagaaaatccaagtacacggttcaccggaaaatcacatccacaccgttcgacggtttcccgaagattgtcaaaatcatagtcactgacccatgcgctactgattcttccagcgatgaggaaaacgacaacaaatctgttgctccgagggtgaaacgttatgtggatgagatcaggttctgtgacgaagatgacgaacctaaaccggcgaggaaagcgaagaaaaagtccccggcggctgcggcggagaacggtggagatttggtaaagtctgtggtgaagtatagaggagtgagacaacgaccttggggaaaatttgcggcggagattcgtgatccttcgagtcgtactagactctggcttgggacttttgcgacggcggaggaagctgctataggttacgatagagccgcgattcgaatcaaaggtcataacgctcagacgaattttctcactcctcctcctagtccgacgactgaggtgttaccggaaactccggtgattgaccttgaaactgtctctggttgtgattcggcgagggaatcgcaaatcagtctgtgttctccgacttctgttctccggtttagtcacaacgacgaaacagagtacagaacagagccaacggaagaacaaaatccgtttttcttgcctgatttgtttcgctccggagattatttttgggattccgaaattacccctgaccctttgtttctcgacgaattccaccagtccttgttaccaaacatcaacaacaacaacacagtgtgtgataaggatacgaatctgtctgatagttttccgttgggagtgatcggagatttcagctcatgggatgttgatgagtttttccaagatcatttgttggataagtaatttgatgagttcttccccagaatttttctgggtttctctttttggttgtgtgagtgagatgagtggtttgatgacaacgacggggatgaatcttagccgtccgttttccatttcgtggacggctccgatcagcggaagaagcgcaacggagtttttatttatctgtttgagaattttataatttaatttgcgagtaaatatagtaattagtgttaagattgtgagagtttaagttaattagggaggggttttgaatattggggattttgggaggtttttgtttggtttctctccaagtctgtcactatgcaaggaagcagtataaagaccgtatatatattttattattaatattgataaaagtaaaaaaaaaaaaaaaaaac

SEQ ID NO: 672 - DNA, 1441 bp, Arabidopsis thaliana
  Clone ID: ARATH-23APR03-CLUSTER2549_1
gacctaaaaccacaagcaaattgaacccttctcccttttttcatctacaaaccatcttttcttctcaagtctctgccatggcgactctcaaagcttcctttttgatcaaaaccctcgacagtgacgtcaccggagattttctctccgatctggaacgtcgtgggtcaggtgctgttcatgttatcatgggtcctatgttttctgggaaatcgacctctctccttcgccgaatcaagtcagagatcagcgacggaagaagtgttgcgatgctgaaatcgagtaaggatacgagatacgcaaaagattcggtggtgacacatgatggaattggattcccttgctgggctcttccagatctcatgtcatttcctgagaaattcggactagatgcttataacaagcttgatgtgattggtattgatgaggctcagttctttggagatctttatgagttttgctgcaaagtcgctgatgatgatggtaaaattgtgatcgttgctggcctagatggtgactatttaaggaggagttttggggctgtacttgacattataccaatagctgattctgtgactaagctaactgcaaggtgtgaggtctgtggacataaagctttcttcactttaagaaagaattgtgacaccagaactgagcttattggtggagctgatgtctatatgcctgtttgtcgcaagcattacatcactaatcatattgttattaaagcctctaagaaagtcttggaagattctgacaaggctagagctgaatcctgtgttgctgctacaatctaactataaatgatatggaacaagcaacatatgttatggtgaagttttctttcttttttggttgtttggtttctttactggtctggtttatccttaatgttgtctttgaaatacacttgtgatgttcattgtatataaatataagtttgatgctttctctaaaaaaaaaaaaaaaagtttcatactcttcattttccaagaccacttagtttttcgagttggacttacaatgttgcgtatgagaggttgttttgtgacagaagcatttctttcatcagatcctggatttgatacttgtggattcgcattcttccattgttgcattgctctggtttaagaagcactgttttcttgatccaccttcatcactgaaaggtatctctagggagcaaactattgatgctagaggtgtctccactgttgtgaatctcgaatcactctttggaccgagaccatagatcttgacatctacgtctacttcatgctgctgtgaatattgaaactcttgttgcagtcggttctgtctccagatcttaatgtaaggatacataaacattaatgattgattaacatccaagcaagctcaaactctgaggcaaacctgagattgaagagagaacaatctcgaggatgacacctcttaaaaagca

SEQ ID NO: 673 - DNA, 909 bp, Arabidopsis thaliana
  Clone ID: ARATH-23APR03-CLUSTER2561_1
ctcactagtcccgggtacggggccccctcgaggggaaagaaaaagtctcccaggttcctttgaaagatcacactactgttttttggactcgagcttcttcttcaacaatgcctctctctctccgacttgctccatctccgacgtctttccgttattctccgattacatctaccggcgccggaggattttcccccgtgaagcagcactgccggatcccgaattcgggcgtcgcgacgaaaattggattctgttctggtggtggtggtgttttagattccggtagaaggattggttcctgtgtggtgaggtgtagcttagaaacagtgaatgtcactgttggccaggtgacggaggttgataaggacacgttctggccaattgttaaagccgccggtgataagattgttgtcctcgacatgtacactcagtggtgtggtccttgcaaagtgattgctcccaaatacaaagagctatcggagaagtaccaggacatggtgtttcttaagcttgattgtaaccaagacaacaagccattggcgaaagagctaggaattagagtggttccaacttttaaaatcttgaaagacaacaaggtagtaaaggaagtgaccggggcaaaatatgaagacttacttgcagccattgaagcagcaaggtcaggctgagtctctctctatatcactcattatgtaaagtattaggatcattctccatccatgtaattcgtttggttctatgtatgtaactctttgctgttcccttaaccggaatcggttgttcactatctatgtataaatgctggaaagttatggaatgatgagctgaatgtgtatctgtatgcatcaaaaaaaaaaaaaaaagtaaatatgcatgtaaactataagaaatttaaaaattaagattgatttt

SEQ ID NO: 674 - DNA, 940 bp, Arabidopsis thaliana
  Clone ID: ARATH-23APR03-CLUSTER2581_1
atatgttgaatgttcatagccataataataatttgtccaacggagataagacgcctctggtgttatccccaatgtcgtcactccacgctaccgtgagcctcccactgttctccaactcaaaccacaaaaagctaacgtgcgcagctacattatcacctccgccatggaaacagagccggcgagttatctccgtctccttttttctctcccgtctcctcctcctccctaacgatgctatggctggtggcttaatggataaattggataaatacgtcaagaggaagaaacttgatccacttgaagcatatgtaccaccagtgattctagctcagttacaaatccaggatcttgagggatttttgaatgtggagaaacctgaatttgaggcgtgtagacgccaattgcggtctggtcctgctagctctcttcgtgtaaacattcgagctgttgctcagtatgcttcagatgatggtttctccaaaaccgccactgatgatgttgatcgatgtttaagagcattggaagaactggattcgttgtttctacgtgcgtcgaggaaagattcaaatgcaactgttgtattgatgaagtcacagcttggaacagcgttaaccgcactggacagtcttctacaaacagttccttctcaagtgcttgataaagggaaagctatggtggaagtctacagatcagcatctgaagaagatgcgggaagtgatgatttagaatcctctgagataaagcagctccagtccatactgtgagaggggaggtcacaggactattactatccaaaaacagttgttaatcttacagcattggtatcaaaaactcttctgattcagtgtatatcatgtattgttaacttcaattgatgcatatattaaaaccagaatagtttgctgctaaaaaaaaaaaaaaaaaaaaaaagggcggccgc

SEQ ID NO: 675 - DNA, 950 bp, Arabidopsis thaliana
  Clone ID: ARATH-23APR03-CLUSTER2600_5
atctcattctcacttacttcttttctttttttgtgttcttgtttagaagaagcaatggccacttcagcaatccaacactcttcttttgccggccaaacggctctaaagccatccaacgacctccttcgcaaggtcggagcctctaatggtggcggccgcgttatcatgcgccgtaccgtcaagtctacccctcagagcatctggtatggaccagaccgtcccaaatacctaggaccattctcggaaaacacaccatcatacctaactggagaataccctggagactacggctgggacaccgctggtctctcagccgatccagaaacattcgcaaagaatcgtgagctcgaagtgatccacagtagatgggcaatgttgggagctttaggctgcaccttccctgaaattctctcaaaaaacggagtcaaattcggtgaagccgtgtggttcaaggcaggatctcaaatcttctcagaaggaggacttgactacctcggaaaccctaacttgatccacgcgcaaagcatattagctatatgggcgtgtcaagttgtgctaatgggattcattgaagggtacagaatcggaggtggtcctcttggggaagggcttgacccgctttacccgggcggggccttcgacccgttgaacttagcgtaggatccagaagcgttttcggagttgaaagtgaaggagcttaaaaacggtcgtcttgctatgttctcaatgtttggattctttgtccaagccatagttaccggtaaaggtccgatcgaaaatctgttcgatcacattgcagaccctgtggctaacaatgcttgggcttacgccaccaacttcgtccccggaaaatagagtttgatcggataatttatgtaaattatatcttttaaacatttatcaatgcattaaagttatccccaaaaaaaaaaaaaaaaaacggcacgaga

SEQ ID NO: 676 - DNA, 2310 bp, Arabidopsis thaliana
  Clone ID: ARATH-23APR03-CLUSTER26044_1
atgaccgccgattcaaccgtcgcactcgttcatagcgtcgtttctaacggtgatgtctccaacggaaacacctccgcttcctctaagaaatctcgtgagattgaccgtcgccgccgcagacggaagcagaagaagaacaacaaagcatcccaagccgagaatctctcttttcacatcaccgattcagagagaacaccgaatatgaccgccgattcaaccgtcgcactcgttcatagcgtcgtttctaacggtgatgtctccaacggaaacacctccgcttcctctaagaaatctcgtgagattgaccgtcgccgccgcagacggaagcagaagaagaacaacaaagcatcccaagccgatgtagatgcatcggacgtttctgctgcttctgaatccaaagagaatacagatccccagccacaggtttgtgagcagattgtgatagagtatgttccagagcaagctgaatttgaagatggttttaacgatgagtttaaggaaatcttcgagaagttcaacttccgcgaacctcttgcctctgaagaagacggtacgaaagatgagtctgaggagaaagaagatgtcaaaaagaaggttaactctgattctgattcagacgacgacgagcaggataatcagaacaaagagaaaggcatctctaataagaagaaaaagcttcaacggagaatgaagattgctgagctgaagcaggtttccgctaggcctgatgttgttgaggtctgggacgcgacttcagcagatccaaagctgttagtgtttttgaagtcgtaccggaatacagttcctgttccaagacattggtcgcagaagagaaaatatttgcagggaaagcgtgggatagagaagcagccatttcatcttcctgatttcattgctgcaaccggaattgagaagattagacaggcttacattgagaaagaagatggtaagaaattgaagcaaaagcaacgggagagaatgcaaccaaaaatgggaaagatggacattgactaccaggtacttcatgatgcatttttcaaataccaaacaaagcctaagctgtcagctctaggcgatttgtattttgaagggaaagaatttgaggttaaactgagggaaacgaaaccagggtttttgtcaaacgacttaaaagaagctcttggtatgcctgaaggcgctcctcccccatggctgattaacatgcagagatatggtccgcctccttcttacccacatctgaaaattcctggtttgaatgctcctattccaattggagctagctttggttttcatgctggcggctgggggaaacctccagttgacgaatatgggcgtccattgtatggagatgtttttggtgtccagcaacaagatcagcctaactacgaggaggagccaattgataagagcaagcactggggtgatttagaggaagaggaagaagaagaggaggaggaagaagaggaacaagaagaggagatggatgaagaggaactagaagacggcactgaatctgttgatacactgtcaagcactcctactggtatagagacaccggatgcaattgaacttcgtaaggatcagagaaaggaacctgatagggctctataccaggtactcgaggaaaagggagagagtgttgctcctggaacattgctgggaacctcacacacatacgttattaagactggtactcaagaaaagacgggagccaaaagggttgatttgctgagagggcagaagacagacagagtggatgtcagcttacagccagaagagctggatgctatggaaaatgttttacctgccaagtatgaggaggcaagagaagaggagaaattgcgcaataagccagtggacttgagtgacatggtcgtcgagcatgtgcagcagaatagtaggaagaggaaaatgcatgacaaggaagggaagaagaagaaagatttcaaattctgaggtgttctggaagagacacggaaaaggattctggattctggacatgagagagatagggagagattcttgttccagagttattagtctttgagtcagagatcttgagttttagtcttaatgcttatgagattctatactatgttgttatctgaaggcttaagtaaaactttgtttttggaatttgaacaaattcaaagcctgagacttggaacaaaaaaagtggggaaaaaaggctttgttttgtaagcgacgtcttgtttttcaaattgtccgagtactttcagcgtttttggtttttaaaagattgatcattcggtctacagaataaaccgtcgatgtgatctatttcagtgc

SEQ ID NO: 677 - DNA, 958 bp, Arabidopsis thaliana
  unsure (1)..(958): unsure at all n locations
  Clone ID: ARATH-23APR03-CLUSTER260609_1
atcttcgtcttcttcaactctttcaatggcgtcttcttctaaaatctgcagattatcatcaaagattcattctttaacccagaagctcagcaagacgaatgttcacatttcctctttaccctctcccattaaatcttcatctccatcctcagcaacttcccgtatcaatcaatcttttagattaccggtggagctaagttgctgtttatcgatgttgccactacacagtgctatagcatctgccagattgatatcaagtttgtctgttgagtctaagagctggggtttagttcctcaaggaatttcaatgcctttatgacggtatttcatcttacaacaagctttgggtatgataaagacatgaaatgaaaacaaaaactcgggtttgtatcgttctcgttatctcttatcaaacccaaagggtcctgaatttagagaacaggtcctaaaactctccgcttaaattctttcattttcgagttgtctttttgcgttgttatatacaattcatggttatcacttatcagcaactgagtgatcagtgtaatgttgctggatagattacagttttcagtgtagtgtctgatcttgaaccatacgaggcctacatggagctagacgatcctttggtaattgaaaaaatgcgtaaattatgaagatttgtcaaatatctgaaaatacaaaccaatgtttatggaaatataaatctatagagattttaatgaatggagagagtaaggttatccttcttctgctacttcttcttcttcttcggcttgaaagacatcatctgagattaaagcgaataaatgggaaatggaacgagagagtttgaagccgaaagatctnttctttgtcttcatcccctcctgcaggagaatatgtcgcaagaagtggagattatgagaaacgataaagcttggattatcacaaaaatggcagcatttgtccggacgcg

SEQ ID NO: 678 - DNA, 1600 bp, Arabidopsis thaliana
  Clone ID: ARATH-23APR03-CLUSTER26067_1
catgatctgctgagcatatacaatgaactcgatgtaccacacccccggaaacttcagcgaaaaaaatgccactctcgttgcaatctccgccttgtgcaactctctctgcttcaatccgaaagggacgatggaagacgctcgccgccggattctccgttactcctcttcccgccgttaacttcagtcttcggcgatcgattcctcggattcttgcttccgctagttcctcctcctctcctgcgtcttcgtctctcgaagctggtgagaacaatgagctaaatgctgtttcagcttttagtgagattgttcctgatactgtcgttttcgatgactttgagaggtttccgccgactgcagctactgttagctctgctcttcttctgggtatctgtggtctacctgataccattttccgcaatgctgtggacatggctttggcggattcttcttgtgcagggcttgaaaccacagaatctcgactctcttgctttttcaataaggctattgtcaacgtaggtggcgatcttgtcaaactcgttccaggtcgagtttctactgaagtggatgcacgtcttgcttatgacacaaatggcattatccgcaaggttcatgatctgctgagactatacaatgaaatcgatgtaccacacgaccggctcctattcaaaatccctgcaacttggcaaggtattgaagctgcaagattgttggaatcagagggaatccaaacgcatatgacctttgtttacagctttgcacaagctgcagcagcttctcaagccggtgcttctgtcattcagattttcgtcggtcgcctcagggattgggcgcgtaatcattcgggagataccgagattgaatctgctattaaatcgggagaagatcctggtttggccttggtcaaaagatcatataactacattcacaagtatggttacaagtccaagctgatggctgctgctgtccggaacaaacaagacttgttcagtcttctcggggtcgattatgtcattgcaccattaaaggtactgcaatctcttaaagattcacccgccattcccgatgatgaaaaatactcatttgttcggaaacttactcctgaaactgcaacacattaccacttcaccaacaaagagctggtcaaatgggaccagctaagcttggcttcatctatgggtcctgcatcagtggagcttttatcagccggtgttgaaggttatgcgaaccaagcgaaacgtgttgaagagcttttcgggaagatttggccacctcctaatgtctaaatacacagcttttctcttcatcaataaggatctgtatcaataagagaactaagtgtccatgttacttgaacactaccctgtttatcttcctgccctctttatctttttcgtggcttgttgttcatcatgtctgagacttgggctacaagataagagactttagttttaagactaaaagtctaaaaccaaatccttttcatgttgtttcgtctgaacttcggtctttttttctctgtaattgacttagtcggttctcaaaaaaaaaaaaaaaaattgtaccgataaaccaaaattgaaccaattgtttttgtaaaacc

SEQ ID NO: 679 - DNA, 1284 bp, Arabidopsis thaliana
  Clone ID: ARATH-23APR03-CLUSTER26080_1
attccaaaagttttttctgttgtgtgtaaaaagcccggatttagagagagatttagttttttttttttttccggcacttgggtccttcaaagtctccgccttctgccgtgttgaagttcgatggcgataggagaccgcaagaagattatcatcgatactgatcctggaatcgatgatgcaatggcgatattcgtagctttaaattcacctgaagttgatgtcattggcctcactactatctttggaaacgtgtataccactctcgccactcgaaacgccttgcatttgttggaggttgcgggtaggaccgatattccggtggctgaaggaacacataaaaccttcttgaacgatacgaagcttcgaatagctgactttgttcatggaaaagatgggcttggcaaccaaaacttccctccacctaaaggaaaaccaattgaaaagtctggacctgagtttttagttgaacaagcaaagctttgccctggtgaaatcacggttgttgctttgggaccactaacaaatctcgcgttggctgttcagcttgatccagagttttcgaaaaatgtcggacaaattgttcttcttggtggagcatttgcagtaaacggaaatgtaaatccagcttcggaagctaatatttttggcgatcccgaagctgcagatattgtgttcacatgtggggccgatataattgctgtgggaatcaatgtgacccatcaagttattatgacagctgatgacaaggacaaactagcatcatcgaaggggaaattagctcaatatctctgtaaaatccttgatgtgtactatgattatcatctcacggcttacgaaatcaaaggtgtgtaccttcatgatcctgcgacgatccttgcggctttccttccttctctattcacttatacagaaggagttgctagagtgcagacaagtggtatcactaggggactcactttactgtacaacaatcttaagaggtttgaggaagcgaacgagtggtcagacaaaccaacggtaaaagtggcagtgacggttgatgctcctgcagtcgtgaagctcataatggataggcttatggagtcttaaaccatcttgggtcgttaattagttatctctttctctttgatgtttcactattgcgagccatttctcttgttaaaaataaggctcctcttgctgcattatttatttattgtttaatctttattaaaacgaatattattatgttaccaattaccaataataaagttaagatttttcctccaaaaaaaaaaaaaaaaa

SEQ ID NO: 680 - DNA, 1696 bp, Arabidopsis thaliana
  unsure (1)..(1696): unsure at all n locations
  Clone ID: ARATH-23APR03-CLUSTER26086_1
acttcaaatttatatatgagtatcgaattccaattgcggaagaaaggagaaaataatctccggtttgagctgcgtcgacgagatctatcgtcaggatctcagatttgttgttacactcttgctcaagtctggagacatgagttctccgggaacgagtatgttcaccaatttcactaagctctgcaaaggacttgccctggtacttgtggtgggacacctcgtggttcagttcattcccgctaccgtcccataccttgctctgattccggcgaggactattccttttgcctggaatctgataacaagcggctattttgaactctcagtatatggggttgtcttcagcaccgtttctctcctttttatgggaaagttcctggaacctgtctggggttccacggagttccttaagttcatctttgtggtgaacttccttacgtatctctgtgttttcgttacagccattgccttatactacataacgaggctggaagtttacctatatatgccctttgctggttttcatggtgtcttggcaggccttcttgtagggataaagcagataatacctgaccaggagatattgctgttaaagataaaagcaaagtggttgccctcaattatgctaattttgtcaatagcctcaagcttcttcacactagattcagcagcatatcttcccactttgatatttggtacatatatgggctggttatacctcaggtacctacagaggagaccagaaacaaagctcagaggtgatccaagtgatgactttgccttctctactttctttcctgaacttctcaggccagtaattgaccccattgccttaatctttcaccggatgctttgtggaagatcaaatgccaccagtgaagaccatgattattctaccagtggtgcaccattgccaggttctgattctgctgaagcatccaggaggagagaaagaggggcaagagctctagaggagagactaggaacggaaagattggttcctgcaaggaacaaagatgaattgcagagtgatggtttagataacgtataagtggagattgcaataagcattttgaagaagctgttgttggttcttacttgtgttcatgtggacagtttttttttgttttttttttttgttaatgaaattggcgtttatacagaatcagcttcgtaaattcctttgacagctcagaaaggtagtacatttccttggacaaaccaccaattagaaacaattttcttggacgagaggatataaaagtagttatacaaaaaaaaaaaaaaaagggcggccgctagaagctacgacgcggcaggcgtcaagtatctaagtgtcnnnnnnnnnnnnnnnnnnnnnnnnnnnnnnnnnnnnnnnnnnnnnnnnnnnnnnnnnnnnnnnnnnnnnnnnnnnnnnnnnnnnnnnnnnnnnnnnnnnnnnnnnnnnnnnnnnnnnnnnnnnnnnnnnnnnnnnnnnnnnnnnnnnnnnnnnnnnnnnnnnnnnnnnnnnnnnnnnnnnnnnnnnnnnnnnnnnnnnnnnnnnnnnnnnnnnnnnnnnnnnnnnnnnnnnnnnnnnnnnnnnnnnnnnnnnnnnnnnnnnnnnnnnnnnnnnnnnnnnnnnnnnnnnnnnnnnnnnnaagcttacggaacttaccccaaaaacttattgggggatggttcactagggccctcccct

SEQ ID NO: 681 - DNA, 3401 bp, Arabidopsis thaliana
  unsure (1)..(3401): unsure at all n locations
  Clone ID: ARATH-23APR03-CLUSTER26105_1
ccaaaacnactggnngaactcccactcgccggctgggcggcncgctnctnaaactagtggantncccccgggcctgcaggaattccggcacgaggnagananaaananatananagnananagctcactagtccccccccagcccccccccgngtttcagtggtgtctctttcatctgatcatcggatctatcggttcctgttagaagcagttgtcttcgtagttcggcaaacagacttactcaacacagaccgtttcttacttccgaggccatttgtttgaggaagaatcggtttctaccccattctgttgatacacataagcaaaacagcaggaggctcatttgttctgttgccacagaatcagttccggataaagctgaagattccaaaatggatgcacctaaagaaatatttctcaagaactacacaaagcctgattactactttgaaactgtggatctgagcttctctctaggtgaagagaaaacaattgttagctctaaaatcaaggtttctcctcgagttaaaggatcttctgctgcattggtcttggatggacatgacttgaagctactttctgtcaaggttgaggggaagcttcttaaggaaggggattaccagttggactctcgccatctaactcttccttcgcttccagctgaggagtcctttgttttggagattgatactgagatatacccccacaagaatacttcacttgaggggctttacaagtcttctgggaatttctgcacacagtgtgaagcagaaggtttccgcaaaattacattttaccaggatcgtcctgatataatggctaagtacacgtgtcgtgtggaaggtgacaagacactttatcctgtgttattgtccaatggaaacctcatttctcaaggagatatagagggtggtcgacactatgccttatgggaggatccattcaagaaaccgtgctatctatttgctttggtggctggacagctagtgagcagagatgatacatttaccacacgctctggtaggcaggtttccctgaaaatctggactcctgcagaagatctaccaaagactgcccatgccatgtattccctaaaagcggccatgaagtgggatgaggatgtgttcgggcttgagtatgacctggatctcttcaacattgttgctgttccagattttaacatgggagccatggaaaacaagagtttgaatatttttaattccaagcttgtcctagcatctccagaaacagcaacagatgcagattacgctgcaattttgggtgttattggtcatgagtactttcacaattggacagggaacagggtgacatgccgtgactggttccaactcagtctaaaggaaggacttactgtcttccgtgaccaggaattttcatctgacatgggaagccgaactgtaaagcgaattgctgatgtttcaaagcttcggatctatcaatttccgcaggatgctggtcctatggcacatcctgttcgcccacattcatacatcaagatggataacttctacacagtgacggtttatgaaaagggagctgaggtcgtcaggatgtacaaaactctactaggaactcaggggttccgaaagggaattgatctctattttgaaagacatgatgagcaagcagtgacttgtgaagacttctttgctgctatgcgtgatgcaaataatgcagactttgctaatttcttgcaatggtactctcaagctggaacgcccgttgtcaaagtggtatcctcttacaatgctgacgctcgtactttctctttaaaattcagtcaggagatacctccaactccaggccagccaacaaaagaacctacatttattccagtggttgttggtcttttggactcaagtgggaaagacattactctttcctctgttcatcatgatggtacagtgcagaccatttcaggcagcagcacaatacttcgagtgactaagaaagaagaagagtttgtgttttctgatataccagaaagacctgttccatccctatttaggggattcagtgccccagttcgtgttgaaactgatctctctaatgatgacttattcttcctcctagcacatgattcagatgaattcaataggtgggaggccggtcaagttctggcaagaaagctgatgctgaacttagtttctgatttccagcaaaataaaccgttggctctaaacccaaaatttgtgcaaggtctcggcagtgtgctttctgactcaagcttggacaaggaatttatagccaaagcaataacactacctggggagggagagataatggacatgatggccgtggcggatcctgatgctgttcatgctgttagaaagtttgtacgaaagcagcttgcatctgaacttaaggaggagcttctaaagatagtcgagaacaataggagcacagaagcttatgtctttgaccactcaaacatggcgaggcgtgctttgaagaatacagctctagcttatcttgcatctctcgaagatccagcatatatggaacttgcactgaacgaatacaagatggccaccaatttgaccgaccaatttgctgctttggcagctctatcccagaaccctggtaaaacccgtgacgacattcttgccgacttctataacaagtggcaggacgattacttggttgttaataaatggttcctccttcaatcaacatccgacattcctggcaatgtagagaatgtcaagaagcttttggatcacccagctttcgatctgcgcaacccaaacaaggtttattcgcttattggagggttctgcggttccccagtgaatttccatgccaaggatggatcaggttacaagttcttgggtgacattgttgtccagttagacaaattgaaccctcaggttgcttctcgtatggtgtctgccttttcgaggtggaagcggtacgatgaaacccgtcaaggtctagccaaggcacaattggaaatgataatgtctgctaatgggctgtctgagaatgtctttgagattgcctccaagagtttggctgcttgagagacacgttaagaatccttttaaagacactttactctgaactatttacctactgaaattagtagtgggatatgttaaaatgatcacagattgttttgcctctgcttatgagctttactattacaataaacgtttgcattatatattacggcaatgttatttctcagaagctgtcattgctttgtctacattgagaaagatcatagaacttcataaaactttgactgtaaaataaagtgttacaatgcaaaaattttgaaagaaataaaagaaattgttgtttgcacctttaaaattaaagttgttaaccaatgccaaaaattttttgaaaaagaaaataaaaagaaatttgtttgt

SEQ ID NO: 682 - DNA, 1980 bp, Arabidopsis thaliana
  Clone ID: ARATH-23APR03-CLUSTER2624_1
tcacatgggcccaaagatgcccaacacagaaacagaaaatatgaaaatattagtcaccggctctactggttacttaggcgcacgactctgccacgttctcctccgtcgtggccactccgtacgtgcattggtccgccgcaccagcgatctctctgacttacctccagaagttgagctcgcctatggagacgtaacggattaccgttctctaacggatgcttgctccggttgcgatatcgttttccacgccgcagctttagttgagccttggcttcctgacccatctcgattcatctcagtcaacgttggtggactgaagaatgtcttggaagctgtaaaggagacgaagaccgtgcagaagattatctacacttcttccttcttcgctcttggatctaccgatggatctgttgctaatgagaatcaagttcataatgagaggttcttctgcactgagtatgagagatccaaggctgttgctgataagatggctttgaatgctgcttctgaaggtgtgccgataattttgctgtatcctggtgttatttttggtccaggcaagctcacttcagccaatatggttgctagaatgttgatcgagcgctttaacgggaggttgcctggatatattggctctgggacggatagatactccttcagccatgttgatgatgttgtggagggtcatgttgctgcaatggaaaaaggtaggcttggtgaaagatacttactcactggggaaaatgcttctttcaagcttgtctttgacatggctgcactgattactggaaccaaaaagccaaactttagcattccattatgggccatcaacgcatacggatggttatctgttttaatctctcgggttacaggaaagcttccacttatcagtcctccgacagtgacagtgctgagacatcagtggtcatactcttgtgataaggctaagctggaacttggttataaccctcgaagcctaaaggaaggattggaggagatgctcccttggttgaagagtctgggcgtcattcactactgaaattcaaatttcccatctttcaggtatttcgaagaataatattcccttgaattcagtcactatgatgagtgatgactacatttttacttctcccgttacacttttaacccaatcgatttttatcttgttacaaaactgcttcgttttgatcgtgtatgtcaaataaatgtgaaacattgtgtgcaaatgctgatgatcatattttaagatgttgagctacgtgtgagagtaggaaagagggaatatgtaaatgtgggaaataatcacattttatctgccaagaactatatgattacatctataacatatatgatcagaagataaatactaagtatccatataatttgttcatgatggttttgatcttttaggatatccactttattgtagctgcatggccgttggtagtcaatcttctttttaagttcagaagataaatactaagtatccatataatttgttcatgatggttttgatcttttaggatatccactttattgtagctgcatggccgttggtagtcaatcttcttttcagtttatgctgttacagtccacagtcttagagaaagggactcctatattaacaccacatttagcagggagttgtttggcaaaatcatcattaattccagggattgtattagctacactcttcaagcaattacaagctacttgtctatcggctttcgcaggcgctgcggcttttagactattaagtccgttgcagcacattggagacggatttcctccagcttttagataaggcaaacattgtgctaagtacatgtttactgcggacatgctatggcttctccatgatacgcaatccccaataaaatcgtaatcacaagtagtaacatttttcgggttgtagtagtaatgttcctcatatttttcagttaacgagagttttaacaattttgttttctttagtgtgtt

SEQ ID NO: 683 - DNA, 1355 bp, Arabidopsis thaliana
  Clone ID: ARATH-23APR03-CLUSTER26355_1
agccccaccaaactcacaaatgtctcactgagtccactcggtcaccacatattcgaagcgttctttgcttcctctgtatttcaagcaagcttctacgatcttcctcctgtgttttcgtctctaatcgtaagtttaattttgctcggtatcgaagatttttgtcaatctcaaagtagatagatcagaattaagcaaagagattgataattaggtttaggaatcgaaatttattgtgatgtttaggtaatcggaaccaatggaatcattgcattgagtagaaaccctaattttgggggactgtggagtaagtagatcaggaaaaccagtttcttgtggaagcttcaatggaaacgactgttaaaaactcaagcagtgatggtgagtggaaagtagtcttacctagtaaaggaagacaaggaagaagaagaaaaccgaaacctaaaggtcaagcagaagaagaagagcaaccatggaaatcagatgatcttgaaattgatccacagagacaagcaagactaaagcagaagatggaaatctctctgaagaaaatcgaaagctcgagtttttacacagcattcttggagcagcttaagtctcctgaggtttcgaatcagattcgcctcgtgttagggtctgaaacacagttgcagatggtgatgtacggtataggtagcattgagtcttatgaatctccgaggtttcagctgagcattgcaatcttgatgaagagagagtttgattgggttggtgataacattgaagtgtttgacccagttctctctgcaactgaatctagttacctagaatctttgggatgcagtgttctatctgtgaatgagcaagctcgtagggaagctttaaagcctactcttttcttcatgccacactgtgaggccaatctatacagcaacctattgcaagcaaattggagaatggatcgactgtcgaaaatcgcattgtttgggaacagctttcagatgtatgaggagcaagtttcatttgacgcagaagtcatctgtgctaccaaacgaatcatagctgcacaaagagtcacaagcgagtttgctattgagacggaatcagatgattattttgcagcattccatgattcaagctggcattttttcagttctggtatagattcggagctgccattgttcgtttcagactaattttagatcattgttttcaaaagctttttgattttcacttgtgcaacattttgtttatctgtctttttcctccttgcataatcttagccttcaaggcgggcaaaacaattgaagttattgacttatcaatgcagtcaataaaatttaatgaaaaaaaaaaaaaaaaaagcggcagcaaaaaaa

SEQ ID NO: 684 - DNA, 3536 bp, Arabidopsis thaliana
  Clone ID: ARATH-23APR03-CLUSTER26389_1
aacaactcttcccaattgtgaaacctttatatcccattatcagctgttttaagttgaccaagttttttcttatggtcctcttcctattttcttcttttgatatacttttttttttaactctatttgttcaaagtcttcgtcttctttttgttaacattattgtttacatgtttttgaaagagagattataatttttattaagagattcgtcaaacctttgtgtagagcacatgcttttttcttagattattttgagataggatcagaaaacagaggaagtgataagaggttctttttgggtttgaagatgagttcaagaactggagcctctttgctcctgatcttgtttttcttccaaatttgttctgtttcggcactcacgaatggtttagacgcttctgctttaaatgctctgaagagtgaatggaccactcctcctgatggttgggaaggctctgatccttgtggaaccaattgggttggaattacatgtcaaaatgaccgcgtcgtttcaatatcactaggtaaccttgacttggaaggaaagcttcctgccgatatatcgttcttgtccgagttgcggatcttggatttgtcatacaatcctaaattgtccggaccgcttccaccaaacatcggtaaccttgggaagttaaggaacttgatccttgtgggatgtagtttcagtggtcaaatccctgagtccattggaactctaaaagaacttatatatctctccctaaatttaaataaatttagtggaacaattccgccttcaattggcctgttatcaaaactatattggtttgatatagctgacaatcagattgaaggagagcttccagtttctaatgggacttctgcacctggacttgacatgcttcttcaaactaagcattttcattttggaaaaaacaagctttcaggcaatatcccaaaagaacttttcagctcaaacatgagtttaatacatgtcctcttcgatggaaaccaattcacgggcgaaattccagagaccctcagtctcgttaaaacgttgacggtgttacgccttgataggaacaaactcattggagatattccttcatatcttaacaatctcacaaatcttaacgaactgtacttggccaacaacagatttactggtactcttccaaatttaaccagcttgaccagtctctacacattggatgtgagcaataacactttggatttctcacccattccatcatggatctcttcattaccctccctatcaacattaaggatggaagggatccaacttaatggtccaataccaatctcatttttcagccctcctcagttgcagactgttatcttaaagcgaaatagtatagtggaaagcttagactttggtacagacgttagcagccagttggagtttgtggatttacaatacaatgaaataactgattataaaccatcagctaataaagtcctccaagtaatattggcaaataatccagtgtgtctagaggcgggaaacgggccgagttactgttcagcaatccaacacaatacctcattttctacactcccaacaaactgttctccatgcgaaccgggcatggaagcgagtcccacgtgccgctgtgcgtatccattcatgggaacactctacttccggtctccttctttctcagggttgttcaactccaccaacttctcaattctacagaaggcaatcgcggatttctttaagaagttcaattatcctgtagactccgttggtgttcggaacataagagagaatccaactgatcatcagcttctaatagatctattggtctttccattgggaagagagagttttaatcagacaggaatgtcacttgttggttttgcatttagcaaccagacttataagcctcctccgatatttggcccttatattttcaaagctgatttgtacaaacagttctctggtatgatgaacccttgtcacacacacaatcaaactagaactaaaggttgttattgataactcatttgctctgcctttctttttgtcacagatgtagaagtttcatcaaagtcatcaaacaaaagcattctcattggagcagtagttggtgttgttgttcttctactattgttaacaatagctgggatttacgctcttaggcagaagaagagagctgaaagagcaactggtcaaaataatccttttgctaaatgggatacaagtaagagtagtattgatgctccgcagctaatgggagcaaaagcgtttacttttgaggagctgaagaaatgcactgacaacttttcagaggcaaatgatgttggcggtggaggttacggcaaggtttatagagggattcttcctaatgggcaactcatagcaatcaaaagggctcaacaaggatctttgcaaggagggttggagttcaaaactgagattgagcttctctcaagggtccatcataagaatgttgtcagactcttgggcttctgctttgaccggaatgaacaaatgctcgtatatgagtacatttcaaacgggtctcttaaagacagtctgtcagggaagagtgggattcgattggattggaccagaaggcttaaaatagcacttggttcaggcaagggcttggcttatcttcatgaacttgctgatcctccaattatacatagagacatcaaatcaaataacatattacttgatgaaaatctaaccgcaaaggttgccgacttcggtctctccaaacttgtgggagaccctgagaaaactcatgtcacaacacaagtcaaaggaaccatgggctacttggatccagagtactacatgacgaatcaattaacggagaagagcgatgtgtatgggtttggtgtggttttactcgagctattaaccggtagaagtccgatagagagaggcaaatatgtggtgagagaggtgaagacaaagatgaataaatctcggagtttgtatgacctgcaggagttgttggacacaacgatcatagcaagcagtgggaatctaaaagggttcgagaagtatgtagacttggctttgagatgtgtggaggaggaaggagttaataggccatcaatgggtgaggttgtgaaagagattgagaacataatgcagcttgcgggattaaatcctaactcagattcagcaacgagttcaagaacgtatgaggacgcaatcaaaggatctggtgatccttatggcagtgaatcgtttcagtacagtgggaattttccagcttcaaagcttgagccccaatgattgattatgtttctttttgttattttgttatttcgtaagtgacttcatacttgaaatgccttgtgaatgtggagtagcatgattctgtttgatatgtggtcgctgattataaagcagatgaatgaagagccaaacgcagaatcaaaaaccaccagatctttggcaatgtcgacaccagtttcaaacataagaaaagtaatcaagctcaatgtatgatgaataattgaatatattaattcttgttgagcaaaaaaaaaacaaaaaaaaaaaaaaaaaa

SEQ ID NO: 685 - DNA, 1533 bp, Arabidopsis thaliana
  Clone ID: ARATH-23APR03-CLUSTER26399_1
aaagtagaagaaactgacaccatctctgtctctctctctccgtatccaaaaagagaaagaaaaaaaatctcaaatcaaagaccaagccagtcaccggaaaatgctgacgtgtatagctcgttcgaagcgagcaggcgatgaatcctccggtcaaccagacgatccagattctaaaaacgccaaatctctaacatctcagctcaaagatatggctctgaaagcatcaggagcttaccggcattgtacgccgtgtacggcggcacaaggtcagggacaaggacaaggtccgatcaagaacaatccgtcgtcgtcgtcggtaaagtcggatttcgaatcggatcaacggtttaaaatgctttacggaagatcaaacagttcgattacagctacggcggcggtggcggcgacgcaacaacaacagcctagggtttggggaaaggagatggaagcgagactaaaagggatttcgagcggcgaagcgactccgaaatcggcgagtgggagaaaccgggtcgacccgattgtgtttgtggaggagaaagagcctaaagaatgggttgctcaggttgagcccggagttctcataaccttcgtttctcttcccggcggtggtaatgatctcaagcggatacgtttcagccgagacatgttcaacaagttacaagctcaacgatggtgggcagataactatgacaaagtaatggaactttacaatgttcaaaaactaagccgccaagctttcccgcttcccaccccgcctagatccgaagacgagaatgcaaaagtggagtaccatccagaagacactcctgcaacaccgcctctaaacaaagaacggttgcctcgtactatccatcgtccacctggattggctgcttactcatcctcagattcactcgaccataattcaatgcagagccagcagttctatgactctggtctactcaactcaactcctaaagtttcaagcatcagtgtagccaagacagaaacttcttccatagatgcttccataagaagcagctcgtcgagagatgcagaccggtcagaggaaatgtcggtaagcaatgcgagtgatgttgacaacgaatgggtggagcaagatgagcctggcgtttatatcaccattaaagttttaccaggtgggaaaagagagcttcgaagagtcagattcagccgagagagattcggggagatgcacgcgagattatggtgggaagagaacagggcaaggatacatgaacaatacttgtgatcataaatctaagagttttgttttttcctcattctctcggtatacagtctttttttccagctcaagtaaattcttccacaggtactcattgtgcctcccagaaatctcaaaatatcaattgtgggatatgttttaaggaggtttcttattttcttccttcaaaaaaatttgagaaagcttggaaaagataagatgttgtctcctttgctcaatatgtgtatccttaattagttctttaaaaaaatacgttcttcaaatttttagtattgtttcagctc

SEQ ID NO: 686 - DNA, 1744 bp, Arabidopsis thaliana
  Clone ID: ARATH-23APR03-CLUSTER26430_1
aataaccacttcggtttttactggtctctcttgaacttttacattgatgtacggattgagtttagtggccaaatatttctttctattgaaggtttttctattctcttttggactttgagcatttgctttgtttctgccgagatatgtctacattgatctaaccggatcatctgtcgttattgaatctttcgtttctttgacaatcgatttagtgggaggtgggggagtttgtgtctcatgcccgccctccgactgaatgtagatatatgtggacatgttgctattattgctgtatctatgaagatcctcgtgcagtcacagacaaaggcagataactcttcgttggccggaaatcaatttcttcgtcttcatcgactctttctctccctgaattttctctggcatttcgaatttatagaggtacgcatggctgccaaggctttaaaagatttgaagaatcttcctgtctctgagaggaatatcgactataaaacaaagcttttggttggcaaaatgaatggaaaagctgaagataaaccaccacaaaactctgtcccctttgatcacaatcatcctaaaggcgatgagattgagaaacctgaggcagagagagttatcgtagaaattgagtatatagaatccaaagacttgaacaatgtaacccaagttgatgcagttctcaagtcacttgtaaccgagctagactccaaggattgggttttggtctgtgatgctcttaataccattcgtcgtctttccattttccacaaggaagaaatgctgcatatgctggagaaagtgatcctgtttatcgtgaaatcattgaagaacccaagaagtgctgtaagtaaaaccgcatgtatgacatctgctgacatcttcagctcatataatgaccatacaatcgatcaattggatctcttgcttactcaactcctccttaaatcttcccaagacaagcgatttgtttgtgaagcagcagaaaaagcattagtagcaatgactgcacatgtttctcctgccttgctgttgccaaagcttcaaccttttctcaagaataggaatcctcggatccgcgcaaaagcatccacgtgcttctcccgatgtgttccccgactgggcattgaaggcattagagaatatggaattgagaaactagtccaagcagcatcgtctcagctcagtgaccaactcccagaatctcgggaggctgcacgggcagtcttactggaacttcagacagtgtacaagaaaactactaatgtcgaaccgaaggaggagcatccagagccagtcacttggcaaatcttctgccaatcaaacctctcacctcttagtgcacaggctgtgatacgtgtcaccaatgtcgcaggtgtggctcgagagggtcttgttgcgggttcatgacagtcacaagccctcagtttgatattgtaagcctctgtgagtaaacgttgtacgaccactgtttctctatctttggtttatgggtttgtttctttattttgtgtgtgaatatgtcgatgtggtaagataaatctcaacgactcaaaagaaaaaaaaagaacttcgtgtcaccaatgtcactggtgaggctcgagagggtcttgttacgggttcatgacacgagccctcattacgtcccttgttcattatataagttatctagagaccagtacttctatacatattgggttgtgattctgtttactcctaagaataaatatggaatgttttttgtacc

SEQ ID NO: 687 - DNA, 1206 bp, Arabidopsis thaliana
  Clone ID: ARATH-23APR03-CLUSTER26435_1
acatgaaccataactttctctaacatcactctcctttacacaaccccaaaaatagacctcacctctctcgtcttctctattctctccgctccttaatttccaattccaaccttctctgttttgccttgatggaaaagatagctccggagctcttcctcgtcgccggtaacccggactctttcgtcgtcgacgacctcctcgacttctctaacgacgacggcgaagttgacgacggcttaaacactcttcccgattcttcaacactctccaccggcactctcaccgacagttccaactcctcctcgcttttcaccgacggcactggcttctccgacctatatattccgaatgacgatatagcagaattagaatggttatcaaattttgtggaagaatcattcgcaggagaagaccaagacaagcttcacttattttccggtttaaaaaaccctcaaaccaccgggtcgaccctgacccacttaattaaacccgaacccgaacttgatcatcaattcatcgacatcgatgaatccaacgtcgccgttcctgccaaggccagaagcaagagatcacgttctgcagcctccacgtgggcttcccgtcttttatccttagccgattccgacgaaaccaatcccaagaagaaacaacgaagagtgaaagaacaagacttcgccggagatatggacgtggattgcggagaaagcggaggaggacgacgttgtttgcactgcgcgacggagaagacgccgcaatggaggacgggacctatgggtccgaagacgctttgtaacgcttgcggagtgaggtacaaatcagggaggctcgtgccggagtatagaccggcgtcgagtccgacgttcgtgatggcgaggcactcgaactctcaccggaaagtgatggagctccggcgacagaaggagatgagagacgagcatttgctgagtcagcttaggtgtgagaatctactgatggatatcagatccaacggtgaagatttcttaatgcataataatactaaccacgtggctcctgattttagacacttaatctagttttctatttccacgtggataatttcgcaataatttgttcgtttcgtttagctttatttttttttttttcctttttaacatttgtttttcattttctgcagactacttctagtactattgatatatttgatagcttttgtttttgctcaaa

SEQ ID NO: 688 - DNA, 1141 bp, Arabidopsis thaliana
  Clone ID: ARATH-23APR03-CLUSTER26438_1
agacagatgttgagttgttcttcatcggcgttccaaagagtagcctttatgcttatggctcccaaattaaaacctcagagactccatcaaattgcagagagtggtgttgaacatttggttaagaaagctaggacgatgagtactgaatcctcaatgaaagatgctttctctacttacgctgattatctcaataacttcaatgagaagcgagaaagagtggtgaaggtaagtcgtgatatcacaatgaacagcaaaaaagttatctttcaggttcacaggctcagtaaagacaacaaagaggaggtattggagaaagcagggaaggatttagaagcagtgagggatcaacattttgcccggctaatgaaagagcttcaagggactgatttttggaagctgagacgtgcttattccccaggggtgcaggaatatgttgaagctgcaacgttttataagttctgtttgtctgggacgctatgtactctcgatgagattaacacaacgcttgtaccacttagtgacccttctttagagccgttgcagatcaatatcctcgactatattcttgggcttgcagatttgacgggagagctaatgcggatggcaattggtcgcatatcagacggtgaaatcgaattcgcgcagaggatttgtcagtttgttcgacagattcatagggaactaatgctagttgtgccaaagatggatgacagttatgacatgaaatccaagatggaagtgatgcttcaaagtgtgatcaaaatagagaacgcttgctttagcgttcacgtgagaggattagagtatattccactgcttggagataatgcaccaacatcatacctattgggagctgctgatgtcgaatgattaaaagtgagtggtcttttccgtctctcggacacattttaaagttcttgttaaggttggtgtgtttgcgacaagtaggatcgttttagtatggacttatcttcagagaattttagccacttcttacttctgaggaactttaaatctgtatgctgcaagacttttaagaaacaaatggttagaactagatgtaaaacttttcttttgaatatttataatagaatctagcaattactttaaaaaaaaaaaaaaaagaaaaaaaaaaaaaaaa

SEQ ID NO: 689 - DNA, 1010 bp, Arabidopsis thaliana
  Clone ID: ARATH-23APR03-CLUSTER26466_1
agaaaagagaaaaaagaaatcgtctttccttttacttctcttcttccgattgggtctttgatcatttccccaatcgattgataagttttgttgggttgctttcgattcttcgtttgatgatctaagaaagtctctgtctttccacgatgggtagttgtttggcttgttttgataagtcgaaagcaaaaacaagtgtagatgtgcctttgaatggcacaaaagatgtgcctttgaatggcacaaaagatgtgttagtagaagaagattggagtgaattgagaaaccctagtatagtagcttctgaagatttctggactaataccaccttagatatggaaagcaatgctcacggaagtgtttcttcaatcagtacaaccaatctgactattgattctcaaggatgtggttccagctctaatgaaccttgataagtcgaaagcataaggacgtgtgaagacgacagaagggggcacaaaagatgtgttagtagaagaagattggagtgaattgaggaagcctagtgtagtagcttctgaagatttctggactaataccactttagatatggaaagcaatgctcacggaagtgtttcttcaatcagtacaaccaatctgactattgattctcaaggatgtggttccagctctaatgaacctgctgaatttgttaaccatggtcttgtgctatggaatcaaactcggcagcaatgggtgggagataaaagatccgagagccgtaaaagcgttggtcgagaaccgattctaaatgagaatgtgacttatgagagtctacttgggagcaacaagcgatttccgaggcctatacctcttgatgaaatggtgcagtttcttgttgaagtttgggaagaagaaggtctatacggctaaaagattcttttttacacatttacaattgtaaagagagctgagaaaaatatatacacccaacaaaaaatatttgttgatggatcaaattttataaaattctcttgatttggagtaatttcccc

SEQ ID NO: 690 - DNA, 1277 bp, Arabidopsis thaliana
  Clone ID: ARATH-23APR03-CLUSTER26565_1
actattggttcctctgctctggctcatggatgaaactaccagagagatgttctcacctcataatcttcctcttgaaatgatggaagagattctcttaagactacccgtaaagtcattgacgcgattcaaatgcgtttgcagctcctggagatctttgatctcagagactctgtttgctctgaaacacgctttgatcttggagacatcgaaggcaactacttccacgaagagtccttacggagtcataacaacgtctcggtaccatctcaagtcatgctgcatccattctctctacaacgcgtcaacggtctacgtctcagaacatgatggtgagcttttaggaagagattactatcaagtcgtggggacgtgccatggattggtttgtttccacgtagattacgacaaaagtctctacctgtggaatccaaccatcaagcttcaacaaagattgtctagttcggatcttgaaacgagcgatgatgagtgtgttgtaacgtatgggtttggttatgatgaatctgaagatgactataaagtggttgcgttgttgcaacaaagacaccaagtgaagatagagacaaagatctactcaacgagacaaaagctatggagaagcaacacaagtttcccatctggagttgttgttgctgacaaatcaagatccggaatctacatcaacgggacactaaactgggcagccacttcctcatcatcgtcatggacgatcatatcgtatgatatgtcacgcgatgagttcaaggagcttccagggccagtttgttgtggcagaggatgttttacaatgacgcttggagatttaagaggatgtctttcgatggtgtgttattgcaaaggagctaatgcagatgtttgggtgatgaaggagtttggagaagtatattcttggtctaaactcttgagcattcctggtttgaccgactttgttcgaccgctttggatctcagacggtttagtggttttattggagtttagatccggtttagctctctataactgttccaatggaaggtttcattacccagtttcaaacagcataagtggttgtcgtgacgccaaagtttatctcaagacaatggtttctccaaatgatctttgagatataaaaaattgttcctaatgtttctatccaagattttatttaaaaaattagctcgattcgatttaactaagattggtatcaattggtagaaaagaaacagtacttatatggatctttaaattcaagaattaataatcaaaaaaaaaaaaaaaaa

SEQ ID NO: 691 - DNA, 964 bp, Arabidopsis thaliana
  unsure (1)..(964): unsure at all n locations
  Clone ID: ARATH-23APR03-CLUSTER26576_1
naccncccgtggnanaanngcnatntnnnnnannngntnnnnnnnangnnnnnnnnnnggncnantnnntnnnnnnnnnnngnangnnnnnntncnnnnnnnnnnnnnnnnncaannnnatcccnnnaagganaaagnngncncncgggnncgttaaatggnctgtcacatccaaaaccaaaagcaacacaaacacacacaccaaaaaaaaaaaaaaaagcatttacttttaactcaagcatggcaatgttaaagaacaaacacatgaccgtctcattgatcttggtgtgtctcgttgtggtgtctccaatggctgaggctcagcttggtcttggtggtagtggtggtcttggtggtcttattgggggtcttgttgggggtctcggtggtctggttggtggtcttgtagggggtattctcaatctcgtcaatatcaatggggttgtcttttgctctctcaatggtgctcccagtggcacttccactcctgctttcgctaatgcaggagttgagctccagtgcggaaggcaaaacagggtcgtttcaacagcgaccacgaatgctgccggattattctcgcttcctacggactcaattcagatgttactttccacacttctctctgattgtcgggtcgtcgtcacgacccctctctccacctgcaacgccaacctcccttccgttggcaacctcgtctcacggttagccatgatcggcaatagtctcaccggcctcctcaacatcatcagtatcatccctgccggctttggtcttcttaactgattccacactctatacatactctatgttcggttacagtgtgtttcccttttgttatatgttttgtaatcatgaccatttacgtttgcttgcgtatgcatgaataaggtctatatagggcttatgtcccaatcgtaaaatgaaaaaacaagtgagtatacggtggggggggcgcactgcccnn

SEQ ID NO: 692 - DNA, 2162 bp, Arabidopsis thaliana
  Clone ID: ARATH-23APR03-CLUSTER26593_1
aaaaatgtggaatcttgtttcgtctcctttcttcttcgttgacacaattagggttcacttcaattctcttctttggatcgtattacttggggaaatttaaagatctggctctgggctcttctgggttagctaggatccaaattctcaggtgaaagacctgaacttttgctccatcttaatcgctttttttttcttctctggctggtctggtaatatatacagagaattgatagtgtaagaattgtaattctgctttagtgttttgatcgagtttctgagcttagtatcgtgggtttttgggttcaggggaggataaagtagcttaagaactgaggatctacttacttaagctaggcactttcagctgaattttgattcgtttctggactcattagttgggtaatgattagttttagtttctctttggtgaatattttgtttgattaggtaattactagacagtagtttctcattgggttttggttgatttaggataattcttgggtcatatttggtgttgggtctgttggttggttttttagattggtagtgaggtttttactataggtattggatttttgtggagatggataggcctagacaaaatgatcatttgggtgtgaataggattgggaaaaatatcagaaagagtcctcttcatcaatcgactttcgctgccagtactagcaacggtgccgctccaaggcttcaaacacagcctcaggtttataacataagcaagaacgactttagaagtattgttcatcagctaacgggttctccatcacgtgaaagccttcctcggcctcctcagaacaactcgctaaggcctcagaatacacggttgcagcggatcagaccatcccccttaacgcagttaaaccggcctgcggttcctctcccttccatggctccgccacagtctcatcctcagtttgctagacagcctccacaccagccacctttcccacaaaccacacaacaaccaatgatgggtcacagggaccagttttggtctaatacagctgagtctcccgtctcagagtatatgcgttatcttcaaagttcacttggagattcaggacccaatgctaaccaaatgcagccaggtcatgagcagcggccttatatcccaggtcatgagcaacggccatatgtgccaggtaatgagcagcagccatatatgccaggtaatgagcagcggccatatatcccaggtcatgagcagcggtcatatatgccagctcaatctcagtctcagtctcaacctcaacctcaacctcaacctcagcaacatatgatgcctggaccgcaacctcgaatgaacatgcagggccctcttcaacctaaccagtatctaccaccacccgggttagttcctagcccagtgcctcataatcttccttctcctcggttcaatgctcctgtacctgtgacgcctactcagccctctcccatgttcagtcagatgtatggtggatttccttctcctcgatataacggttttggaccactgcagtcacctacatcccaatttcttcaaccatctcctaccggttacccgaatatgttctctccgagatcgccttacccattgctgtcaccaggagttcagtatcctcaaccacttaccccaaacttctcattttcacaaattgctcaacaaggaagtcttggacccggtgcaggtccaagtcaaggtcctcctcagcctcctccttctccagggctcatgttcccgttatctccatccgggttcttccccatgccaagtccaagatggaatgattactaggtgctctttttctctccatcagattcattaaattaagtaaatcggattatgtttattcaggtttccttaggttagtctgtacctttgaaagaagcttaaaacttcagagcctacagtggaatagacgcagcagaatagatgcgtaaaacactaaaggagcttttagaagaaagaaagatttataggggttttttctctgtgggattttaataggtcaaaagttgggaatcttgggatgatgatgattacctttgtttttgtttatcacaaacttagttttatctttgcttacattgtacacatactacagacgaactcagttcaatttatatgattttttgggtgtttttaaaaaaaaaaaaaaaaa

SEQ ID NO: 693 - DNA, 1187 bp, Arabidopsis thaliana
  Clone ID: ARATH-23APR03-CLUSTER2660_1
actgagtgctgctgatgaacgcttactctgtttctctcgacttcactaaaccttctctattcacacgcatcactctctcttctcagattcctctaaccatggccaccactgtaaacaaaacagttcgtgtcgcagctgctcaaatgacatcggtcaatgatctaatgaccaacttcgccacttgctctcgtctcgttcaagaagcagcattggctggtgcaaagctgatttgcttccctgagaacttctcttttgtgggagataaggaaggagagagtgtgaaaattgctgaaccattagatggcccagtgatggaacggtattgctctctcgccagggattcaaatatatggttgtctcttggaggttttcaagagagatttgatgatactcatttgtgtaatacacatgttgtgatcgatgatgctggaatgatccgagacacttatcagaaaatgcatttgtttgatgttgatgttcctggtggaagctcgtacaaagaaagcagctttacagttccagggacaaagattgtttccgtagacagccctgtcgggcgcttaggccttactgtatgctacgatttgaggttccctaagatatatcagcaactgagatttgaacagaaagctcaggttttactagtaccatcagctttcaccaaggtcactggggaggcacactgggagattcttcttcgagcccgagcaattgaaactcaatgttatgtcatagctgctgctcaagcaggaaagcataatgagaaaagagaaagttatggtgacacactgatcattgatccgtggggaactgtagttggaaggttacctgatcgtgtttcgaccggcattgtcgtggcagatattgatttttcattgattgactcagtgagaacaaaaatgccaatagataagcaacgagtctcaatagatctctgatgaaaccattggtgttgtgaaatgttgccaatatagttacaagcgtagaaacatatcaccttatttgaattctacattctctgtttgcttcggtgtattgtttcatcattggttaggtgtagatgatcattgagctttagacagtagcttgtcacctatacttttagttgcacgttgttctttggtagtatttgtacacaacatttaatagattataaataagtaacgttaaagaaacatcttgacaac

SEQ ID NO: 694 - DNA, 1603 bp, Arabidopsis thaliana
  Clone ID: ARATH-23APR03-CLUSTER26631_1
ggccacgttttttttttttttgaaagtcgaaatcaaatcacattaccccaaatctctcttctttgaactttaatcctcttctctattgcatgctttaagctccaaacccaaaacgcaggaaaatctctttgacagtttttggttttagatgggaccaatcaaaacgataaagaagaagaagagagcagagaagaaggttgatcggaacgtattgcttgctgctactgctgctgctacttccgcatccgccgccgctgctcttaataacaacgacgacgacgacgactcatcatctcagtctttggattggtgggatggattctctcgccgtatttatggagggtcaacggatccaaagacatttgagtcagttttcaaaatatcaaggaagacatttgactacatttgctctcttgtgaaagccgatttcacagcaaagcctgcaaatttcagcgactcaaatgggaaccctttatctctcaatgaccgtgtagctgtggcgcttaggaggcttggctctggtgaatctctctctgtcattggagagacctttgggatgaaccagtcaacagtctcccaaatcacttggcgctttgttgaatcaatggaagagagagcaatacaccatctctcatggccttcgaaactcgatgaaataaaatcaaagtttgagaaaatctcaggtcttcctaactgctgtggcgctatcgacattacacatattgttatgaaccttcctgctgtggaaccgtcaaacaaagtttggttggacggagaaaagaacttcagcatgactttgcaggccgtagtagacccggacatgagattcctcgatgtaatagctggttggcctgggagtttaaatgatgatgttgtcctcaagaactcaggattctacaaactagttgagaaagggaagagactgaacggggaaaagttaccgctctcagaaagaaccgagctaagagaatacatagtaggtgattcaggttttcctcttcttccatggcttctcactccataccaaggcaaacccacgtcgcttcctcaaaccgagttcaacaaaagacactccgaggcaacaaaagccgcgcagatggcactatcgaagcttaaagacaggtggaggataataaacggggtaatgtggatgcctgatagaaaccggttaccaaggataatctttgtctgttgcttgctgcacaacattattatcgatatggaggatcaaactttggatgaccaacctttgtctcagcaacatgacatgaactacagacaacgaagctgcaagcttgccgatgaggcttcatcggtcttgagagatgaactctctgaccaactgtgtggaaaaaattcatcagcttgattactctctcccggttcttgtggtctttctatgaaagcttcatttgcttctttttccttctggtaattttgtttagcataacattttatcgtttgatttgatctattgacatattcttttatgggacaaacaaaaatgtgtatcttatgaatgttatttttaatttatacaactttatgtttcaatgacgtctaaactcattgcaattgtcattatagaatgccgcatagactg

SEQ ID NO: 695 - DNA, 2295 bp, Arabidopsis thaliana
  Clone ID: ARATH-23APR03-CLUSTER26668_1
aactcgatcgactttcagacattgaccaaattgaatcagatcataacgctacatccttttatatatatataacatcacgctacattattgtaataatatcacaaaatttctacggaaaaaaactcggtctaatgttttaacacaccatctaatttatttggttttattccatatgcaaattcaagagaccttcttcacatattatacacagagagataaaacaataaatcagaacagttttacattatttcaatcaagtcatcttattcactaatggcgaacaacgacgagattaccacgtcgtctcatgcatctccggcagtgaatcacgagtctatctcacgcgctaagcaacgtatcaaagacggactagccacgcgccgctcctggagggtgatgttcgatttacactccacgggactacctcacggcgtctccgatgttttctcaagaatcaagacaaatcttgcttacttccgtagtaattacgcaatcgtaatcttgaacgtcatattcttcagcttgatttggcatccgacctcgctcatcgtctttaccggtttggttttcctatggatcttcctttattttctccgtgatgtgcctctcaaggtgttcaggtttcaaatcgacgatcgtgcggtcttgattggtctatcggtgattaccatcgttctacttctattgaccaacgcgacgtttaatattgttgcggcgttgatggccggagctgtgttggttctgatccatgcggtgattaggaagacggatgatctttttttggatgaagaagcggcgacgactgagacttcaggactgacgtcacacccttcgtcttaaaacgattgatctccatttttatgtatattctattgtttttgatcatcttatgtgtaattatagtttatggtgtaaccgtgtaagtttggtttgattctctctctgtttttaagttttgaagtatgaacaaacttaataatgtcaaagtcttcgcttcttgtttttggcgggctgcttacttttatcactttttggcgccttattgggccattcattaaggcccaatagtatcagcccataaaattcaaaaaggaacatatttttacatttaaacagtgtgtctcacacttccatttacacgtcagctctcttcgccggcgcttaatacaaccgtcaacctcgccgccggctagaggaaaatggcgtatcaccaaccgtacgatcctttctacgtctatcaacttcattctcatcctcatcatcttccgccgcagctgccactgctcgccgacgaacctggggcgattaacactctctttgtctctggcttgcctaatgacgttaaggctcgtgagatccacaatctcttccgtcgtcgtcatggattcgaatcttgtcagctcaagtacactggacgcggtgaccaggttgtggcatttgcaacattcacgagtcatagattcgccttggctgcaatgaatgagctaaatggtgtgaaatttgatcctcaaacaggatcaaatctacatatagaactagctagatcaaactctagaagaaaagaaaggccaggaagtggaccttatgttgtgattgataacagaaacaaggaaatttctaagtctcaggatgaccagagtgatgaaggggatagcgatccagatgaggtgcaggaacctggaaatagcgattctccaaaggaaaacgatactaccaaaagcgaagcggattctgagccagatagtaaagcaccatctgctaatgggcacttagagaaagcatctgaaggaggttctggtgctcgagcttgttcgaccttgtttatagctaatctagggcctaattgtacagaagatgaactcaaacaactcctatctagatatcctggtttccacattttaaaaatccgagctagaggcggaatgccggttgcatttgctgattttgaggaaatcgagcaagctactgatgccatgaatcatcttcaagggaacctcttatcctcttcagaccgaggcggcatgcatatagaatatgcaagatcaaagatgaggaaacagtaaaagattatcataaccacaaagcctcacttctcaaatgaagaatgtggtggataatgtaccatatgccaatggtagtctcttatgaaaacaagatatatagagatcataagcaaatgaaagctgtatttcttattttaaatcttcacttactatttgttgtcatgaagatgaatccttctatgctgacactgacttaagagatacatatgaatatatttattcaagatttacc

SEQ ID NO: 696 - DNA, 1793 bp, Arabidopsis thaliana
  Clone ID: ARATH-23APR03-CLUSTER26795_1
agtattttcatgaaaaaccaatctagggttttgaactctgaattgggggattttgacctttcagttttgtgggatcaaattttgaatttcgagggttatggttcctactgtttcagaccaatggatatggatggttaccacaaacggagcgccggtttaaacccttgtaaacactccggtttctcacattcatcaagacccatggctccaggaatttaccgttacccagaagtgaaatcttcgttgcggagacaagttcatgcgcctgtgcggatactcaatagcggtcgagatcgtagcacacgacaaggttctggtaatgtgttgggaacctttctcacaaggaacaatgacatgtggaaaagaaatgcacttgattcgtctttacgctatagaacggatagagaagtaattgatgttgatgatgagcttggagatgttgaaatgatatctgatgatacaagtagggagggtgtcgaaaacgtggctatggaggtggacgaggtggaagagaaggcggagatgggaaatggattgttttctgaggttgccagtctgaaaaatgggagcttgagggtgggtgaatgttctaaagctaatagtagttcactcgttgtgaatcgccctgtgactgatgtcacaagttttgaagcatacagaaaggttcttgagagtgctgtgaaccggacttctaaactgaaagacagaggctttgttgatttttttaaagagagaggtcgtgctttactacgaagcttgtcttccttttggagacaagatgaagaaccagtagaggttgtacaacgtgaggcatttgtacctctttctagagaggaggagacagcagtcaggcgtgcattctcagctaatgattcaaacatcttggttactcataagaactcaaatattgatattaccgggaaaatcttgaggtgccttaaaccaggcaaatggttgaacgatgaggtcattaatctttatatggtattgctgaaagaaagggaagctagagaaccaaagaagtttcttaaatgtcattttttcaatacatttttcttcactaagttagttaattcggcgactggatacaactatggtgcagtgagaagatggacttcaatgaagaggttgggctaccatctcaaagactgtgacaagatatttatccctatccatatgaacatccactggactttggctgtaattaatataaaggaccagaaattccagtatcttgactctttcaaaggaagggagcctaaaatcctcgatgcactggctagatactttgtcgatgaagtgagggataagagtgaagtagaccttgatgtaagtcgatggagacaagaatttgtccaggaccttccaatgcagagaaatggattcgattgtggaatgtttatggtgaaatacatcgacttctatagcagaggtctggatctttgtttcactcaggaacaaatgccatatttccgggctaggacagcaaaggagattctgcaactgaaagccgagtgatgccagcataataaggaaactcttaaagaatagttttgaagttcttcttcttcttcatgtagatagtatttagcaagttagatgcacactttacgtgtttgataatttgatgtacatagaaaagggtaacaatgtggttctctgatgatcaggcttgatagtgaaattcgaattgttgtttaaagattctagtttcatatcagatactctgattttgaattctggtattatttttgtactttataaatttaaaattaaagaaatttgtgttagag

SEQ ID NO: 697 - DNA, 1310 bp, Arabidopsis thaliana
  Clone ID: ARATH-23APR03-CLUSTER2681_1
gatttaatttcgagagcgtaaatagaagacaaaataaaaagcataaattcggaagtaaataatcgaaaaagttttgcaaactggaaacctcctcccgcagtcacacaactgcgcagagccaaaaataaacgaaacctccggcgaaagctacggcgaagagactgcgtctaactccgtttacacgccgattgtcttggagagagagagagagcacgaggtaaatcacgcaagggttagatgggaaaccagaaactaaagtggacggcggaggaagaggaggcgttactcgccggaatcagaaagcacggtcctggaaagtggaagaatattctccgggatccagaattcgctgatcagctcatccatcgctccaacattgacctaaaggataagtggcgtaacttgagtgttccccctggtactcaaagtttaactaataaggcacggccagcaaaagtcaaagaggaaggcgacactccggctgcagatgcaaatgatgctgtcactattccacggcctattcctactattccacctcctcccggtcggcgtactttaccttctgagttgatccctgatgaaaatacaaagaatgctcctaggtatgacggggtgatatttgaagctctctctgctttagccgatggtaatggatctgatgtcagttccatttatcatttcattgagcccaggcatgaagtaccgccaaattttagaagaatccttagtacaagactgaggaggcttgcagctcagagcaaacttgaaaaggttagcaccttcaaatctatacagaacttctataagatacccgatccatcaggaacaaaaataggtgtcccaaaaccaaaggagacacatacgaagctgcgccaagcaaacaatcagacctctgctgattcacaacagatgatcgaggaagctgcaataaccgcagcctgtaaagtcgtagaggcggagaataaaatagacgttgccaaactagcagcagaagagtttgagaagatgacaaagattgcagaagaaaatagaaaactcctggtcatagctactgagatgcatgaactatgttcctgtggggagactatgctcttggcttgaattgaatctatgggacattccttgtagctctcttcagttatctccgtaatggtgttgataataatatataaaaagaaaactaaattaatttactaggcgtggcttttttggttttaaattcctgaacctacatacatatttttacattagcgaagttactttcgtataattttatataaatttctttacatcgaattttaatgttaaag

SEQ ID NO: 698 - DNA, 1286 bp, Arabidopsis thaliana
  Clone ID: ARATH-23APR03-CLUSTER26858_1
atccgccgagcgatattgttgatagctcaaaaaaatggaggacactgggagcattaagcaagaagcacagtctcatcctccagggatcttcgagataccgggggagcctgcggttgttatcaatggtgtgcctgatgaacctcaaactgattgtatgattgccaaagatgaaccaatatcaagtggcactgtaggaagcggggaatggcttgagggtagagaagttcgcaagtttttcttgggtcgctactattctggtacggtgacaaagttcgataaacaatctggatggtacagagttgaatatgaagatggggattctgaagatcttgactggtctgagcttgaagaagtgcttctacctttggatgttactgtcccattgaggtctatctcattgcatatcatcaagaatcgacaaatacatgcccagctttatggatacacgccacaacgctagaccaagaactccaacacaaatgcgcagagtgaatatggtgaagcaggacaaagaggttacactcttatgccttaaaattggaaacatttgaatagtcttttgaaaatgaatatattagaagactagtatgtactagtggaatcatggaatggtagatacattagagaaactaatcccacgtacgcttctacttccatgacattgtatccggagtcaaaccaacctcagtcgtagtcgctacgagtcccacaacaaactcctctgcaaccgctttcggtatggttgcagtcgttgacgacatattgacggtgggacctgaaataacctcagaggaagttgggagagcccaaggaattttcgcatcggccgaccagaacaactttggtctgcttatggctttcaactttgttttcacaaagggtgaattttccggcagcaccgtgtccatgtatggccggaatccgatattttcgaaggtgagagagatgccgatcatcggaggtactggagcattcaggttcggaagaggatatgcacaagccaagacttttacgttcaatactaccagtggaaatgctgtggtcaagtataatgtttatatttggcattaattgttgacttctttggtgcttttctatttttccgtcgaaagatgataaatttggatggatacaaaaagaaataaaaggttggtatgaataaatgcctctttttctattgtagttgaattgatttttgattttgatgtatttgattgtaagaaattgtggtaaatagttgtatttttatgtggtgaattgttgtgaagacagaatttattgtgttt

SEQ ID NO: 699 - DNA, 1730 bp, Arabidopsis thaliana
  Clone ID: ARATH-23APR03-CLUSTER268597_1
agtatataaagtatagggttgattcggagaaagaggttaaagtattagattgaaacaacaaatctcaggggaagaagaagagagaatggattcggcggagaagggcttgcttgttgtgagcgacagagaagaagtaaacaagaaagatggctttttgtgggaaacgaagaaacttagttacatcgccggtccgatgattgcagtgaactcgtctatgtatgttcttcaggtgatatctataatgatggctggtcatctcggtgagcttttcctctctagcaccgccattgctgtttctttctgcagcgtcaccggtttcagcgtcgtttttggattggctagtgcgttggagactttatgtggtcaagctaatggagctaagcaatacgagaagcttggtgttcaaacttacacaggaattgtctctttgtttcttgtgtgtattcctctctctgttctctggagctacattggtgatatactttctcttattggacaagatgctatggttgctcaagaagctgggaagtttgcaacttggctcatacccgcgctctttggttacgctactttgcagccgcttgttcggtttttccaagcacagtctctgattttgcctttggttatgagttcagtctcttctctctgtgtccacattgtcctctgttggagcttggtctttaagttcggtcttggaagcctcggtgcagctattgcgatcggcgtttcttactggctaaacgtgactgttcttggattgtacatgacgttttcttctagctgtaggaagagtcgtgcacctatctccatgagtttgtttgaaggaatgggagagtttttccggtttggaatcccatctgcgtctatgatttgcctcgagtggtggtcattcgaatttctagtcctgctctctgggatatttgccaaagaagacgacagaagggtctgttctctcagtctgtctttcaacacaatcctccttgtaccaaatcccagagagtctcggtgcagcagcaagtacaagagttgcaaacgagttaggagctggaaacccgaaacaagctcgaatggcggtttacacagcgatggttataacaggtgtagaatcaataatggtgggtgcaatagtctttggtgcaagaaatgtatttggttacctattcagttctgaaactgaagttgtagactatgtaaaatcaatggctccactgctttctttatcggtcatattcgatgcccttcacgcagctctctcgggtgtggctagaggatcagggaggcaagatattggggcatacgtaaacctagcagcatactatctctttggaataccaactgctatactattagcttttgggtttaaaatgagaggaagaggactctggattggaatcacagttgggtcatgtgtacaagctgttttgctcggtcttatcgtaatcctcactaattggaaaaaacaggcgagaaaggctagagaaagagtgatgggtgatgagtatgaagagaaagaaagtgaagaagaacatgaatacatcagctaaatcaaacagtttccattccatccccattaatccgttaaatgttgtgtgtttttattaattcgatgtttggtattgttgttttcgagtatagtaatgaaggaattgattgttcccataagaaacaaaaaaaaaaaaaaaaaaaaaaagcgcccgcgtctataggatccaagctctacgtgggcgtgc

SEQ ID NO: 700 - DNA, 1246 bp, Arabidopsis thaliana
  Clone ID: ARATH-23APR03-CLUSTER26882_1
atggatgaagaagtttcagcttcggcgactccagagtcccggagaaagaggattggaaagaagacgacgtcgtttattcaaagatctatatccttaaactacatgccatctcttcttgtccacatgtccgatacgacatcgtttggccagtacgacttcgttcggccgcaaacctccgtatatcgcaggctctctcactctttccgtcttctgatttctccctccaaaacaaacctcggaagagaaaattggagcgaaggagcgatagatatggcgtcggcgtcctcgtctgacggagttgccggaaggattcagaacgcttctttggttcttgtctccgataacagttccacgcttgctgatatccgcaaagctgtggcaatgatgaagaacattgcagttcaattggagaaagaaaatcaaacggacaaggttaaggaccttgaaaattctgtggctgagttattggatttgcatagtgattgtaatcaccgttcgacagcaattcaatccgttgcaaatcggtaccaacccgtggaacaattaacggactttaaaaagttgcttgatgatgaattcacaaagctcaaggctacaccttcctcagtgccacaaaatgatcatttgatgcgccagttcagggaagcagtttggaatgttcatcatgcaggtgaaccaatgcctggtgacgatgatgaggacattgttatgaccagtactcagtgccctcttctaaacatgacatgtcccttgagcgggaagcctgtcactgaattagcagatccagttcgcagtatggattgcaggcacgtctatgaaaaatctgtaatcctgcattacatagtcaacaatccaaatgcgaattgtcctgtagcagggtgccgaggtaaactgcagaatagcaaagtgatttgtgatgcaatgttgaagtttgaaatagaggagatgcgctcgttgaacaaacaatctaatagggctgaagtgattgaagacttcacagaagatgtggatgaagattagagatcagacatttcttggaccgggttttaagcgctgcaatgaaacaagttgaagccatatgtttcacaactttttgctattcttagtccgttcggtatattttatcaaacgtgaaatttgataccaattgtttccactttatggaggatgtaaatagtcgatctcttccgattctgaattcaactgctgttttttttgcccaagtttacgttcatttcctgaggtt

SEQ ID NO: 701 - DNA, 1407 bp, Arabidopsis thaliana
  Clone ID: ARATH-23APR03-CLUSTER26906_1
gcactttttcttctttgtctatctctctctctctctatctctaacctttttttccgttctctcaaaccttttttctctgcttccgtttcgtttctaaaacccgaaacagatcgaaccatttttttcctttagaaattaaacaacaaaaatcatttttttgtttgttttcggtttcacctaaccaaattgattctcttacctttttatatcacattgcatctgggtttccattagaaacaacaacaaacgaaaaaagaggcttctttcgtttcagagaggggttcaaaaatggcgacgaacattgggatgatggatagtgcttactttgttggaaggaatgagattctgagttggatcaatgaccgccttcatctcaatctctctcgtatcgaagaggctgcatcaggtgctgtgcaatgtcaaatgttggacatgacttttccaggagttgtgccaatgcacaaggttaactttgaagcaaagaacgagtacgaaatgatacaaaactacaaggtcatgcaagaagtcttcaccaaattgaaaattacaaagccattggaagtcaacaggcttgtcaaaggccgaccactagacaatttggagtttcttcaatggttgaaacgtttttgcgattcaataaatggcggcattatgaacgagaattataatccagtagaacgaagatcaagaggtgggagagagaaaagcgtaaagggatctagtaagatctcaaagtcattgcaaacaaacaatatgcatcatcctcctgtggctacttccaacaaaccagctggtcccaagcaagcaaaatcacatggaattggaggtggagcaactcatcagccgaagtgcaagctctgtcaaaggaggtagaagatctcaaggtctcggttgatctcttggaaaaagaaagagatttttacttctctaagctccgggatatagagatactatgtcagactcctgaactcgatgatcttccgatagtggtagcggttaagaagatattatacgcaaccgatgcaaatgaatctgtgctagaagaagctcaagagtgcctaaaccagtctctagggcttgagggttatgaagaagaaggaaaagaggaggaagaagaagaagaagaagaagaagaagaagcagcagctgctgcagagacccaaacttaaagttgtgacaaataaaagtagagggcaacaatgatccattgccttgtcttagaagatagaatcacttggagaggatgtttgcacaatattcaatttaccctaaccggttttttggttttacagtgaactgaaccgaatttattccttcctaaacttgaaagattatctgatggattttcattgtatcacaaaaatgattttattaaatgttccccaataagtaaaattaaaaattaca

SEQ ID NO: 702 - DNA, 1258 bp, Arabidopsis thaliana
  Clone ID: ARATH-23APR03-CLUSTER26939_1
gactacgaaatagaatcaagttgtgttctctgtgatggacattgtgttagtggtaatcaaatccggtgaaaatggagcggagcgagtgaccagagaagcaccgaccggaaccaggatcctgcttgcttcactctctgcgatggttgcagagtcagttacgtttccgattgatctcacaaagactagaatgcagctccatggttcgggatccgcttctggtgcgcatcggattggcgctttcggagtcgtatcggagattgcgagaaaggaaggagtgattggtctctacaaaggtctatctccggcgattatcagacacctgttctacacgcctatcagaatcattggatacgagaatttgaaaggactcatcgtcagatctgaaactaacaatagcgagtctcttcctctcgccacaaaggctctcgtcggaggattttctggtgttatagctcagaaatgcaggtagtggctagtccagctgatttggtcaaagtgagaatgcaagcagatggtagattggtgagccaaggcctgaaaccgaggtactcgggaccaatcgaggcttttaccaaaatcctacaatcagaaggagtaaaagggttatggaaaggtgttcttccaaacatccagagagcatttctagtgaatatgggagaactagcttgctatgatcacgccaaacactttgtcatcgataagaagattgctgaggataacatttttgcgcacactcttgcttctataatgtcgggtcttgcttcgacaagtttgagttgtccagctgatgtggtgaagacgaggatgatgaaccagggtgaaaatgctgtgtacagaaattcttacgactgtttggtgaagacggttaagtttgaaggaataagagctttgtggaaaggtttcttcccgacatgggcaaggcttggaccgtggcagttcgtgttttgggtctcctatgagaagtttagactgctggcaggaatctcttccttctagacctgagaaactggaaaagcaaatttgagatttgtgttctttagttcttacttgttagttgttacacattttgtaagaaccttgagaagtagcatcagtttctgattaacgcgagaagagttatataaatttgggcccaaaagtgtaggcccatagatttatcattttttttttgttgattaaattagattggacatcctaagcaaaaaaatattttaaaaagtaagagattaataaaatattccaaaaaaaaaaaaaaaaa

SEQ ID NO: 703 - DNA, 1274 bp, Arabidopsis thaliana
  Clone ID: ARATH-23APR03-CLUSTER26945_1
actccgccgttgccacaaaatccgctgtagctaagctcggtgagtaaaatggcagacgggcgacgacggtgaatgtcaaactttctcgatcaaatcgtatctatcgctcttccgaaccagtggaaggaaaaattgtgataaaatctgcagcttcgatttcgcatcaagcaatacgtttatccgtcaatggatcagtcaacttgcaggttcgtggaggatcagctggagttattgagtccttctatggtgtcatcaagcctattcaaatcgtcaagaagacgatcgaagttaagtcttctggcaaaatccctccgggaactacagagataccattctctttgaatctgagggagcctggggaaggcattgtagagaagttctatgagacatttcatggaacaaatatcaacatccaatatctactaactgcagatataccgcgaggatacttgcacaaacctttgtctgcaacaatggagtttattattgagagcggtagagttgaccttcccgagcggcctattccaccgggaattgtcatcttctacatcactcaacacacacagagacatccgttgctgcctgatattaagacaggtggtttccgagttactggaaaattagccacccaatgctctttgcaggatccactcagtggtgagttaacagtggaagcatcttcagttcctattacttctattgacattcacctactccgagtcgagtcgataattgtaggggaaaggattgtcactgagacctctttgattcagtctacacagattgcggatggagatgtgtgccgtaacatgactctacccatttacgttttactacctcggcttttaatgtgtccttccgttttcgcaggtcccttctcagtggaattcaaggtatgcatcaccataagtttcaaatcgaagctagccaaagcacaacccaagtctgatccaacagctccaagactatggatggcgctggagagattaccgctggaacttgtccggacaaagcgagatcagttcagctgctaaagaacaagctaacatatatggtcaacacatgtttctcatacgcatacacttggctttgtagtcgtatgcttcctagcttgctctgtctggctaatataagcggtttaaaacgtgtctgcgtgtacaaatcccgattttattaccctgcccaatgtttgttactatgcagactccaagaagtcaaagacgcaccaaagatccaaatcaaatctaaaaaaaaaaaaaaagggcggccgctct

SEQ ID NO: 704 - DNA, 1565 bp, Arabidopsis thaliana
  Clone ID: ARATH-23APR03-CLUSTER26948_1
tggtcggttctcgagtcatcgctgtctggaacagcgatgatcgggaaaacccaacacaccgtctctctctcactctcacttcccatcggcgaaaatggcgtcggtggcggcatcatcgtcgatatcattcgctgcatcattcctcaaaatcaaagcattccctctctcccctcgcttcttccccatccgtacactccgttgctctgtctcctcctcctcctctgagcccattgaattcgacatctccttcgctcctcccaaacccaaaccctcctccactcacggcggcgtcacccctcaacaactcttcatcccttggatcgtccgtagtgatgacggcactctcaaactccaatctcaacctcctgctcgtttaatccacaacctcgccatcgatgccactactcaaaaccctaagaagaaagataaatctaagaagaaacaacctcaagctacctcctcttcctccgccaccaccaccgcctcatctccagcttcacactcagaggtaaagccaaagctatccaaagcggcgcgtaggttttacaatgagaattttaaagaacaacctcaacgtttaagcaaagttctcgctgctgctggagtggcatcaagaagaacctctgaagaacttatttttgatggcaaggttactgttaatggtattctctgcaacactccacagactcgagttgatccatcaagagacattatttatgttaatggaaatcgtattcctaagaaacttcctccaaaggtttattttgctctgaacaagcctaaaggatatatttgttcttccggagagaaagagatcaaatctgctattagtttgtttgacgagtacttgtcctcttgggataaaaggaatccggggactcccaaacctcgcctttttactgttggtcgtcttgatgttgccacaacgggattgatagttgttacaaatgatggagatttcgcacagaaactttcacatccttcatctagtttaccgaaagaatatattaccacggttgtcggtgatatacacaaacgacacttaatggctatcagtgaaggcacaatggtggaaggagtccactgtgtcccagattcagttgagttgatgccaaagcagcatgatataccaagagcaaggctgcgtatagtggttcacgaaggaagaaatcatgaagtcagggaattagtgaaaaatgctgggcttgaggttcattcattgaagcgtgtccgtataggtggattcagacttccttcagatcttgggctagggaagcatgtggaattgaagcagagcgagctaaaggcattgggttggaagaattgaagatgtccaattcatcaaacaattaaaaacctctgttacctttagttaaaacagaatataattgtttagattatagtatatctttatcttagtttttttttttgtcaaagatctttatcttagttaggaatacttttttgttgtaagtagtttattgatattcattatgaatttattaataaactaatcttttgttttcttagaactaaaaaaaaaaaaaaacttcaagggggggccc

SEQ ID NO: 705 - DNA, 1356 bp, Arabidopsis thaliana
  Clone ID: ARATH-23APR03-CLUSTER269647_1
ggtcgactgtagcgactctcgccggataatttcctaggtaacaatcatcaccatgaagctctctttctctctccctccgaaatcgaaatccagagttagtctgaattccgacaggaaagactgcatcggtgcaggaaatctcaagcagttcgtcaccgaattcgatccttccgaaaccctaaccgactccaaaccgaaatacgttatacctcccattgaggatcgtcggaggtcctacaggaacattgatctaccgcttccatcagcttcaggtctccaattcgaggccgagatcccctctggcgatggctcagataacaacattacgtacggtctgaatctgcgacagaaagtcgagaacgttgagaagccagagcctgtggagaagatgttactgaaaagcatgaggacagatttggagtcactccctgatgctccggaacaagaggatttcgagagctttcctgtggatggctttggagaggcgttactggctgggtatgggtggaaaccaggccaggggattggtcttaaagctaaagaggatgttaagattgttgaatacgagaagtggtctggtaatgaaggatttggctttggtaaatcggacaaagccatgaagatgatagataataaacttgttggttctggaagccatgaggaagtgaaagttggtatcaacaagattgaaaatatggagaaagatagagttgtgagaaaacgtaatagagaaacagagggagagagtcgcactgaagttaaagcctgtaagcagaactatagaggtcaaactagagagacgagagagaagacctcatggcttaggagtcatataaaggtgagaataataagcaaggatgttaaaggtgggagattgtatcttaagaaagcagtggtgactgatgtggttgggccaacaagttgtgatattgctatggatgagacgcaggagttggttcaagggattgatcaggagttgcttgagactgcattgcccaggcgaggagggtctgtgttggttctgtctggtagacataagggtgtgtatgggagactacttgagaaagatttggataaggaaactggtgtggtttgcgatgcagatagccaggagatgcttcatgttaaacttgaccaagtcgccgagtacattggtgatcctgctgatattgggtactgactgagccatatttaactgcaaaatcaggtgtcaagactacatattgttagcatttaaatggctgcgtagagtagactttttaatctgctaagttataaacgaccagactttaaagtctttattatatttgatcaactatatatttatctttgttgtgccaaaaaaaaaaaaaaaaa

SEQ ID NO: 706 - DNA, 1311 bp, Arabidopsis thaliana
  unsure (1)..(1311): unsure at all n locations
  Clone ID: ARATH-23APR03-CLUSTER26965_1
aaaagtccctttgaagtgggaatgatactcgcgtgacgaccaaactccatcgagcctctctctctctctctctgtgatcagtttaatctactgaaagaaagaaagaaagaaagaaagatccgtattattaggcttcgaagctgtctcaagattgttgtttaattaaacatgttcagaagaaggaatgctcaccaactcgacaatgatgattctcaacaagataacaaggttagagaattgaaatccgcgataggaccattatcgggacatagtttagttttctgctctgatgcttccttgaggagatttctagatgctcgtaattgggatgtggagaaagccaagaaaatgatccaagagactcttaaatggagatcaacttataaacctcaagagatccgttggaatcaagtagcacatgaaggtgagaccggaaaagcttcaagagctagttttcatgatcgacaaggtagagtagtgcttataatgagaccagccatgcagaactcaacatcacaagaaggtaatatcaggcatttggtgtatcttcttgaaaatgcaatcataaatcttcccaagggacaaaaacaaatgtcttggctcattgatttcactggttggtctatggctgttaatcctcctatgaaaacaacacgcgaaatcattcacattctacagaactattaccctgagagactcggtatcgcctttctctacaatccaccaagactcttccaagcagtctacagggctgctaagtacttcttggacccacgtacagctgaaaaggtgaaatttgtgtacccaaaagacaaagcaagtgatgaactgatgacgacacattttgacgttgagaatctccccaaggaattcggaggtgaagcaacactagagtatgatcatgaagatttctcacgacaaatgtatgaagacgatctcaaaaccgcaaaatactggggactagaggggaagcactatccgaaaacaaacggtttctctccatccgatgttgttcctgagccggcgatagaaatcgcatcagcagctagctgagagttgaacgatatatacacacaagagcaagaagagaagaagaataaaagggttattctcattcatagaagaaaagccaatagaatgtgctggttaacttgatgatcaataaagtttcaaatagtctttgcctctttttcttattagtgagccaaacactttgtaacgtttttaattagcagagactatcctgtatgtgtaaaagaaaattgttaccatgtgtaatactactagttttgtgttattagtcgnnnaaaa

SEQ ID NO: 707 - DNA, 1279 bp, Arabidopsis thaliana
  Clone ID: ARATH-23APR03-CLUSTER269757_1
aaacaacacacacacaaatggctcctcgtgtgatcttcttacttctctcgcttgtttttctctagctcgcaaacacatcacactctttgagaaagtttcaatcatttctacaccctatttataaagacacggccaaaaatatatacaccatccctttgtccatcggctcaacttccagcgaaaaattcgtccttgacctcaacggagccgcaccgttattgcaaaactgtccaaccgccgccaaatccaccacctaccacccaatcagatgtggctccacaagatgcaaatacgcaaaccccaacttcccctgtcccaacaatgtcattgccaagaagaggaccgtgtgtctctcctccgacaattcccgcctattccgagacaccgtccccttgttatacacatttaatggagtttacactagggacagtgaaatgagttcttcattgactttgacttgcactgacggtgctcctgccttaaaacaaagaaccatcggtctcgctaacacccacttgtcgattccctcgcagctcatctccatgtaccagcttcctcataagatagctctttgtttgccttccaccgaacgaagtcagtctcataatggtgacctttggatcggtaaaggggaatattattatctgccttacgataaagatgtctctaagatctttgcctccacgcctctgatcggtaatggcaagtccggcgagtacttaatcgatgtgaagtccatccaaatcggtgcaaagaccgttcctataccctatggagccacaaagatcagcactttggctccttacaccgtattccaaacttccctttacaaggctctgctcacagctttcaccgaaaacatcaagatagctaaagctcccgcggtgaagcctttcggtgcgtgcttctactccaatggaggacgtggagttcccgtgatcgacctggtgctgagcggaggggctaagtggaggatctacgggtctaattccttggtgaaggtgaataaaaatgtggtttgtttagggtttgtggacggaggtgtgaagccgaagtaccctatagtgatcggaggatttcagatggaggataatttggtggagttcgatcttgaagcttccaaattttctttctcctcttctcttttgcttcacaacacttcttgctcagtgcaaaggttgtctcctttctaatgcacgtgatcgattattcatgttatcaagacatatcatcagtttcctttttaataaattaatgtcaacaaaaaaaaaaaaaaaaa

SEQ ID NO: 708 - DNA, 1355 bp, Arabidopsis thaliana
  Clone ID: ARATH-23APR03-CLUSTER269852_1
attaaacttgtggagaaagctgaaaacttggaggaagaatggcgacagtaaccgatctaccggatgatttggtaagagaaatattttctagggttccattgacatctctaagagcagtgagatctacttgtaaaaagtggaacgctatatcgaaatatgacatcttaggtaaaaaagcagcagcaaagaatcagttcttggagttcatggttacagattctagggtttgttctttgagattagatcttcaaggaatccgtagcgaagaagatttgattgatctatctataaagcaaataagtatacctaataaagttgatcaagtcgagatatctcaagtctatcactgtgatggcttattgttatcatcgccaaagacaactcgagtgttatggtatggaatccgtatttagggcagacgaaattgattcaaccaagaaaaaaactccacagatatgacaagtttgctcttggatacgacaacaaccgtaaccacaaaattttgaggtttctttatgaggggagtccaagaaacgtcattattgatgtttacgattttagctctgattcatggagggttcttgatattgatatagattggcatgaactgtttagtcacaatagcgtgtctttgaagggaaatacttacttttttggtcgaaagggaccacgtttgcctatgctgtttaaacctccatctcgtcgttttgaatatttgactctatcttgtgttagaaatgagaaactcgctgtgttatacagccacctcaacagatttggcacaatagagatttgtatttcgactaagattgatcccagtgcagtatcatggaccacttttttgagaattgatatgacactaatcaatggtttaccggataacttttttgttcactcttatgctacgagctttttcttcgatgaggagaagaaggtcgctgtgcttttcggtacaaacagatatagaggacgtgagacctgtcagtactaccagagagcttgcatcgttggagatagtggatacttcaaagctgtcaacatcgaactagttttcaattcacagctgcaatcttgccaacttgtgagctcttcttatgttccaagtttagtgcaactgcaagattagtccgttttctttaaacattttatttgttttttgcgttgaacaagactgcttttaggttgaagaaatagttgatagaagtttcattttctatgaaggctgatttttttgtttcttgctttgaacaagactgcttttagttctaaagatcaccagagaacagtttatctagggtttaggaattaatctatagagagtaacaaagtttttataacaaaaaaaaaaaaaaaaa

SEQ ID NO: 709 - DNA, 2035 bp, Arabidopsis thaliana
  Clone ID: ARATH-23APR03-CLUSTER2698_1
gacagagtagttaacttatattatatacctcctcgatgcacgagcgagcaaaactactactgtactacttttccggcgataaaatctatgaaaatggagggaactatcaaatctccggccaactacgttcctctcactccgatcagcttcctcgatagatctgctgtcgtctacgctgacagagtctccatcgtttatggctccgtcaagtacacgtggcgccagactcgtgaccgctgcgtcagaatcgcctccgctctctcccagctcggaatctctaccggagatgtggtttcagtgttggctccaaacgttccagctatggttgaattgcattttggtgttcctatggctggagctttgctctgtacactcaacattcgtcatgattcatcacttgttgctgtcttgcttagacattcagggacaaaagtgatttttgcagatcatcagtttctccaaatagctgaaggagcttgtgaaatcctctcaaataaaggtgacaaggtcccgattttggtcttgatcccagagcctcttactcaatctgtttcaaggaagaagagatctgaggaaatgatggaatacgaagatgttgtagcgatggggaaatcggacttcgaggttatacgaccaacagatgagtgtgatgctatatctgttaattacacatcaggtaccacttcaagccccaaaggtgttgtttatagtcacagaggtgcttatttgaattctctggctgcggttttactcaacgaaatgcactcctcgcctacttatctatggactaatcccatgtttcactgcaatggctggtgcttattgtggggtgttactgctattggtgggactaatatatgtttgaggaatgttacggccaaggctatatttgataatatttcccagcataaggtgactcatatgggaggtgcgccgacgatattgaatatgatcatcaatgcgcctgaatctgagcagaaaccgcttcccgggaaggtgtcttttataaccggtgctgcaccgccaccagctcatgtgattttcaagatggaagagttggggttttctatgtttcattcctatgggttaactgaaacttatggaccaggcacaatctgtacatggaagcctgagtgggactctttgcctagagaagaacaggcgaaaatgaaagctcgacaaggcgtgaatcatttagggctcgaggaaatacaagttaaagaccctgtaaccatgagaactttgccagctgatggtgtgactatgggtgaagttgtcttcagaggaaacacggtgatgaatggttacttaaagaaccctgaagcaaccaaggaagcttttaaaggaggttggttttggagtggcgacttaggtgttaaacaccctgacggatacatagagctgaaagacagatcgaaagacattataatctctggaggagaaaacattagctcgattgaagtcgagtctactctgttcactcacccttgtgttcttgaagcagctgtagttgcgaggcctgatgagtattggggtgagactgcttgtgcatttgtgaaacttaaagacgggtctaaggccagtgcggaggagcttattagctattgcagggaccggcttccacattatatggctccgaggagtattgtgtttgaggatcttcctaaaacatcgactggaaaagtccagaagtttgttctgaggaccaaggctaaggctttggtaagcttatcaaagaaaggcagaagcaagttatgaattggtaagctttctttgttacttccaatctctacaagatgtcttataaattactgtctataagatcatgtttgtgtctaagctaaaccagaatgagatactaaaaccaatttgtatgtttctgaaataaataaaaccgggatgaaattgtaattccggaagattagatctatagcattctgattagagttgaatctgatggcaagtggatatattattatcttaagggaatcaatctttggattgtgtctaaaaaaaaaaaaaaaagggcggccgc

SEQ ID NO: 710 - DNA, 1030 bp, Arabidopsis thaliana
  Clone ID: ARATH-23APR03-CLUSTER26993_1
aacatagaaaaaataacaatttcttaatttatattacaagtgtcaagtgtgcatataataaataggaccaatcataatcctttacagctaaaacttgaatcaagttatattatcatcacgagtcttttgacccaagaaaaaacttctctgagtttcggcccatggaactttcgcagtcggacccaacccgagatcctgatacccggtacgatcaacgttgctgttgtttccccagcttccgccgatcaagaagctccaccgccgttggttactcctcctggggacgaattcgaaccgtcgatgacagtaatcacagcggcgaccacggcgacgagccacgttggtggatccgagcatccttgaagatccgagagtggtcagaaatcgttgctggtccacggtggaagactttcattcgtcgattcaatcgcgatccacgacgcggccgcgattgggacgcaagcgagaagtttcaatacgatcctttgagttactctttgaacttcgatgacgacgacgaggaggatgaatacgtcggactaggtggattacgaagcttctcgacccgattcgcttctgtcccggtttactcaggtaaagctccggcgatttcgccgacgtcgttgtctgcgttgacgccgcgtaatgagatcattgaaagttagtgggcgcgtgtgagaaacgcgtttgcgtttctggcggcggggaaaaggctgtcaaaatggttgactggtttggtttacatcgtttttggagtctgtcgcgttttcttatttaatcattctgtttatataatcaactttgaattaattttattattttcccagtttaattaatttatttatcaaccaaattttatgtttcttgaaagagaagcaatattttgtttcttttttgaggggatattgaacttgttgtggctaatataatataattttatgtaaactagctgtttagaatatgtggaagtaatgatttagttaatcatggttgcttgacatgatttctttagcaaaaaaaaaaaaaaaaa

SEQ ID NO: 711 - DNA, 1248 bp, Arabidopsis thaliana
  Clone ID: ARATH-23APR03-CLUSTER27003_1
cttcgtcatctctgtattcaaaccctcaaaagatcttcgtcatctctgtattcaacacatagtgatgaatcgagactaacaaaatcaaattctcttcactctgattcgcagtcatagtttaccaatttcttcttactcgcaagcaatggcttgccttggaagaaaattctccagaattggttgaattcgtttttttttcatttccagaaattttagtatgtttaagagatgcaattagtgcctagtgatgatgatgatgatagaaaggaacagattttattcgacgaatcaacatcctcaaacgaaatcgtagcagcggaaagaggagatcgtgttgtggaggaaggacaagtttcagaaatagctgagactgatgatgacgaaaccacacttcttgtttctggagatcaaccacaatgtcgaacttgccttgatgttggaggggaagatctgattgctccgtgcaattgtaaaggtagtcgaatttgccttgatgttggaggggaagatctgattgctccgtgcaattgtaaaggtactcaaaagcacgttcacagatcttgtctcgataattggcgctccaccaaggaaggttttgcattttcgcattgtacagagtgtagagcctttttcaaactccgagccaatgtgcctgctgatagatggtggttgagattgagatttcagctgctggttgctagagatcatgccttcatcttcatttctgtccagatgattgtagcattcttggggttactagtttacaagttctacggtgaagaactacgagaaatgtttggttatgaggaacatccttatgggttctacacattggctgttttggccattgtcttggtaggactgctatatggattcttcatcgccataatatgtggccaaaagatcaacgagcggcattaccatgttctcgccaaacaagaactcacaaaggaatatatagtggaagaccgcgactgcaagaatgttcctgagcttgatcagagtcatgtgatggaactaaaaatgttgggactttattgaacatatactacaagaaaagagcttgttggatctttactcttcatgtcacctgtaaattatattcttcattgatttatatggttgcttcaacgaacgattgtgtcatctccaagtggttttttgattttttttttttttttaagttgtatatcttctgatgaacacgcctatctgttcgagtatccatatcaaaagtaaaatggtttt

SEQ ID NO: 712 - DNA, 1232 bp, Arabidopsis thaliana
  Clone ID: ARATH-23APR03-CLUSTER27049_1
gcaaaaacagtttgaccgaaaaaaaaggatttgtaaaacagagcacctgatggcgtcggtgaagttgccgtgggatttggaggaagagatactgtctcggcttccacctcgatctcttgttcggttcaggaccgtatgtaaacactggaacggtcttttcagcgacaagaggtttgtcaaaaagcacttggtccgtgcccgtccccaattcatcttccttaccgaatcgaagaagatgtactcgatagagatcgatctgggtggaacgatagaggtgcgtgaggtaccctacgattttcattgtcagcctatgaagaagaattttacaactatcatggcttgcgatgggttattgtttcgtgatttttggaaacaaggtgttgcggtttggaatccgtggttgagacaggttgggtggatcgagtatgaggataaaggtttccgtttttgcggtgtaggatacgatagttgtaaacccgataagtgttacaagatcttggggtattttaattgtacgcgtagactcagcgactctctccaggaaggttactaccaagctgcgatctacgagtgtgcatcgcaggcgttcaaatttattgatacccctaaccctttcaacctgtggcccaacaaggatcctttgtccgtgaacgggaatctttattggcttgctcataaccaccctgagactcttgagtatttcatcgaaacctttgatttctccatggagattttcaaacccttttgtctactgccgtgtcggaaggactttggtagcaatgaacttgtcctggcggtttttaaggaagatcggttttcattgttaaagcaatgcttcgaaacaacgaagattgagatttgggtaacaaagatgaagattgatagagaggaggaagtggtgtggataaagtttatgacattgccgacaaccaacttgcctaatctagatgatacttattgtcgcagtagttacttcatctttgacaagaccataatcatgtgttgtggcgattacaaaactggagctacttgcatctatatggtgaggggagatatgttcaagaagattcagatcaattctgggatttttcagttttcttactgtgtctatcttccaaatttgatctcggttccttttgaatcacatcaagtttaattttttttttttgctaagaaaacgaaacaagtttaaattctgaattttcttgattagttacaaatttgaattcgat

SEQ ID NO: 713 - DNA, 2291 bp, Arabidopsis thaliana
  Clone ID: ARATH-23APR03-CLUSTER2706_1
gaacactcactttactcttttttccctcttcaccacttctctctcaaactaaagacaaaagctcttctctcttccctctctcttctccggcgaacaaaagatgattacggcggcggacttctaccacgttatgacggctatggttccgttatacgtagctatgatcctcgcttacggctctgtcaaatggtggaaaatcttcacaccagaccaatgctccggcataaaccgtttcgtcgctctcttcgccgttcctctcctctctttccacttcatcgccgctaacaacccttacgccatgaacctccgtttcctcgccgcagattctctccagaaagtcattgtcctctctctcctcttcctctggtgcaaactcagccgcaacggttctttagattggaccataactctcttctctctctcgacactccccaacactctagtcatggggatacctcttctcaaaggcatgtatggtaatttctccggcgacctcatggttcaaatcgttgttcttcagtgtatcatttggtacacactcatgctctttctctttgagtaccgtggagctaagcttttgatctccgagcagtttccagacacagcaggatctattgtttcgattcatgttgattccgacattatgtctttagatggaagacaacctttggaaactgaagctgagattaaagaagatgggaagcttcatgttactgttcgtcgttctaatgcttcaaggtctgatatttactcgagaaggtctcaaggcttatctgcgacacctagaccttcgaatctaaccaacgctgagatatattcgcttcagagttcaagaaacccaacgccacgtggctctagttttaatcatactgatttttactcgatgatggcttctggtggtggtcggaactctaactttggtcctggagaagctgtgtttggttctaaaggtcctactccgagaccttccaactacgaagaagacggtggtcctgctaaaccgacggctgctggaactgctgctggagctgggaggtttcattatcaatctggaggaagtggtggcggtggaggagcgcattatccggcgccgaacccagggatgttttcgcccaacactggcggtggtggaggcacggcggcgaaaggaaacgctccggtggttggtgggaaaagacaagacggaaacggaagagatcttcacatgtttgtgtggagctcaagtgcttcgccggtctcagatgtgttcggcggtggaggaggaaaccaccacgccgattactccaccgctacgaacgatcatcaaaaggacgttaagatctctgtacctcaggggaatagtaacgacaaccagtacgtggagagggaagagtttagtttcggtaacaaagacgatgatagcaaagtattggcaacggacggtgggaacaacataagcaacaaaacgacgcaggctaaggtgatgccaccaacaagtgtgatgacaagactcattctcattatggtttggaggaaacttattcgtaatcccaactcttactccagtttattcggcatcacctggtccctcatttccttcaagtggaacattgaaatgccagctcttatagcaaagtctatctccatactctcagatgcaggtctaggcatggctatgttcagtcttgggttgttcatggcgttaaacccaagaataatagcttgtggaaacagaagagcagcttttgcggcggctatgagatttgtcgttggacctgccgtcatgctcgttgcttcttatgccgttggcctccgtggcgtcctcctccatgttgccattatccaggcagctttgccgcaaggaatagtaccgtttgtgtttgccaaagagtataatgtgcatcctgacattcttagcactgcggtgatatttgggatgttgatcgcgttgcccataactcttctctactacattctcttgggtctatgaagagatattaccaaaacacagggactttgttttattcttttgtgggatgatgaattgtgaaaagaacaatgccctttttgttgaaaacccacaaattaaatcagaagcagctttagagaatctttgaggataattgaagctcttgaagaagagaagaagaaggagacttaagtaggagctcagcaagttttacctttttcttaattttaatgaacattcgtgtttcctcttttggtaggttttaggaatttgtaaaagctttggctacttttagtgaattaaaaacgttaaggaaaatatcaaaaaaaaaaaaaaaaaaaaa

SEQ ID NO: 714 - DNA, 2049 bp, Arabidopsis thaliana
  Clone ID: ARATH-23APR03-CLUSTER27079_1
gagctcactatgtcccccccccccggccgtcaccagaatatgttaataaacgcaggaggagataaatggataaacccaaaaactgacaagtgaaaaccttttgaagccaaaacccccttcaaaatcaagctccatgatagaaaaccctcttcctacataatctcctggtaaaacaaaaagtgagaagtagaaagagtgtaaatggcgtcaatatcaaccaccacctggctctaccgaggtcaagtatgcacagacagtggaaagtccagtaattgtattgtgcagagacgggttaaatgtgggtttccactcaagacattgcatgctgggattacttctagggatcggtctttgcgacattgtatcaaatgcaagaaagaggatggagatggtgatgtaagtgaagggtctaagaagagtgaagaaggatttgagtatgtgactgttgagaggcatccttaccatagttatatggattcaacttctgggaagcttgagccagcgtccggggctcgggctagtattccaggtgaggattattggcctgaaggaacttcgagccgggttagagctgctagagctcctcaaccagctggtgagtcttcgagttttccttcctatggaaagaatcctggaagtaggagaaagaagaataggaaagctactgaggagaatgtgactgttgaaacgaatgacgaagtatccgattctgaggatagctctgaagaagaggaaaatgattcctcggatgggtttgttacctataagaatgaatttgagagagaagaagaggagactggttttgaattagacaaaaagcttggaaggccacatcctttcattgatcctacgaaaaagaaacaaattgaaaagacactcacgagcgatgaatcgtggtggaactggaggaaaccggagaaagaacaatggtcaagatggcaaagaagacgtcctgatgttgaaacggttttcctcaaggcaatggcagaaacaggacaagtgaagctctatggggaagaaccaacactcacagaaacttctctttatagagcaagaaggcatcttttcaaggaagagaggctgcaagctgagcgagagagattagcgaaagaaggtccaatggctttttattctgaatgggttaaagcatggaagagagacacgtcaagagaagctgtacaaaaacattttgaagagacaggtgaagatgaaaacacacaactgattgagatgttctctcatcaaacagatagagaataccggataatgatgggaactgatattaggatcaagagagatccattggcaatgcggatgagggaggatcaaattaagcaaatttggggcggggatccagtttacccgacaattaactacattcaagatcctaatgcggttatggatttcagaggacctgattttcatgagcctacaccaaatatgctctcttatctaaaggagaatggcaaagtcatctcaagagagatgcatgaagcactactgacaaaagagaaaaccgagcagctcgaggtacctgacatggatgatgcaatggcacaagctgttgatattggtgaaaacgatgacgacgaagacgatgcagatgtagaaaaagacgacgagaaagtgccgaggaactggagtgtcttgaaggaaacccctgagcttcgcaccgccaagcctaaaccaaagaaggaaggtcggatgtctctagacgaggccgtggatgatgctgagaacttaactgattttctcatggactttgaagaggagactgatccttaaacctggttttcgtatttcttatgtaaagacgttatttagggcaactttttcttcactggttttgcttgtatacttggaagggatgatatcatttaggagtggatttgagttttgcaagtgatttgtatcatatggaattcaaatatttttgattgaatttatagagttttgaaagaaaaaaaaaaaaaactcgagggggggcccggtacccaatcgaaaaagaaaaaatgttgggggggatgttaagagtggtgggttagagtt

SEQ ID NO: 715 - DNA, 2186 bp, Arabidopsis thaliana
  Clone ID: ARATH-23APR03-CLUSTER27096_1
atcacctctctcttctcctgaaatcaccatgagtatggaagcaacggagctacaagatctctctgacgacgccgattacgccgcttctcaacaacaaggatcggctagtatgatgcgtagcgatagcggaaagagaagtttacaaagtgaacacgaagacgctgtattgatttatttgaaagataacgttgcaattcatcctacacagttcgcatctgagaggattagtggtagattgaagttgactaagcaagattctgttctctttctgtcgtggattccgtacaagggacaaacatcaaatgcaaagctatcagagaaagacaggagtctttataccatcaccgcggttccgtttactgaagtgaggtccattaggagacacactcctgctctcggatggcagtatgtaattgttgtcctgtcttctggacttgcatttccacctctgtacttctacaatggaggagtcagggagtttctggccatggtgaagcagcatgtttttcttgcaaggtcgtcagaagatcaaaatgtgttcattgtgaatgattttcagagtcccttgcagagaactttgtcttcattggagctgccaagttcactgcctgtagcaagtggacaatccgtatacccattagacggaggttcttctagtgaaaatcaaaggagaacaagttcagatgttggtaatagagtatctagtgtttcccagtctggcttcagaaagcaaaagagtcatgatccaactcgggatctttcaatccatctactagagaagttttctctggttaccaaatttgctcgagatacaactactcagctgttttcggaaaacaatggctttggttccattgacaagagatggaataaccaacccgtacatagttatcctgaaaagttgtcgaacattgctgaggaaaagcatcatgaaatccgtcatagttattctgaaaatgaccttctcaaggatgacgaaatttcttatattgatgtccctgctgatcccttagagtttgataaattaagtttgatgtggggaaaaccaaggcaaccaccaatggggcataaagagttcacagcattgttggattctgaagggcgagttgtggaatcaaaagctcttcgggagagagttttctatggaggcattgagcaccagttgcgtagagaggtatggccctttctcttgggatattatgcatatgactcgacatatgcagagagagaatatcttcgatctgtcaaacggatggaatatgcaacattgaaacagcagtggcagagcatttcccctgaacaagcaaaaaggttcacaaaatatcgggagagaaaaggattgatagataaagatgtggtaagaactgatagggcatttgaatactatgaaggggatgacaatctacatgtcaatagcatgcgtgatattctgttgacctactccttctacaattttgacctgggttactgccagggaatgagtgattatctgtctcctatcttgttcgtgatggaggatgaatcagaatctttttggtgtttcgtggcactgatggaacgacttggacccaactttaaccgtgaccagaatgggatgcatactcagctctttgcactctcaaagctggtagagttgctcgatagcccgctacataattactttaaggagaatgactgcttgaattacttcttctgtttccgctggattctgattcagtttaaaagggaatttgagtatgagaagacaatgcagctgtgggaggtgatgtggacccactacctctcggaacattttcacctatatgtttgtgtggcggtcttgaagcgatgccgcagcaagataatgggagaacagatggattttgacactctcttaaagttcatcaatgagctgtctgggcatattgatctcgattcaacagtcagagatgccgaagcactttgcatagaagctggtgaaaatggtgctgctagcattcctccaggaacccctccttctctaccccttgatgacggtaccttatatcctcaggaagatgatgttttgtaagtaatacgacttttcttttttcttctggacatgttaccaaaatttggattgcttttactagaaatcccatacaatgattaaggcaaaggacataagctttttttctttttcccacttaataattactctggttcgc

SEQ ID NO: 716 - DNA, 1579 bp, Arabidopsis thaliana
  Clone ID: ARATH-23APR03-CLUSTER27106_1
tcacggcagagcacaaccacgacgagaaaaacctaaccgtgatctatctctatcgaattcaaacaagaaaccttgttgcatcaaattcccaatcactgaaaatccaactttcggatccaccgattgaatcgccagacactgaatctgctcctccgtctcaataaagtaattcctcggcggcggaacaaacacagcaccaccggagaattcaaatttcaacctcggtaatatcttttccggtttcgtgacgccggagacgttaacgcataaatcaaaccccggagtcagcgcatcagcgatagggagctttacccgtcgtctcacggcggcgataaccgatcgatacgccggttcagctaaaaacgctaaggttgtgccggaatccacgacggttccgccgttacctgaatcatcgatttcccaaattgaaggatcgattcgtaatttcgcaccgttaacgaaaacagattttaatttaacgtagtaaaaagttggcgataacggattcgtgagcaacggagtgaagaaaagctttgaaatgccgtcgccgccgttaccgatgatgagataactcgtcggcggcggagagagtgtgtaatccattaagcaataagaaaacttgttaccaaaacgacggcccaactgagaagcaaaagaaataggcccacggcccaagcccattactccattggctccattgaaactcgtaccccacacccgttgtcccgtgagcccccgcccgctccctttaccacccctggccttcctcgctcctccccccccgcccgtttcctccgtccccgcttctcccccgggtgttccggtggtgccggccccggctgccccaccgtccgcgttgccctacggggaatggatcccggggtatggttccatatcggagctcgatccggtttaggtactaagcgacaaaccgggtcgtagcaatggccgggagagaatgttgaggagtggcgagggaagaagacggtggccggagaatgatgagaacagttccggcaagctgaacatttaacccaaacgagatcgcttcctgtgtcggcgatcagaagtaacgattgaggcggttgtccgatacgaagatccacaaagtattgacccgacccggaagctgcgccggagaccaccggagatttgacgaatgggattggttttctacggagagagagaaaatggagacggcgagtgtctaaagctagagcttgtgttggagaaggaaacggagatttgcgtagtagtggaagctttaggtatttgttgtggttactcacggcggcgatatttgacggcgggaggaggaaaagagagaggaaagaacagaggaagaagatgagaggaaacattgagagagagtgagaagggttttgtgatttttgtgtctgtgtttgtaagagatgaagaagaagaagaagaccgtatttttatacgtatatatatacggagtttttgtcagtatgtggtcgaaatgtgagtatattgcaacgtgaagactgaaagatatctgtttttggggggtatcaaaaataaagctttggcttttgtaataaaactctagctgtct

SEQ ID NO: 717 - DNA, 2648 bp, Arabidopsis thaliana
  Clone ID: ARATH-23APR03-CLUSTER271256_1
tatcgttcaaagcataaatattctgacaatcttcttgagcaagttgagaagtatgcctctgctcggctcgagaatcagtccaagttgattactaaggttgcagctttgatggagtgtgataatgttgatgattttattgataagaaatctgatgaacaagttaagaaagatcttgttttggcgtgtaagagattcccttctatcattcttggtgattctcgtcccgtggaattatactccaatagcaaatcttacggtgaatcaagtagcattcttaaaacgccaactgataacagtttccttcctactcctatgcatggaggatggtttgatccggataatctttcgagaacattatcttccttctgtcctgagcttttacagaatgatgattcttctgatccaagagaagatatattagatgatggttcttcttttacgagcaaaactgctacttctgaagttgaagcaacgtctgatgatgtttttgccgctcagcgatttcttgctactagtatagattctatgcctgggttaagtaagaggcacatgtaatcagctagacagctgtggttttcacacgatgaagaaattattgcatcattttcctcgaacctatgcatgatttgcagaatgcacaggttgattttgaggatggacagtatttgatatttggtgggaaagtcttgtcttcaaagggagtttgacctagctcttcattttcatttctcgaggttatggtcagcggtgaactctcaggcagccacagaacgccggtggacctgagtcataatgctgtagataattcaggaaaatcaatatttttgcggctgaataagctggttagggggactcgcttcacctggcaaccctttcttaattctattcaagagaaacataaagtcggggaccttgtatgcattagtgggaaggtaaagtcattgcgtgcagaagatcattttgaaatgagggaatacaatatagatgtactcaaagatgaagaagaatcatctcatcgagcccaggggagaccatatcctatatatccttcaaaaggagggttgaacccaaagttccttagcgatgtcatctccagggctctgcgggttctccccgccaatatggatccgattcctaaggaaattactaaagtgtttggcctaccatctcttaatgatgcctacgttggcattcacgagcccaagactttagatgaggctgatttagctcgcaaaaggctaatatttgacgaattcttttacctacagttggcacgcttgtaccaaatgcttcaaagccttggcacaaaaatagagaaagatgtattgctggaaaagtttagaaagccagtacttaattccgtttatattgaagaatggtccactctcacgaagagttttctgaaagctctaccatattcccttactcctagccagctaagcgctgtctcagaaataatatgggatctaaagcgtccggttccaatgaatcggcttttgcagggtgatgttggatgtggcaaaacagtggttgctttcttagcgtgtatggaggtcataggatctggttaccaggcagctttcatggcccccacagaattacttgccatccagcattatgaacagtgtcgtgatctgttggagaatatggaaggggatcttcaaagtggagctatatcgtttataattggaactcacagtctgatagctgaaaagatagagtactctgcattacgtattgccgtagttgatgagcagcaacggtttggtgtaatccagagaggaaagtttaacagcaagttatatggaacatctatgatatcaaaaagtggctcatctgactctgatgatacttctaaagctgatctcagtatggctcctcatgttcttgccatgtcagccacccctatcccgagatcacttgccttagcgttatacggagatatatctttgacccaaattactggtatgccacttggaagaataccagttgagacgcacatttttgaaggaaatgagactggcatcaaagaagtctactcaatgatgctggaagacctgaagtctggaggcagagtatacgttgtgtatcctgttattgaccaatcagagcaactgccacagctccgtgctgcctctgctgagctcgaaatagtaaccaaaaaatttccaaagtacaattgcggactgttacacgggaggatgaagagtgacgacaaagaagaggctctaaacaaattcagaagtggagaaacacagatacttctgtccacccaggtgatagagataggtgttgatgttccagacgcatcaatgatggttgtaatgaatgctgaaagatttggaatcgctcagttacaccaactccgaggacgtgttgggcgaggaaccagaaaatccaagtgcttattagttgggtcaagtaccaatagcctaaaacggttgaacatgttggggaaatcatcagatgggttttacttggcaaacatagaccttcttctacgtggacctggtgatttgcttgggaagaaacagtctgggcacttgccagagttcccggtcgctaggctagaaatagacggcaatatgttgcaggaagcccacatcgccgctttggtatacattcattctcccatgacattacagtga

SEQ ID NO: 718 - DNA, 1413 bp, Arabidopsis thaliana
  Clone ID: ARATH-23APR03-CLUSTER271270_1
atgtatatgattttcttcatgggatttgaatttcaggacaagtacaaggaaaagaagcataagaaggataaagaaaagagagagggtaaagagaaaaagagtaaagatagaagcaaagacaaacagaaggaaagaaaggagaaaaaagacaaacataaagatcagaaagacaaggagaaaggtaaagaaaaaggcaaacctttggaggagaagaaagctgagctgctgacaaatgccgggcacagagagaatcgtgtaacagatacggtgcagaataatagtaatggagagtcaaagtatgtacaggacctggcaagaaggatcagatatgacgaagaagcaacaggaagtcagagtgcacaaaggattgatcatcctaaccaaaaaaatgtaggaataacagaaaaagcatttgagaacagcccaattgaagaaacaagccatagggtagatgacaataagagaatcaataaccagaagaactttacagcggcaaaaagttctgaaaatgcagtttctcgagtatcatttggtgcagatcataaaagagctgaggtgatgggtaaaccaatggagaacagagaccaggtgaggcaaacagaatcagctgagaagagtcaccgcaaggaaaatgtgaccaagagtgagaaaccaagggatcaagaaggggtaaagaagactgaagcaaaggataaagacagaaataaagagaagaaagaggaaaaaacagagtcgataaataaaactcgtcaggagaaaccaaaattgatacgagggcccaagttagaggaaagagaaaaggactctccggatttaagaaattgcaagctgcctgacgtttcacggacaagcatcaagaaccttcacaccgagggaaatcttggcaaacggaaggatcatatgacaaatggattcctgtatgaaaatggaaccacgccacacaagttacagaagctgagtgcttctgtaccatctgtggaaaatggaagaacattaggtgcaccccgaactcctccaatgcctgcttctgaggtgcaaggaacaacttgcaagccacaagtcaaagaagtcagaattaatggttttgctgtctctggagaaaaacgtaaagtctgtccaccaagccctttggctgcaacaatgaaagtgaaagtcaaggaaaatggtgaagcatccgcaaagccgcctcatcctgacctaaagtatctcaatcagatactccatgtacctacaagggagctgttgccagagattgatgatgaccaagaatggctacttggtcagtcgggtatcaaattaaaaagggcgagaacagatcctccagattctggcgaatccttgcaggtctggaaccaagctttcagaatagagtctgcggatatcacagctcttccttatgtagttccattttag

SEQ ID NO: 719 - DNA, 1183 bp, Arabidopsis thaliana
  Clone ID: ARATH-23APR03-CLUSTER2712_1
gaaatcaccaaccagtgacctaacaatggccgttcctccattattcttcctcctcacactcctctctctcccttctcttcttatctccgccggtgcttccaatgcctatccttctattcccggaaccgctcctatcgacggaggtttcaccgatgaacttaaacccattcgccgtgaagtctacgggaatggcaaaatctatgacatcagtcaccgttacactccggagatgccgtcgtgggactcatcggaaggaatcggacggttcctatggttagctgcgagtatgaagaacggatctcttgctaataactctgaaatgaagattcccacgcacactggtactcatgttgattcacctggtcacgtctatgacaagtattacgatgctggctttgatgttgactcgcttgatcttcaagtcctcaatggtcttgcgttgttggttgatgttccaaaggataagaacattactgctgaagtgatgaaatctcttcacattccaaaaggagttagtcgtgtgcttttcagaacattgaacactgacaggcgtcttatgttcaagaaagaatttgatacaagctatgtcggattcatgaaggatggtgcgcaatggttggtagacaacacagacatcaaacttgttgggattgattatctatcagtagctgcatatgatgatcttattccatcccacctagtattcctaaaagaccgggagactatactcgtggaggggttgaagctggatggtgtgaaggcaggactctactctgtccattgcttacctctaagactggttggagcagaagggtctccaattcgttgcatcctcatcgattgattctctcccatcacaaacctgccaaatccgaaattgtccgtaatcaaaagcttgcttagcttatgaactgaatatcagtttgtgctagatttatgcaaccaatatggagattgaagtaggaagaaataagagagatgcagagaagaccaagttgatgataatgaagcaccgaagaaaaaagatttttcatttctatgtatatgtcaataaataaattaaaaattctcttaatctgtcaaggttgtactaattatcaaatagggaaaagttcataacatataaatccttgttgaaataggtttttgttttcccgatcatattcagatttggttttatgcc

SEQ ID NO: 720 - DNA, 2064 bp, Arabidopsis thaliana
  unsure (1)..(2064): unsure at all n locations
  Clone ID: ARATH-23APR03-CLUSTER271334_1
atgggacaagaaagacctaacgacgaagagagacccgagtcacgtgatcttggggtctacggatgttcaccgcctcattcgccgcgtctcggtccgaccaggttctacgtctttgctggagacccgaatccaaaacaaacgataaagcgatgcaagaggaagagaatccaagcttgtaacgatcaaagaacggctaaaacagctattggcgttatggcgattttgggtttcttttgcctcgttaattggttcatgctctctcgccttcacgaaggtcgggtctggcttcgaagaggactctctgagaacccaaaacatgtttctgcacagaatgaagagcgtaaaaagtttgaaaaacggacgcgtgggaatataatggaacatatggtagaatgttgagtttggctactgatgctttggcagagggaatgcgtgataaccgttattgtaatggttttgattttgagcagaacaaacttgagaccaaagacttatggcaggagccgaaggaacaagcttcggcgtggaagccttgtgcggatcaacgttctttgactcctgacgatggcaaaaatggatatattatggtaactgcaaacggagggattaatcagcaaagagttgctgtatgtaacattgttgttgtagctcgattgctcaatgcggctctcgtcattcccaaattcatgttaagtgacgtttggacagatgcaagtttggagatatctaccaagaggaacattttatggagtacttgtcgcccgatattcggatagtaaaggagctaccaaaagagcttcaatctcttaatcttgaagaaatcggtagcgtcgtgacagatatagaagtgatgaaagaagccaaaccagacttttatatgacacacattctccctatactactcaagaacagagtaatccattttgtcggattcggaaaccgcttagcctttgatccattaccgtttgagttacagaggcttcggtgcagatgtaactttcatgcgctaaacttcgccccgaggatacatccaacttcccggtcgcccgtgcgtccaatacggggcagtggatcttacgttgcaccacttgatctacatctcctcggtccaaatatgcttccttaatcttggacaataagtctgattctccggtgcaggaggaggcggcttcttcttcttcttctaagtaccttgctctccatttacggtttgaaatcgacatggtggctcattctctatgttacttcggaggaggtgaaacagaacagaaagagttggattcttaccgccaaaaacgctttccatctctttcaactttaaccaggggaaaaaaattccgatctgcggatgttttgaggacagaaggactttgtccactaacacccgaagaagccgtgcttatgctcgcggctcttggcttcaaccgcgaaacccgagttttcgtagctggtgcaaacatatatggaggatcaaaacgtttagccgtgttaactagcttatacccgaatctagtccccaaaaaaaagttactaacagaatccgaactacaaccattcaaaaacttttcatctcagctagcggcattagatttcatcgcttgtgctgcagcagacgcttttgcgatgacggattcagggagtcagttatcatctcttgtatcgggttatcggatttattacggaggagggaaattgccgacgataagaccgaacaaacggagactttcggacatattgttgaagaacagtacgattgagtggaacgtgtttgagaaaagagtaagaaaagcgattagacagacgaaacatgtattcgctagacctaatggacgcagcgtttaccgttacccaagatgtaaagaatgtatgtgtcatgcatgaatcaataatatttgatcatttttttgttttctttttggggtccggttttggttcaatttatcctattttgtaacctcttaaaagttgagttttctgtaatgatatatgtttttttttcattatatgattgaagagtatatcaagattttggtgtgccanaaaactcgagggggggcccggtac

SEQ ID NO: 721 - DNA, 767 bp, Arabidopsis thaliana
  unsure (1)..(767): unsure at all n locations
  Clone ID: ARATH-23APR03-CLUSTER27142_1
cgggggggggggggggngggnagatatacatagaactacatcagatatctatagaaacaaacttatccatggcaataatggcatcgttcaagtctttcgcagccgttctcagtgtcctttttcttgccatgactgctatagaaacggtagttcaagcccaagaatgtggcaacgatctatcaaatgtgcaggtatgcgccgccatggtgctgcccggttcaggcagaccaaattcagagtgttgcgccgcacttcaatctactaatagagattgtctatgcaacgctctccgtgcagccacctctcttccttcgctttgtaaccttcctcctgtggattgtggtataaatgcttagttaagctacgagtcaattccaagatgatcaaggaaaacgggaaaataaagaataatgagaaatattccagtcttatgttttttcttctaacttctgctttactataataaagttctagtagttttgcttagaaatttagatactactagtataataaaaagctttgataattatgagaataaaacattcccggtctgaaaccaaattattcttaaacatgtacgtgagaaaataaaaaaaaaaaaactcgaggggggcccggacctggctccacatgggtgggtcctcgtgccacctgccccgtgtgcacccggacccgaagcctcgcgaaaacgaagaaaggagaaatcccgcgtcccgtcaagacaacagaggccccctacccggttnnagnganggaaccggtcccnn

SEQ ID NO: 722 - DNA, 1571 bp, Arabidopsis thaliana
  Clone ID: ARATH-23APR03-CLUSTER27159_1
attattcacaatcgtgagcaaacggaacaaagtttaaagtcgtcgttcaaagcaacgtgagttctctcggaaccttacgggttacttacgggtaaaccactcgccggtcggaataaaggttttacaaatccctcttgtctcatccgtgatgttgaagcgtactgacaaatggaaatcttcgcatggatctcgaatccatcaattcggacttgttttcgttgttgggatcttactggtggtggttctgttattttgtttcagtggcaagaatcagagcacgaaaatgcaactaccgaaacagatctctaacaatgtcaagcccgaattgcaatctcagccaacattagagattcagaacgagactcaattgatatggacgataccaaattcaccaaaagcagttctgtttatagctcatggttgccacaggaaagcttcagacttttgggacaaatcttcagattgtcctcaatgtactggcctaccagaggagaggattcttatgcgatttgccctagctcgaaagtttgctgttttaactgtatctagcactggaacatgctggacatttgggaaggaaaaaacgattgttggaagtataataaaatcgtgggtcgagaagcataagctcgaaagacttccgcttgttgcgttaggggcttcatctggtggctactttgtctcggctcttgcaacagaaatgcagtttagtagcattgtgcttatgattgctgaaggagtctttgatcaaattagtatcagtaaacagtatccgcctactctgtttgtgcacatgcctaaagatgtgtatagacaacaaaagattagagagttcttagaaggtcttagaatggaaggtattgatgctgcagagattgaatgcttggatttgccgatttctccggatttcttggcagataggattccaggtcttgattcagatgtctcggccaaactgtttaagttgtttcgagacaagggatttgttgatgagaagggatacatgaaacgtgatggacggagaacaccgtggaaacaagctcttagtggctacaaaatatcactggagcaaagtttgattactcctgttgaggaagaactgaatcttgcatatgcatatcatgagatgacgagcttgcagtctgatcaaatattcagctggtttgaatcgcatatgagctaattggctgtcagattttcatgtaacaagatcattctttgaaagctgtaagatgtattgcacaggacaatctatttgactccaatggaacatgcctaaacagtcgatttacttacgatttgagtctgaaaagatcatggtcactctggttgctgtgatttagagttaagaatagaattttggttagtgtaactaaactctccgtttaaattcagcagagtttcgtaaggtcagctgctttttgattctcatttgtagttaactaagaccgctaagtctgttgtggttttggaatctgtaagaactcttaatttaagaatgttggatgatattgcaaaaaaaaaaaaaaaaaaaaaaaaaaaaaaaaaaaaaaaaaaaaaaaaagaaaaag

SEQ ID NO: 723 - DNA, 994 bp, Arabidopsis thaliana
  Clone ID: ARATH-23APR03-CLUSTER27161_1
aggtccctttttgcacatcactcttctcagtcctcacgcatcgtatcagagaaaatgagctcccaaatctgcagatctgcttctagagcagccaggtctcttctttcttcagccaagaatgctcgtttcttctccgaaggccgagccattggtgcagcaactgtggtgcatgcgactggaaaagtccctcagtatgcatccaactttggaaaatccggttctggcttcgtctctaatagctggatcaccggactccttgctcttcctgctgcagccttcatgctccaagatcaggaagcacttgctgcagagatggaacgcactttcatcgctatcaaacctgatggagtgcagcgaggactgatatcagaaatcattacacggttcgaacgcaaaggatacaagcttgttggcattaaagtcatggttccttcaaagggtttcgcgcagaagcattaccatgatctaaaggagagacctttcttcaacggcttgtgtaacttccttagctcaggccctgttgttgccatggtatgggaaggtgaaggagtgattagatacggacgtaaactgattggagccactgatcctcagaaatcagaacctggaactatccgaggcgatctcgctgttgttgttggaaggaacattatacatggaagcgatggaccagagacagctaaagacgagatcagcttgtggtttaagcctgaagaactcgtttcttacactagtaacgctgagaagtggatctacggccagaactgaactattccctctttctcccttattttcaaccgttagatcagacataaataattacttcttttgttttttcttttacccaaacactgaaaacgtaccgggaataacaaatttactgcatttgttatcaagtttgttctaatagacccaatgaaattaggccacgtgtgcgatcatgtaaccggtttaccgtaatgtggacttgaaatcccaaaaaaaaaaaaaaaaa

SEQ ID NO: 724 - DNA, 1558 bp, Arabidopsis thaliana
  Clone ID: ARATH-23APR03-CLUSTER271633_1
gagagagctcactagtcccccccccccggccctttagggtttatcctccaagaccaaaatgtctccaattgagaattcctcatcttggacactcgaatccgacctagaagatctagacctcgacctccaagactacaaaccatccgtaccattaaagaaagtcccaaacggagacattttcgaagcctcacgcgccggtgacgtcgatagactccggtaccttgttgaaaccggagtcaacgtcaacgcacgtgaccgttgggactctgttgctctttactacgcttgtctcgctggtcacatagactctgctcgattgcttctagagaacggtgcgatttgctctgaacatacttttgatggtgatcgttgtcattatgcttctcttaatttaaggattcggaagcttctgaaggcttttgaagctcgtcctcctcctcttgctcctttgcaagcttctcttagagatacctttttgggatgttgtcataatcgagattatcttcaacaagaagaagctaatcttgatgtctctgatactctgagtgagtttggtagttcgaattactttccaccggatgtgatgttctatgtgcaaggtagacctattgaagcacacagggttatcttaagtgctcgatctccgtttttcaagcagaagtttgagaatgaatggaaagaccggagagaagttcggttttcgaaagagaagctttcgttggagatatctgttgatgatatggaagatcttgttaggatttgcaaagtttgtaaatgtgaatcactgcagaaaatcattgagaaggaactgattcaccagagatatgctgagtataagactcatagagatcttgataactccatgaaacggtttatcttacagggtatatcacttccagaggaagacaggcttcctgcttctttgcataggattcttcgagtttcactagcgaaatcgtttgttggtgatgtaatagattcatctgttggggatacgagagttggtgattctgtggaaagtcttgctgatgtttgtgttagagttgataaaagaaatttctactgccatcaagctgaggagatctttgatgttgcatctcgctacttgctgtttccgcttaaacgtgctgtggctgacgccttgttgcctcacttggaaactgccacacctgcagaactctgtcaatggctggttttgtcagatatgtacggagtgttgaagataagagagtactgcctggacttggttgcttgtaattttgaggcatttgttgaaacccacgagttcagggcaatgttattaacattgcctccaccatcaggagactcttcacttcgaaccactgttccaagtgcaccaggtgccatgatgaccacagaccaagggaatctccttgatgatctgagagagaagtggcttgaagcagaggctttagagcttgacatgagagacgagagtgctttgattttcgataagcgccttgcaatgcttgtggaaatagcagagcgagagaaatccgaatcagaagctgaggactacaaagacaccagcgcatga

SEQ ID NO: 725 - DNA, 1357 bp, Arabidopsis thaliana
  Clone ID: ARATH-23APR03-CLUSTER27180_1
tttttttttttttttttactttaaaataaatctcttttattattataaatgaattatggggacatatagtataggaacaataactccttttttctatacacgaaataaataattacctctactgtaattcttaaaatccacgtcacacactaacacttttgttttttctttttatctttccgacaagaaagaacaacagattaaggacaaaagaaaaaaccaaatcaagaatccttaaccttatcatcacgatcaacggcgcttgagttcttgcaatgagcaatagctgcttgaatcgcagcttgtaactcttccatggtactatcacttgacgatgatgacgtggaccccgagcttgacgatagtccggccgtagacacacgaagatggccactattagtcggagatgttctcatcgacgccggagccgagaacaattcacctctccttcctcttatgagatctctcttgttgtaagatccattaatcattgttttggtttccgtttggacccataagagaggaagagaaagagtaagaagaagtctgtcttctgttccaaaactgcgtgccgtttcctcttttctgaaacaacatccttatgtacttcttgacggcgtgacttaggtctaagctcataggtttcttgatcttctgttgttgttgttcttgttctcgctcgttgctttcaaaaccctttctccattttgataaaccaaagagagaaaatgacttaatgggtttggtttttacccgaatctcgccctctgctttgtcttcggtgttgtcgtcctttgcctcggtacttatgttggtgatagcgttttcagtgttgttgttgttgtttgtgggctggtcgggtaatatatctttgacggggagggtaaatccgtcattatacgagcctgtggaagttcggggagagacagggaggtgagagaggagatggagaggaagaaggtggccgtggaagaagatttcatcggcgggggataagtcgacggcgaaaggatcggtttgttgataagacgatgtcgttttggatgggcttctaagagtaggactgatgtgttttgaggaagaagagagaggctggagagagatagtgaaagagaagtcatgagaaggagaagaacaagtggatgatattggtgaaggtgaagcttcttgtttagggttttgcttttcagaaaaagtttgagaactgttcttcacctgttgtagattagtttccatgatgattgatgaggaagaaaaaaagtagaaaaaccaaaaaagggaaaagggatttttttgttgatcaaaggatatgatggtataataatattattattaggttcggtcttgaaactttcat

SEQ ID NO: 726 - DNA, 2185 bp, Arabidopsis thaliana
  Clone ID: ARATH-23APR03-CLUSTER271836_1
aaaatgttcaaaaactctctccccttaatctcttcctctaagaataattgagtggttaagggagagaggagacggagagtttttatattcgttaccggaaaattttgatctccgatggcttcttctcctgaatctgctcctccaacaaactccacctcttctccatctccaccgtctaataccaattcaaccacctcttctccgccggctccgtctcctccttctcctacacctcctcaaggagactcatcatcatcgccacctcctgattccacatctccaccagctccacaagctcctaaccctcctaattcctctaataactctccttcccctccgtcacagggcggtggaggagaaagaggaaatggaggaaacaatggtggcaatgatactccaccgtcacgcggctctcctccttctcctccttctaggagtaatggagataatggtggtagcagatcatcgccaccaggagacactggaggctctcgctcagacaaccctccttctagcggaggaagcagtggaggaggtggaggtggaagaagtaatacgaatacagcgatcatagttggtgtattagtcggagctggacttttgatgatcgttcttattattgtgtgtcttagacgcaaaaagaagagaaaagactccttctaccctgaacccatgaaaggaaaccaatatcaatactatggaaacaacaacaacaacaatgcttcacagaattatccgaattggcacctaaattcacaaggccaaaaccaacaatctactggtggttggggaggcggtggaccatcaccgcctcctcctccgcggatgcctacaagcggagaagattcttccatgtactcaggcccatcacgcccagttttacctcctccttcgcctgctctagccctcggattcaacaagagcacttttacttaccaagagcttgcggctgcaacaggagggtttacggatgctaaccttttgggacagggaggatttgggtatgtccataaaggagtcttgcctagcgggaaagaagtagcagttaagagtttaaaagcgggtagcggacaaggagagagggagtttcaagctgaggtcgatatcattagccgtgtgcatcatcggtatcttgtttctttggttggatattgcatagctgatggacagaggatgttggtttatgagtttgttcctaacaaaactttggaatatcatcttcatgggaaaaatcttccggtaatggagttctccactaggttgcgtatcgccttaggtgctgcgaaaggactcgcttaccttcacgaagactgccatcctcggatcattcaccgcgacatcaagtctgcaaatattctcttggacttcaactttgatgctatggtggctgattttggattagctaagttaacatctgataacaacactcatgtatctactcgtgtgatgggaactttcggatatctagctccagaatatgcttcaagcggtaaattaaccgagaaatccgatgttttctcttacggagttatgttattggaacttataactggaaaacgaccggttgataatagcatcaccatggacgacaccttagtagattgggctcggcctcttatggctcgcgcgctagaagatggaaactttaatgagctcgcagatgcgaggcttgaaggcaactacaacccgcaagaaatggctcgaatggtgacttgtgccgctgctagcattcgtcattcggggcgtaaacgtccaaagatgagccagatagtaagagcgttagaaggagaagtgtccttagatgctttaaacgaaggtgtgaagccaggacacagtaacgtttacgggtcattgggagcaagctcggattatagtcagacatcttacaatgcagacatgaagaaattcagacagatagctttgtcgagccaagaattcccagtcagtgactgtgaaggaacatctagtaatgattctagagatatgggaactaagagccctactcctccaaaatgagatcgaatcaatgattctgtaaagaagagattttggggctctgagagtagagcaatgtaagctttaagcaaaagcattgtcattgcttgattggttggtttttttttcatatatttttcgactaaattgtgttatgtttagatccgttacgtaatgtgtatgattcttg

SEQ ID NO: 727 - DNA, 1035 bp, Arabidopsis thaliana
  Clone ID: ARATH-23APR03-CLUSTER27296_1
ggctcgaataatacgacgacttgtaataataataccgcccatgttttcgtggcacaaatatttaatatttcggtacctacgccatcgtcttcttctactatatatagtctagacatagacaccatcaagaagaagaaaaaaaacacataccacattctccactcatggcaaaactcatcctcatcatcgtcacccaaatcctcctcatcgcagccgttgtttccgcccgtaaaggcgaaaactttgcaaaaaccattgacaaaaaacattttggcctccgtaaggagaaactcactcatttccgtgtctactggcacgacattttaagcggctcaaaccctagttcggtcgtgatcaaccctcctatctccaactcttccttcttcggatcggtcactgtgatcgataaccgattaactacggaggtcgcggtgaattcgactttagtgggacaagcgcaagggatctacgctgctactggtcaacgtgatgcatctgcgcttatggtgatgaactttgcgttcaagacagggaagtataacggaagttcgatcgcgattcttggccggaacgctgtgttgaccaaggttagggagatgccggtgattggaggaagtggactcttccggtttgctagaggttatgtcgaggctcggaccatgtggtttgatcaaaagtcaggagatgctactgttgagtacagctgttatgtcttgcattattgatgatagtgatgaattattatgcctctcttttttaatgtttgataaaatactttttgttggattttgtctgcttaaagtgatggatgatttttgggggactatgtcttttaatagattttgatacttcttttttttttgacgtgatttttgtttttgtatttgctacatctcacactaccgtttggtcttaatctaatggccaagcgagtattgaaagaggcaattcctttttaaaatatcttaatggccttaaatggacatcatcggaaaattgttttcctttttaaaaaaaaaaaaaaagggcggccgc

SEQ ID NO: 728 - DNA, 1433 bp, Arabidopsis thaliana
  Clone ID: ARATH-23APR03-CLUSTER27329_1
atccaccattcaaagctctttctctctgcaaatcttccatcatttccatagctttcttcttcttgtcatttcctttaaatctttttggttggatattttgtattttaacacttcataaagtagtcatcactaaacaacatatatacacatacaaagagatggatgctgaaaagaagagtgcccattttcgccaaatctcatcttataaaccacaattacttgtcctctcctcaatccaagaaaacccttcttcaaaaatctcagaaaaagccaatatcaaagctgacaatgacgccgagattggagttttcggagcagaaaagtacttcagcatgaagctagatcatgttgattccacggcggatatcaccaagcaacatgaaaaggaaaacacacatgatcatcctaatgctaatcctaatcctaatcctaatcctcatcctcatcctcatccccagttgacgaaaacgacgtcgtcaagatcaaaaacaagccgacacggaacgccaagtgtaagatccgagtcaagttgcaacagtcaaacctttctcatgaggattaacaaccacaatgaaaaagcaacggaaaatgaacgatacgagcatctcttttggtgggtttagatgttactgtccctgctctgggatcaaaaccgtccataccgacccaaaaaactcctgtaaaagtagaaattccgatcgggattttgttgcttacgacgcaagaaagcacaacgacaaaccaagactccattttgaagccaagaaagcggattttcatgcgcaagagaagatttcattacctattcaaaggtccgatatcgccatgaacctcgagagaaagctctctctgcttacatgggacgcaataccaaaccaactctctaccaagaacaacaatcacaacaataatggtaataactcttcaatgagtagcaacacgcaagaggaagagacagcaagtgtagcaagttctgatttgttcgagattgagaacataacgagcagtgtctatgagccgagtgaggccagcattggatggagtgtggtaacgggaagtatggcagatcaatcggtgatttcggatttcgatatgatgaagagggtcacgagaaatggtccggtggttaaaaccaaaccggtgattggtgagaaagtccggtcggctgggtttttgtcgggttgtaagagtcacaaagctgtctcggttgttgatagttctagaaaagtgaaagaaacagccaaggttgatcatcacgagatgtctcatcagaagaagtttaaaactgagattaggattcaagacttgagctttctttaataaacaatgtttgtgtatgtgtgtgttcttaattagttttcatcaaatatttttgtaatatttcttcgtgagtatgctaatgattttgataattttagtcacttggtttatat

SEQ ID NO: 729 - DNA, 994 bp, Arabidopsis thaliana
  Clone ID: ARATH-23APR03-CLUSTER27495_1
ataaagagaaaatctccaaaagcaatgaccaatgagaaatgtgaagttgctcttccactaaagttgaaatcagaaaaaccatcaatggcttcttcatcatctctctttctcctccctctccttcttcttgtctcccaagcttcagcttcaacggttatattttacaacaagtgcacgtacactgtctggcctgggatccaacctagctccggtcagtcattactcgccggcggcggatttaaactgtcgccgaacagagcttacactctccaacttccaccgctctggtccggtcgcttctggggccgccacggttgctcctttgacagatctggccgtggtcgctgcgccaccggagactgtggtggttctttcctctgtaacggagctggcggtgtacctccggctactcttgccgagatcaccctcggtcatgacatggacttttatgacgtcagcctcgttgatggatataacttggcgatgtcgataatgccggtgaagggtacgggaaagtgtacctacgctggttgcgtaagcgacctgaaccggatgtgcccggttggtctacaagtccgttcacgtgacgggacacaggtagtagcctgtaaaagcgcatgctctgcgtttaactcaccacgctattgctgtaccggcttgttcggtaacccacagtcatgcaagccaacggcttactctaagatcttcaaggtagcttgccctaaggcttactcatacgcctacgatgacccaactagcattgcgacatgttctaaagctaattatgtcgtcactttttgccctcaccgcggccgttgattaaagggattgacatctatgaataattttgcttgactatttagtacgagatcttctttttgagttatcgacccgtttttttgttttggaatttagtgatttcatcgatttgttacaaagaacatgcattatttatgcgtcttttaaaaaattagtgatgtctaattcgtttgct

SEQ ID NO: 730 - DNA, 1352 bp, Arabidopsis thaliana
  Clone ID: ARATH-23APR03-CLUSTER27498_1
tttttttttttttttttgctaacaaataaatccaaaattaaacaaaagaataatcaaacgttacaacttacaagaatcaaacaaggaaacaagaattaacaaaaggttagcctctatcattgtatggtgcatgcagccaataaatgcatttattttataactgtctataaatgcaataatttcaaactaaacatctctttctctttagttctcctatctttccaataatactcaaaaagcttacttattgtttcgttttctagcactctacaaaaatatggctccctcgtttctaagcgtcgcaagattcgttgaggcactactccgccggagattctcctccgctggtctctccttacaaaccctatccatcgactccgaaaccaccatacagttctggggaccaccaccgtcttcatcatcggaaaatacacaaaaaccgtcgctcctcctcctccatggttttggaccttccgctgtatggcaatggagccatcaggtcaagccactctctcacttctttcgtctctacgtccccgacctagtcttcttcggcggctcctcttcctccggtgagaaccggtcggagatgtttcaagcgttgtgcatggggaagcttatggagaagctcgaggtcgagagattcagtgtcgttgggacgagctacggcgggtttgtggcgtataatatggcgaaaatgtttccggagaaagtggagaaggtggtgcttgcgagctccggtgttaatttgcggaggagtgacaacgaggcgtttatcgctagggctaagtgccaccgtatcaaggaggtgatgcttcctgcttctgcaacagatcttaggagattctctgggatggtttcttctaagagactcgattatgtcccagattttgtcttgaacgacttttgccaggtatcttttttttattctcttttttaaagaaaagaacccctcgagggaatgattaaaaggttttatgccaaattcaaaaaatcttttttaaaacatgaagtaaaaaagataaggaattagcaaaaccaagttttacctttaaagatggcccatgacctcaaagagatgttggggactaaggcgacgctaaaagttatacaaaagacatcacatatacctcaaacggagaagtccaaagaattcaatggctttgtcatgtctttcttattacctccttctccatcaccataaatgtaacatccatattaaactataaattacaatttttttctgatttcgtcgatgttagaagtatttatgatgcatatgtcagttcatgatacatttgagaatatttgtaacattgttattgatgatgcatatgtcaaattagttcacc

SEQ ID NO: 731 - DNA, 2583 bp, Arabidopsis thaliana
  unsure (1)..(2583): unsure at all n locations
  Clone ID: ARATH-23APR03-CLUSTER27529_1
gaaagtcaccacgccggccatgaaacgccaagcaaaaccaccggagaagaagacgaagaggacgacaaatgcttcgtcaccaactccgtcgtcttcatctccttcgttgtcttctctcccagacgaaatcgtcgagaactgcttagctcggatctcgaggtcgtactatccaacactctcaatcgtttcgaaaagcttccgttcaattatctcatccaccgagctctatgtagccagatctcacctccgaaacaccgaagagtgtgtctatgtctgtctatctgataaaagttttgaatttcccaaatggtttacactctgggttaaccctagtcaagccaactccatggttgagaagaagaggaagaagaagaagacaattggaaagttgttggttccaattccctcttctaatctttctcctgtatcaaaatccgccatagctgttggttctgaaatatatgtgatcggcggaaaagtcgatggtgcactgtcttcggccgtgcgaatcctcgattgtcgcagtaacacttggcgcgatgctcctagcatgaccgtagcccgaaagaggcctttcatatgtctctacgatgggaaaatttacgtaattggagggtacaacaaattatcagaaagcgaaccatgggctgaggtattcgatataaagactcagacttgggaatgcctttctgatccgggtactgagatacgtaactgtaccatttacagaatagcagagatcgaaggaaagattcactttgggtatacacaaaaaacgtatgcttatgacccaaagcaaggtgaatgggaatgctgtgaaggcgaggttgcatttccgaggtcccaatgtgtgatggagagtgtattgtacacctttgctaataactacacttgggaggacgactacgggtgcaagtggtggtcaacggatggatatggggaaaaggtaaaagggttgcacccgcggtttgggggccccagggggaatgcggctaaactagttgcctctggtgggaaactcttacttttatgggaaggctacatgaagcataatcccaataataggaagaagatttgggtgcgcggttatcgcgtttacaaaaggcgtgatggaggtaaggtttggggaattgttaagtgggttcatgctctgattgtaatcacagtggctatgaactttcaagtggaaccaccggagaagaagaagttaacgaactcgtctccagcacattcacctccgtcgtcgtcatctccgtcgctttctctacttccataagtaaatcgtcgtgcactgcttagctcggatctcaagattgtactacccaacgctctcactcgtttcgaaaagcttccgctcaattctctcttccacggagctctacgcaaccagatctcacctcggaatcactgatcagtgtgtctatctctgtctatgggatcccagttatcaatttccccaatggcttagactcttagttaaccctaaccgaaccctagccaactccatcattaagaagagaaggaagaagaagaagacaactggacaaatgttagttccgcttacctcgtctaagtttacatcagtatcaaaagccaccgttgtagttggttctgagatttatgtacttggcggtccagtcgactccgccgtgcgggtgcttgattgttgcagtcacacttggcgcgatgcaccgagcatgaatgtatcccgaatgaatgcctgggcatgtttccacgatgggaaaatttacgtaatgggaggttgccaaggattaaaggacgaaccatgggctgaggtgttcaatacaaagactcagacttgggaaggcctccctgagccgggtagtgaggtacgtaagtgttccattgacagaagcggagtgattgaaggaaagattgagtttggaaatgtaaacgagatgtgtgcttacgacacgaagctatgtaaatgggagtattgtgtaaacaaaagtgcagctttgaggtcagaatgtatgattgagaatgtttcatatggcttctggaacatgcgcttgttgtggtatgacaatgacatacaaaaggattattggaaaagattggaagggttagagtcactagatgataagtacatgaggaatggtggctcaagtggtaatacgactaaactagttgcatgtggtgggnaaacgcttacttgtatgggaaggagatatgaagcataaccccaataataggaagaagatttggtgtgcggtgatcgcgatagagaagtgtgatggaggtggagtttggggaattgttgagagtgttgatgttttgtatactgtccccatatcatgtcagctcttgcattgtctcgttgtctcggtttgattgacttgtattcaggtatgancagttcaaaatcagtttntaggatctaacngtagtatnacanagtatgaacgatggattgttgaccagttggatagaggagaaggaatcagaggcaagaggagagcaacaaagtgtatgagantaattagttaaggttaagaggcacattttgtcaaactagctactatggcatattagtgtttgtctaatcccttgttantaatg

SEQ ID NO: 732 - DNA, 597 bp, Arabidopsis thaliana
  Clone ID: ARATH-23APR03-CLUSTER27549_1
aaagagacataaaacaagaatcttatcttctggtcaagagagagatgagctccataagccaaagcattctcatggctttaacagtaactgttaacaaatatgcttcttccaatgttcaagctgtacgcagaaacgataccaaacgccattctttaactgctccacccgctgatttaggacgcagaaacattctcttctcctccacgtctttcatcgccgctgctttgaccagcagcgaccagcttctccaaaagtatttgaagaagactgaggaaaacaaagccaagaatgataaggagagattggacagtttttacaagaggaattataaagactactttgagtttgttgaaggatctataaagggaaagacagaagcggagctcagtgaatctgaaaaacggattctggaatggctcaaagccaacaaatgattatgatgaattgatgatgatgatgataaattgataatgatgataagtttttgtttgtctatgaaacttttttttaaaaagggctgctcagtaatttatatatcttgctctgtatatgtttttgttgaatcggttttgcttttctcaacaaactttattttcg

SEQ ID NO: 733 - DNA, 2306 bp, Arabidopsis thaliana
  Clone ID: ARATH-23APR03-CLUSTER27703_1
acacttttctctcccaaagaaacaaaaaaaaaaactcttaagctagaacaagtttaaaactcttcgctcagttttcgatctatctaacaaaagcatacatgactacgccggagggggcgatgtatgtggcgtggaaggatcttacggtggtgataccaaacttcggtgaaggagcaactaagagattactgaatggagtgaatggttgtggtgagccaaataggatcttagctattatgggtccttcaggttcaggcaaatctacgcttcttgatgctttagcaggaagattagcagggaatgttgtaatgagtggcaaagtacttgtcaatggcaagaagagaagacttgactttggtgctgccgcttatgtgacgcaagaagatgtgttgctaggaactttgacagtgagagaatccatatcttactcggctcatctcaggctcccttcaaagcttaccagagaagagatcagtgacattgtggaagctacaatcactgacatgggtcttgaagaatgttcagacaggaccattggaaactggcatttgcgtggaataagcggaggagagaagaaacggcttagtattgccctcgaggtcttaacaaaaccaagtctcctctttctagacgaaccaactagtggactggacagtgcttcagctttcttcgtggttcagattcttagaaacatagcaagcagtggcaaaactgtggtttcttcgatccatcagccgagtggtgaggttttcgccctctttgatgacctgctacttctgtctggaggagaaactgtttactttggcgaagcagaatctgcaacaaagttctttggtgaagcaggttttccttgtccaagtagacggaatccatcagaccacttccttcgctgtgtcaattccgatttcgataatgtcacagcggctttggttgaatctcggagaatcaacgattcatctttctctcttcaccaactacatgaaactacaaacacattagatcctctggatgatataccaactgcagaaattagaacaacacttgtcagaaaatttaagtgttcactttatgcagcagcttcaagagcaagaattcaagaaatagcatcgatagtggggattgtcacagaaaggaaaaaggggagccaaactaattggtggaaacaactcagaatacttactcagcgatctttcatcaacatgagtagagacttggggtactactggatgcggattgcagtctacatagtgttatccatttgtgtcgggtcaatcttcttcaacgtcgggagaaaccacacaaatgttatgagtactgcagcttgtggcggatttatggcaggctttatgacattcatgtcaataggaggattccaatccttcattgaagaaatgaaggtgttttctcgcgaaaggctcaatggacactatggggttgcagtatacactgtgtctaatttactctcctcattacctttcataatccttatgtgcctctccaccagctcaatcactatctacatggtgaggttccaatccggaggttctcatttcttctacaactgtctcgaccttatctgcgcgattacaactgtggagagttgcatgatgatgatagcttcagtagtccctaacttcttgatgggagtcatgttgggagctggttacattggaattatggtgttaagtgcggggtttttccgattcttccccgacttaccaatggtgttctggcgatacccggtgtcctacataaactatggtgcatgggcactacagggagcatacaagaatgagatgattggggtggagtatgattctccgttacccttggtaccaaaaatgaaaggagaactcattcttcaaactgttctaggcataaatccagaaagttcaaagtggttggatctagcagttgtgatgatgattctcattgggtataggattgccttcttcgccatcctcaagttccgggaaaaggttttcccagttattcacatgttatacacaaagagaactctgagccatatccagaaaaggccttctttcagaagaatgacacctttcccttccaggcgataccctgttcaccatgctctctcttctcaggaaggacttaactctccactgcattagaagcatatacagcaggatgcaatttccatatatttcaatatgtcagatgtcactctcttcaaacttgataaactgtttgtagcccgttgtgtaaggaaaaaaaaaagaaaagagagatactatcattctgactaatgagatttgtttagcaaaaaaaaaaaaaaaaaaaaa

SEQ ID NO: 734 - DNA, 2126 bp, Arabidopsis thaliana
  Clone ID: ARATH-23APR03-CLUSTER27705_1
gataaacaagtgaaagaaaaaagtcgtcgttcttccaatttttttctcctctctcttcctctgtttaacggcgtacgtaagtcaaaatgggttcaagtaagctaaaacgtgccataggagccgtgaaagatcaaacaagcgtaggattagccaaagtcggtggtcgaagcagttctttaacggaactcgaaatagctgtcgtgaaagcgacgcgacatgatgactatccagcggaggacaagtacattagagagattttatgcctaacttcttactcacgcaattacgtaagcgcttgtgtggcaactctctcgcgacggctcaacaagaccaagaactggtcggttgctctcaaaaccttgattttgatccaacggttgctaacagatggagatagagcctacgagcaagagatcttcttcgcgacgagacgaggaacgagattgcttaacatgtctgatttcagagatgcgagtcagtctgattcgtgggattactctgcttttgttcggacttatgctttgtatttggatgaacgtcttgattaccggatgcaaggaagacgagggaaaaaaaaaagtggtggtggtggtggcggtgatggtgattccggcgaggaagatgatcatcgagggacaagcaacgatattcggtcgaaagctattgtggttaaatctaaaccagtcgcagagatgaaaacagagaaaatcttcaacagagtacaacatttacaacagcttcttgatcggttcttggcttgtcgtccaacaggtaatgcgaagaacaacagagtggtgattgtggctatgtatccgatagtaaaagagagttttcagttatactacaatataacagagatcatgggagtattaatagagcgattcatggaattagacattcatgattccatcaaagtctatgaaatcttctgtcgagtttctaaacagtttgacgagttagatccgttttacggatggtgtaagaacatggcagttgcaagatcttcagagtatccagaattggaaaagattacacagaagaaacttgatctcatggatgagtttataagagataaatcagctttagctgcacaaacaacaaaatcatcatcaaaaaggtctaacaaatctgaggaggaggagagcaaaacagagtatattcaagaaaatcaagaagatttaaactccatcaaagcattacccgcaccggaacagaaagaagaagaggaagaagaagagaaaatggaaacaaagaaagatgttgaagaagtggtttcaagacaagatcaagagggtgatttgctggatttaacagatgaagcgggtgtaacggcaggaacggttggtgatagtttggcgttagcgttatttgatggtgtcgttgggaccgagagtgcgtctggaccggggtggggagcgtttaacgataattcggcggattgggagacggacttggtgagatcggcgacaagattgtcgggacaaaagagtgagctcggaggaggatttgatactttgttgcttgatggaatgtatcagtacggtgcggttaatgctgcggttaaaacgtctacggcttatggaagtagtggaagtgctagtagtgtggcttttggttctgcaggaagcccagcagcctcgatgttggcattgccagcgccgccaccgacagccaatggaaacagaaatagtccggtgatggtggatccattcgcggcgtcgctagaggtagccccaccagcatacgtgcaaatgaatgatatggagaaaaaacaaagattgttaatggaagaacaaataatgtgggatcaatacaacagaagtggaagacaaggtcacatgaatttcggacaaaaccaacaacaacaatattatcagcttccatactccatgggaccttactcttacacgcctcgctattgatattatataaataaacaatcaccattaatgaagagcttgaaagaaaggtgttagcttcttttttgttgtccctctaacattgtaaactcttctggtcactatttgtgaacaacacctatgatattattattatcattatcacttctttacattttttcaaaaaaaaaaaaaaaaaaaactcgagggggggcccggtacccaatt

SEQ ID NO: 735 - DNA, 2640 bp, Arabidopsis thaliana
  unsure (1)..(2640): unsure at all n locations
  Clone ID: ARATH-23APR03-CLUSTER27723_1
gcaccaggnagnagnagnagagnaggaggagnagnagagctcactagtcccccccccccccccgcactctattattgtgtgttgaacagtgacaaagaaagagagagagagctttgctttgcagaaaaaaatgcagaacttttggttcgccatcttcttcttcctgctaacatgcgcaccaccgtctcctttatcctacgcatccaccgtaactctcagccgtcgtctcctctatgactatgaatcacctcttcctcttcctctatcccccattagccctcctttcttccctcttgaatcctcccctccttctccacctcctcctcttccgcctactcctccgacaactttcgccgtctttccaacttttccggctaatatctccgccttagtcctccctcgctcctctaaaccacaccacacttcacctacacttctcctcccagctctctccgccgttcttgtcattgctacagtcataggcttagccttgtttctctacggccgccaccgagggcaaactcgtcatttaaagaactctcattgttctagtagcaacacaagcagctatggtgatgaacagagtcatatcaccactaacttcaacatggctgctactacttctccttcagaagttttttacctcaatacagaggaatctgaccatattagaaccggaggtacttttttcttgaagcaagactcgccggagatacgaccattaccaccattacctcctcgtagcttccaccataacaactatgaaacagaggtaaacgaagaagacgaagaagaagaagaagatgtgttcttctcaccaatggtttctctccctggctcagcgaactcaagcccttctcattcatgctcttcctcctgctccggttgggtttctccagctaggtcattctctatcaccatgtctccaccaaaccctagatactcagacgccactaacctccagtctccgtcaccggagagactaagagtaaggaagaactataacggaaatgggtcgtcttctctaagaatgtttagcttctggaatcaaaatatgggatttgggtttcctcgtatctcctctgcttctacttcaccagacagaggattcataagaacaccactttcgtctctctactcttcagtttccacttctcctgatgggttattccggaagtttctcgatagttcgccgccgatttggaatgactttagtcggaatgtgaagtctgttttgctctctcacactgcgtcatcaagaagagattttgttatcaacattggtgaatcttcttctcaacagagcaaagttcctgctcttcctcctccgaccagaccacctcctcttgttccaccgtctcaaccttttgtggttcaaaatgatgtaaaaaagcaatctttttcagaccaacctcccaaacagctgcattgggaacgtcttagatcgagctcttctaaattgagcaaagagatggtagagactatgttcattgcaaactcgtcaaatccaagagatcttccgattcaaaatcaagttttagatccaagaaaggcacagaatattgctactctgcttcaactacttaacttaagcactaaggatgtttgtcaagctcttcttgatggtgactgtgatgtacttggagctgaacttcttgagtgtttatcaagattagcacctagtaaagaagaagagaggaagttgaagagctttagtgatggttcagagattggtccagctgagaggtttcttaaggaattgcttcatgtgccttttgtgtttaaacgtgttgatgcattgctttttgtggctaatttccattcggagatcaaacgtctcagaaaatcattcagtgttgttcaggttgcttgtgaagaactaagaaatagtagaatgttttcgatacttcttgaagctatactgaagacaggaaacatgatgagtgttagaacaaaccgctgtggggatgcggatgccttcaaactcgacacgctcctcaagctcgttgatgtcaagggattagatggaagaagcagtctcttgcattttgttgttcaggaaatgatgaaatcagaaggcagtgtgagagctttagaaggcatcagaaacctgaatacagaactgagcaatgtcaagaaatcggcagacattgagtatggtgtactaagaagcaatgtgtcaaggatttgccaaggactcaagaacattgaagcgcttttgctacttagcgaggagagtggttcatatggagatcaatggctgaagttcaaggagaggatgacccggttcttgaaaaccgctgcagaggagattgtgaagattaaaatacgagaaagttcaacgctctctgcattggaagaggtcacagagcagttccatggagatgcttccaaggaaggtcacacaatgagaatcttcatgattgtgagagacttcctgtctgttctagaccaagtgtgtaaggaaatgggagactgattcccattgtaagatttttaatgtaatgattaggaacgcatctctagtttcattgtattgtaaccagtatgactaacgccatttctggataattctgtatgagtttttggaagacaattcattaggttttgatgctatgattctaattttgatgctttaac

SEQ ID NO: 736 - DNA, 4157 bp, Arabidopsis thaliana
  Clone ID: ARATH-23APR03-CLUSTER27781_1
atgagagggaggatttgtttcttcgcatgtgtgctgcgctctccctgcgccctcaccttagctagctccttaaacggagaggggcgtgttcttccggtgggcgcagctgtccttctcggctccttcgccttcctcgcaggctggtccctgttcgattcaaggccctgcttctgctccggtttcgcgcgttcccttctcactcctgtggcttccgcgcatcgtctggggtcggttcgatccggttccctgcctccgctccggtgccgcctgcacggttctcggaactggaacgtctcctccctcttcgtcgctggtccactccctcccgttttatctctctgtcgaagtctagaggttcttgatctctgcacaaataggttccacggtgccccccccatccccccacccgcgggcatcccgctccagaagctggagcgaggcgaggttcatctttcccccccccccccgagtgataccaattcagctaaccatgatcatcactcttaagaagctgtatctatgcgagaattatcttttcggttctatccctagacaaatcggtaatttgagttcactccaagagcttgtgatctacagcaataatctcaccggtgtaatccctccttccatggcgaaattgagacagctccggatcattagggcaggacggaatggattctcgggtgtgattccgtctgaaatcagcggatgcgagagcctaaaggtacttggattagcagagaatcttcttgagggttctcttcctaagcagctcgagaagcttcaaaatcttactgatttgatactctggcaaaaccgtctatctggtgagatacctccttccgtaggaaacatcagcagactggaggtgcttgcgctgcatgaaaactacttcacgggatcaattccaagagagattgggaagctcacaaagatgaaaaggctgtacctttacacaaaccagttaaccggagagatacctcgcgaaataggcaacttgatagatgcagctgagatagatttttcggagaatcagttaacaggtttcataccaaaagagtttggtcatatcctgaatctcaaattacttcatctttttgagaacattcttctaggtccaattcctagggagcttggggaattgacactgttggagaagctagacttgtctatcaatagactaaacggtactatcccgcaagagcttcagttcctaccttaccttgtagatttgcagctttttgacaaccagcttgaagggaagatacctcctttaatcggtttctatagcaatttttctgttcttgacatgtctgccaattctctgtctggtccaattcctgcccacttctgcagatttcagacgctaatacttctgagtcttggttcaaacaagttatcaggaaacatccctcgtgatctgaaaacctgcaagtcactgacaaagctaatgctaggcgataaccagctaacaggaagccttcccattgaattatttaatcttcagaaccttactgcattagagcttcaccaaaactggttatcagggaatatatctgcagacctgggaaagctgaagaatttggaaagactgcgtctagctaacaacaattttactggtgaaattcctcctgagattgggaatctcacaaagattgttggctttaacatctcctccaatcagctcactggtcacatccctaaagagttgggaagttgtgtcactatccagaggcttgaccttagtggcaacaagttttccggatacatagcacaagagcttggtcagttggtatatttggagattttgagattgtctgataatagattgaccggagaaattcctcatagctttggagatcttactcggctcatggagttacaactaggaggcaatctcttgtctgaaaacatcccagtggagctcgggaagttaacctctctgcaaatctccctcaacattagtcacaataatctctcaggtactattccagacagtttaggaaatctacagatgttggagatactttacctcaacgacaacaagctttcaggtgagatccctgcatcaattgggaatctcatgagcctcctcatctgcaatatctcaaacaataacctggtcggaacagtaccagacacagccgtgttccagcggatggattcatcgaactttgctggaaaccatggtttgtgtaactctcagagaagccattgtcaaccacttgtcccacattctgattcaaagctaaattggttaatcaacggttcgcaaaggcaaaagatcttgacaatcacttgtattgtaatcgggtcggtttttcttatcacttttcttggtctctgttggacaataaagcggcgggaaccagcgtttgttgcacttgaggatcaaacaaaaccagatgtcatggacagctactatttccctaaaaaaggtttcacatatcaaggcctcgtggatgcaaccagaaacttttccgaagacgtggttttagggagaggagcttgtggaacagtctacaaagctgaaatgtcaggtggcgaggtgatagctgtaaagaagctgaattctcgcggtgaaggagctagttctgataatagtttcagagctgagatatcaactcttggaaagataaggcaccggaatattgtgaagctatatggtttctgctatcaccagaattcaaatcttctcttgtatgagtacatgtcaaaaggaagcctcggcgaacaactacagcgaggtgagaaaaactgtttgttggattggaatgctcggtatagaatcgccctcggtgctgcagagggtttgtgttatctccatcatgattgcagacctcaaatagtccatcgcgacataaaatcgaacaacattcttcttgatgaacggttccaggctcatgttggagattttggcctggctaagttgattgatctctcttactcaaagtccatgtcagctgttgctgggtcttacggatacatcgctccaggtgagtaaaacatcacagttttctttcttcccacaatcgcttatctaacatatctaattgatgttttgctgtgtttcagaatatgcttacacgatgaaggtgacagagaaatgtgatatctatagctttggagttgtgcttctggagctaataacaggaaagcccccagttcaaccgctggagcaaggaggggatctagtcaattgggttcgacgatcgatccgtaacatgattccaaccattgaaatgtttgatgcgaggctagatacaaatgataagagaacagttcatgaaatgtctcttgtcctaaagattgcactgttctgcaccagcaattctccagctagtagaccaactatgagagaagtggtcgctatgattacagaagctcggggatcaagtagcctttcttcctcatccattacatcagaaactcctctagaagaagcaaactcctccaaaggtatgtatctacacatacacacacacacacacacacttctctgcaatttccgaactttttgcgattctcatatgaacatttcttgctattctgcagaaatttgactttgtcgcatcaccttgaagtcagcaaataaatccagttcagtcatacagttgaaagtagaaatgttgactcttatcacttgagtctctaatgatatctgcagttatcacgtaaacaaacacattgttcagaaacattgcagaacatgtaaatcattgtttcaactattttgcaacagagtccaagatcagataagcagcttaaaatgttttttctcttaaaataaaatatcttgataagttctgttttagcagatcgctttcgtaacaatctattaggattaagagggaaaaaaaatccataaacgtatcttcctagaaacttcgttactcttgataagctcgttgacatacattgaaccataaacaagcttacttctccaacaaaatagaagaacacaaaaaaagaaaaaaaaaagaaaacttgaaaccgaagttaagtgttgatttttgctaaaacaaaatcttctgtatcgatagaataaaaatgagcaaatgtgtataatacttcatagttgtacggcgagattacctcaagcgcaaaatcttcaaattgagctaaaacaagaccaagttcaggcttccttcaaatcc

SEQ ID NO: 737 - DNA, 2023 bp, Arabidopsis thaliana
  Clone ID: ARATH-23APR03-CLUSTER2778_1
accacacaacacaaaacctccaaacctataatcagaacacagtgagatatttctctctgaagccaaagatggaaacggcgtcctctaatttctctctctcgcagatccccaatattcagcaaccctacagctccctgatcctcggtgctggccctcccaccacacaacacaaaacctccaaaccaataatcagaacacagtgagatatttctctctgaagccaaagatggaaacggcgtcttctaatttctctctctcgcagatcctcaatattgaggaaccctacagctccgtaatgctcggtgtcgccgctctcttggccgttgtttgctatttctggatacaggggaagtccaaatccaagaacggaccaccgttgcctccgggaccttggccacttccgatcgtcggcaacctcccgttcctaaactctgacgtcctccacacgcaattccaagccctaaccctaaaacatggccctctcatgaagatccacctcggttccaaacttgcgatcgtcgtctcttcccctgacatggctcgcgaggttctcaaaacccacgacatcactttcgccaaccacgatctccctgaagtcggaaagatcaacacttacggtggtgaagacatcctctggtctccttacggtacccattggaggagacttcgtaagctctgcgtcatgaagatgttcactaccccaactctcgaagcttcctactccactcgccgggaagaaacccgacaaaccatcgaccatatgtagggatatggctagtgatggatatttctttcccctcggtgttgagataggatttccaaggtttggtgaagcagctcaatctcttgttcgagagagttaagctcttgcatgacagagtgatggagagtcacggcaaagaggtggaaaagatgatagaaagaataagaagatttcatgcaattcataattagacttatatatgatggtgagaaagcatcttctgtctctgagtcatggttagtctctcctcaggcatatggttctaggtggtgtcgacacatcggttaacgcatccgaattcgccatggctgagattgaaggcagaccgagagtgtgaaacaagatccgactagaacttgaccaagttgttggcaaattacaacatcgttgaggaatcacatttacttaagcttccttacctacaagcggttatgaaagatactcttaggcttcatcacacactccctcttcccgtggcggagattgtaaacagaccgcaagtggtatacaagatccgactagaacttgacgaagttgttggcaaagacaacatcgttgaggaatcacatttacctaagcttccttacctacaagcggttatgaaagagactcttaggcttcaccttacgcttcctcttcttgttcctcacagaaacagcgaaacctcggtggttgcgggatacactgtgcctaaagactccaagattttcatcaacgtttgggcgattcatagagatcctaagaattgggatgaaccaaacgagttcaaacctgagaggtttttggagaattcgcttgatttcaatggaggtgattttaagtacttgccttttgggtcaggaaggaggatttgtgcggcgattaacatggctgagagacttgttctgttcaacattgcttcacttcttcactcttttgattggaaagcacctcaaggacagaagtttgaggttgaagagaagtttggtcttgttcttaagttgaagtctccacttgtggctattcctgttccaaggttgtccgatccaaaactctatacagcttaagtaagtaagaaggaaatttggtttgagcttatgagaggaagttgaattgagttttcttgtttaaagtttatttttctttattcgtgtttggagtttgatgctttgtaaaaaaagatgtgtcaagttaaatttaattttcttatatataataaaataaagttttagtcacaataaaaaaaaaaaaagggcggccgcgccgctctcaggatcagct

SEQ ID NO: 738 - DNA, 2183 bp, Arabidopsis thaliana
  Clone ID: ARATH-23APR03-CLUSTER27818_1
attcttttttggaatcatctcagttattacacctcagttactgtacggacgaatgtggttgcttctaaagctcagattctacttgatctagtacatcgtcttctactctagatttttcctataagctcgcttcagaaattgagggacaagatggttggtgtatttaatatcatctgattaagaaggagaaacttgtttttttggcgataaagatagaaaagaacttggcttttgttcttctctctggttcaacaaaagaattcaaaagagaagaaaggatgatgctgatgagaagaaggttggcttgctgtagcagggagagggagattagtatcgatttcgatgaacatgaacaagataaaatgattacatattatggcttggaaacttgtattatcaataatcaatcatatgaagaagagagtggaacaagtcgaggagatggatgtcttacagattcgttagatgatgatgcattttcaagctgttcatcaagcaaagatgcctctagctctttttcttcgaaatggttaccgatgaagaatgatgaacacagttgcgatggtttgaacttatctggaaggtctcaacattttgatgctaaggagaagaagaaacaaggctatggcagtagccaacattttgatgctaaggagaaaccagggtatgtgtactgtcatttggatgtggaagctatgaaggagaaattttctaagttattgctcggcgaagatgtcactgggggatgtaagggtgtccaagtagctttggctttgtcaaatgctgtaacacatcttgctacgtcgatttttggcgagctctggaaattggaacctttgtgtgaagagaagaaacagaaatggagaagggaaatggattggctactttctccaactaactacatgattgagttagtcccttctaagcaaaatgatgccaatggaagatcacttgagataatgactccgaaagcccgcgcagacattcatatgaatctcccagctcttcagaagttggactcaatgctaattgagacactggattctatggtgaacagagagttttggtattctgagattggtagtagagctgaagggaagaacaagagtacaagtgagagcaaacgatggtggcttccatcgccacaagtgcctaaacctggactctctaactcaggaaggaagaaattgcttgacaaaggaaaagttgtttatcaagtcttcaaagctacaaaagccataaacgaaaacattcttcttgaaatgccagttcccattgttatcaaggaagcaatacctaaatctggaaagaacagcctcggtgatgaactgtacaagatgttggctgtggaatctgcaacagtagatgaaatctttatatcgctcaatctgggaaccgaacatgcagcactcgagacagttaacaagttagaatctgctatgtttgcttggaaagaaaggattacagaacaaggcagcaatggtaaatcccctgtaagagcatcgtggtcattcgctaaagatccgttgtctgaaattggtcgcaatgagtcactcttgaaccgagcagaagcgcttagaactcagatcaaatccaaacaccctaatctccctcactcgtttcttgatgctacaaagatccaatatgacaaggacataggtcatgcggttctcgaagcatattcccgaacacttgcgaatctagctttccggattctttcaaggatgggagaaatcttgaaagaagattctttaagcaaccctaactctcctgcaccaccgagttgcttccctagctcccgtgacccttataggacacctgagagacctctgctttcgtcccgtgtaaggcattctttaaccgatgacatgaacaaagccgatgggacagagactggtttagattttttgtttgcagatgctaaggcaagtaattcagtgaatacaactccaagtagaagcagtagactgtggtgtttgagtaaagtgccttctgatacttctccttgatttagagggtcttcctagttcgatgcgtgccacctgaagcttctcctttactttgaaggttttaaattatgaagcctgagatgttgtaaatgtattaacatattgcagttaaagtacgaattcatacaattttgttcataacttcacggtgaaaaggcaaatttttaatccggg

SEQ ID NO: 739 - DNA, 1066 bp, Arabidopsis thaliana
  Clone ID: ARATH-23APR03-CLUSTER27819_1
ggaccaaacaaacgtgtgtcttcctcgtctcactgcctccaccgccgccggcgaaatcaatcgtgtctttctctaattacagtagtcaacaatggtgaaccaaaggagaagacttgcgcagaagcgatacaaggaagctaatccagagctgtttccaaaagcagaaccaacgccaccaaaggaccctaataagaagaagaagaagaaaagcttgttcaagaaaaagaaacctggatcttccactgatagacctcagagaacaggctcttccacaagacatcctcttcgagttcctggtatgaaacctggagaaggctgttttatatgtcattccaaaacccatattgctaagctttgtcctgaaaaatctgagtgggagagaaacaagatatgcttgcaatgtaggaggagagggcatagtcttaaaaactgccctgaaaagaacaatgagagctccgagaggaagctctgttacaattgtggagatactggtcattcactttcccattgtccttaccctatggaagatggagggaccaaatttgcaagttgtttcatatgcaagggacaagggcacataagcaagaactgtcccgaaaacaagcatggaatctacccaatgggcgggtgttgtaaagtgtgcgggagtgtggcgcatctcgtcaaagactgtcctgataaattcaaccaagagtcagcccaaccaaagaagacttcaagatttgatgctacaccaagaggaaagctcactaagtttagtggggacgatcttgaagacgatttcactgaagagcccaaaagcagcaagaagatcaatacctctgatgattcagctcagaatagtgtcgaggtgaagaaaaagaaacaaggtccaaagattgtcaatttcgttggatgatcacaagaggatcgaaaagggtcatcaattttgtaggatatatcaaaagttttgttttctaatctcccttttagtcttgtgtaagaacaaaaaaatcctagttattcagaacaatgctatgtaatggaaccacacagccaattctgtttcagataatcttctaaaccg

SEQ ID NO: 740 - DNA, 2415 bp, Arabidopsis thaliana
  Clone ID: ARATH-23APR03-CLUSTER27859_1
atgtggatgttgaagataggagaagggaacggagatgatccctacttattcactactaacaacttcgccggacgacaaacatgggagtttgatcctgacggaggctcgccggaggaaagacactccgtcgttgaggctcgccggattttctacgacaatcgttttcatgttaaagcaagcagcgatctcttgtggcgcatgcagtttctgagggagaaaaagtttgagcaacggatagctccggtgaaagttgaagactccgagaaggtaacctttgaaacggcgacgagtgcattacggagaggtattcatttcttctcggcgttgcaggccagcgacggtcactggccggcggaaaatgccggccctttgtttttccttccgccactggtgttttgtctttacataacgggacatcttgatgaagtgttcacttcagaacatcgaaaagagattcttcgatacatctactgtcaccagaaggaagatggtgggtggggattacacattgaaggtcatagcacaatgttctgtaccacgttgaattacatatgtatgcgtatacttggagaaagtcctgatggaggtcatgataatgcgtgtggacgagcccgggaatggatccttagtcatggtggtgtcacctacataccttcttggggtaaaacttggctttcgatacttggtgtatttgactggtctggaagcaacccaatgcctcctgagttttggatcctaccttcttttctttcccgggcatccggcaaaaatggggagctactgccggatggttttacttgccaatggcgtacctctacgggaagcggtttgttggcccaataaacgtctctgattttgcacctacgccaagaactggactttcagccctttgttgatatcaaccgcggggggggcccccagccttgtgcttaggaagcgacatattttccccgtcctccggttcccgcgtgggtttgggactgtctttacgtctctccggtgcctttccttgctcccgggccccttatctcgcttcttaggggtacggctcttcaattggcaatgaaacacatacactatgaagatgaaaatagtcgttatatcaccattgggtgtgttgaaaaggtactatgcatgctagcttgttgggttgaagacccgaatggggattatttcaagaagcacctctctagaatctccgattacttgtggatggctgaagatgggatgaaaatgcagagctttggaagtcaactatgggatacagggtttgcgatgcaagctttacttgcaagcaatctctccagtgaaatctctgatgtactcaggagaggacatgagttcataaagaattcacaggttggagagaacccttcaggtgattacaaaagcatgtaccgtcatatttcaaaaggagcatggactttttctgaccgagatcacggatggcaagtttcagactgcacagctcatggcttaaagtgctgcctgctgttctcgatgttggcgccggatattgttggcccaaaacaagaccccgagagactacatgattctgttaatatcttgctctctttacagagcaaaaacggaggtatgactgcctgggagcctgctggtgctcccaagtggttggaattgctcaatcccacagaaatgttttccgacattgtgattgagcatgagtacagtgaatgtacatcgtctgcaatccaagcattgagtcttttcaagcaactctaccctgatcacaggacaacagagatcaccgctttcatcaagaaagctgcggaatacctagaaaacatgcaaacacgtgatggttcatggtatgggaactggggcatttgcttcacgtacggtacatggtttgctcttgcaggcttagcagctgcgggtaagacttttaacgactgtgaggcaatacgcaaaggcgttcagtttcttcttgcagctcagaaagacaacggaggctggggagaaagctacctctcttgctccaaaaagatatacatagcacaagtaggggagatatcaaacgtggtgcaaactgcttgggctttaatgggtctcattcactctggacaggcagagagagatccgattcctcttcaccgtgctgcgaaacttatcatcaattcacaactggagagtggagattttcctcaacagcaagcaaccggagtgtttttgaagaattgcacattacactacgctgcatatagaaacattcatccgttgtgggcactcgcagaatatcgcgcgcgagtttcgttgccatgacgacacttttcataaacttttctttatatcagagaacatgtgaatttattaacctatcatcagtctattacaagaattcgtgtatgcgatatgtcaatgtttttagtcaatgttttctttttgtgtaccgtc

SEQ ID NO: 741 - DNA, 1479 bp, Arabidopsis thaliana
  Clone ID: ARATH-23APR03-CLUSTER27889_1
atataacccatctctcaattttcgaaatttataaacacataaaccctttgattctaatataaccataacccatctctcaattttcgaaatttactcagaaatgttgaagctttcgtgtaatgtaactgacgatatacacatccttttctcctaaagaaggaacctttacgggcaattctctctgctgatcatggaaacagcagcgtccgtgttgctgatacatgtttccggtacttctccggcggatcgtctccggtttggtcgattgatggaagatgggttttcttataaggagaagttcattgttagaagctatgaagttgggattaacaaaactgccaccattgaaacaattgctaatctcttgcgaggaagtggcatgtaatcatgttcaagaatgttggatgtacacaattggtaatctcttgcaggaagtggcatgtaatcatgttcagaatgttggattttctactgatggatttgctacaacacttaccatgaggaaattgcatcttatttgggttactgcaagaatgcatattgagatttacaagtatccagcttggagtgatgtggttgagattgagactttgtgattgagtgaaggaggcattggaactagacgtgattggattttaaaggattgtgctactgggattgtgctactggtgaagttattggacgtggtgatgatgaaccaagacacaaggcggcttcaaagggttacagacgaagttcgggacgagtacttggttttctgtcctccagagcctagactagcgtttccagaggagaacaatagcagcttaaagaaaatcccgaaattggaagatcctgctcagtattctatgcttgggcttaagcctagacgagctgatcttgacatgaaccaacatgtgaataatgttacctacattggatgggtccttgagagcataccgcaagaaatcatagacacgcacgagcttaaagttataactctagattacagaagagaatgccagcaagataatgccagcaagatgacattgtagattcacttaccacctctgaaacccccaatgaggtggtctcaaagcttactgggacgaacggatctaccacgtcaagcaaacgagaacacaatgagagtcacttcttgcatatcctgaggttgtcagaaaatggtcaggagatcaatcgtgggagaacccaatggcgaaagaagtcatcaagatgagtttctttacacttctcttgtatcagtgaagttattttgcttcacgtttgtagttgtattgtgtatcctctgatcagatctctttttgggattagatgaaattgaattatcggtgtagtgttgtgttactgtgtttgcatgtgtttttttgttcgttctgtccaaattttgggctttaagccaaaacatttcttaggtctttatctttcgctgcttgtatctatcatcaactctataggtaaaaagagttttgttcatcc

SEQ ID NO: 742 - DNA, 3377 bp, Arabidopsis thaliana
  Clone ID: ARATH-23APR03-CLUSTER278_1
gatccggaaccaaagaaagaaactgtgtggtttcatgatggcacctttggtttctcttcttcattgaagggtcgaatttggtctgagaaaagaagagtggagagagagaaagagaagaggcaagagccccacaagagagacatgcttgtctgtgtagtccctattttgtatgttctttaatctctcccactctgtttttgtcatgtgtaagggttttgtccttcgattttggagtcttctttaaccaaaaaaaaacagattccatgaaatggctttgtctttaattcctctggtttgtcctggatttatcttcttgtagcctctttgctcaatagagctctttttgtctcttcttgtattaaataaaataaaatgaagacttagtaaagaaaaagaaaaactcttgagtcttgctaaagcctagttagtgttgagtgtgggagagacaaaacagaacattgaaaaatctctctgtatgatggcttcattgtcttgtgttgaagacaagatgaaaacaagttgtttggttaatggtggaggaactataacaacaacaacatctcaatctaccttgcttgaagagatgaagctgttgaaagaccagtcaggtacaagaaagccggtaataaactcggagctatggcacgcttgtgcaggccctttggtgtgtctccctcaagttgggagcttagtgtattacttctcacaaggtcatagcgagcaggttgctgtttcaaccagaagatcagcaacaacacaagttcctaattatccgaaccttccatctcagttgatgtgtcaagtccataatgttactcttcatgctgacaaagacagtgacgaaatctatgctcagatgagtcttcaacctgttcactctgagagagatgtgttccctgtaccagactttggaatgctgagaggaagtaagcacccgactgagtttttctgcaaaacacttactgcaagtgacacaagcacacatggaggtttctcagtgccacgtagagctgcagagaagctatttccaccattggactactcagcacagccgccaacgcaagagcttgtagttcgagatcttcatgagaatacttggacatttcgccatatctaccgagggcaaccaaagagacatctcctaactacaggatggagtttgttcgttggatcgaagagattgagagctggggattctgttttgttcatcagggatgagaagtcacaacttatggtcggtgttaggcgtgccaatcgccaacaaacagcacttccttcatcagttctctcagcggatagtatgcacatcggtgttcttgctgctgctgctcacgcaaccgccaaccgtactccttttttgatattctataatccaagagcttgtccagcagagttcgtgatccctctagctaagtaccgtaaggcgatatgcgggtctcagctctcagttggtatgagatttggaatgatgtttgaaactgaagattccgggaaacgaaggtacatgggaactattgttggaatcagcgatttggatccgttgagatggcctggttctaagtggcgtaaccttcaggtagaatgggatgagcctggatgtaatgataaacctactcgggtcagtccatgggatatcgaaacacctgaaagtctcttcatttttccttctctgacctcaggactcaaacgtcagctccatccatcttactttgctggtgaaactgaatggggtagcttgataaaacggccacttatacgtgttcctgattccgcgaatgggattatgccatatgcatctttccctagtatggcttcggagcagcttatgaaaatgatgatgaggcctcacaacaaccaaaatgtaccatctttcatgtctgagatgcagcagaatattgtaatggggaatggaggtttgctaggagatatgaagatgcagcaacccctgatgatgaaccagaaatctgagatggtgcagccacaaaacaagctaacagtgaacccatctgcttctaatacgagtggccaagaacagaatctttcacagagtatgagtgctcctgctaaacctgagaactctacactctctggttgcagctctggtagagtccaacatggacttgagcagtcaatggaacaggcaagccaggttactacatccacagtgtgtaatgaggaaaaggttaatcagctacttcagaaaccgggtgcttcgtcgcctgtacaagctgatcaatgtcttgacattactcatcagatttaccaaccacagtctgatccaataaatggattctctttcctggaaactgatgagctgacatcacaagtctcttccttccagtctcttgccggatcatacaagcaaccattcattctatcctcccaggattcttcagctgttgtgttaccggattccacaaactcaccgctgtttcatgatgtgtgggacactcagttgaacggtctcaagtttgaccagttcagtcccttgatgcagcaggacctttatgctagtcagaatatctgtatgagtaatagcacaaccagtaacattctagatcctccactctcaaacacagtccttgatgacttctgtgccatcaaagacactgatttccagaaccacccttctggttgtttggttggaaacaacaacactagctttgctcaagatgtccagtcgcagatcacatcagctagctttgcagactcacaggccttctctcgccaagattttccagataattctggaggcactggtacatcttcaagcaatgttgattttgatgattgtagtctgcggcaaaatagtaaaggctcatcatggcagaaaattgcgacaccccgcgtccgaacctacactaaggttcaaaaaaccgggtcagtcgggagatcaattgatgtcacaagctttaaagactacgaggagctaaaatctgctatcgaatgcatgtttggattggaaggactactaactcacccacaaagctcgggttggaagcttgtatatgttgattatgagagtgatgttctgcttgtaggagatgatccatgggaagagtttgtgggatgcgtaaggtgcataaggatattgtcgccaactgaggtccagcagatgagtgaagaagggatgaagcttttgaacagcgcaggcattaacgatcttaagacttctgtttcataaatgtaacaatataaaaatgatctcatgctgatttgtaagaaaaaaaagagagtaagaaatgttcttttctccaactggtagaggagaaaccatcttgttgtaagcatttgatgtgttgttccgatttgagacctgaaactatattcatattatgtagtagagtgatgaatgaatcagtagttgagactgtctc

SEQ ID NO: 743 - DNA, 1789 bp, Arabidopsis thaliana
  Clone ID: ARATH-23APR03-CLUSTER27922_1
gaaattatttggtaagagtttgggggaacacactcccggcggcgccgcgtgttttagccctacttgttgttcttctttcttaatcgctctccggtcggcgccgtgtttttcgcgtctctctcaaactccaattctctattttccgaccaacagagagtagcgactggttattttctgtaaatttctgatatttatcgctttttctctgggggttttctaaggttttacttggaatccaaatcgatgtttattgtgatgtttagctagttatggaattgttgggtggagttgttcgcagtgacgtagaagtagcatactctcgagtgcagtgatgattctgaagcagctgaaacaatttaccttgtctgctactcgcagaaatgctgttttcaaaactgatgttaaacggcttgcaaggttctatggctctcctgctgtttgcgaatctttaacaacatctaaaattcccaaaagactctcaaaagatgatcggcgagctttggtggagtcctttgtcaacgaatacagagcaactaatgctggtagattcccttcattggatgctactcacaagcaagtgggaggctcttattacattgtcagggacatctttcaagagctgaaactcaaaccaaaagcacatgtgccaatcgtagctaaagccctctcagaagtctcttcttctgtaccaggtgatgcttcctcacactcctctccagcacctgtgccaaccgttgaagctaaagccctctcagaagtctctccttctgtaccagctgatgcttcctcacacttgtctccatcacctgtgccaatcgtagaagctaaagccctctcagaagtctctccttccgtaccagctgatacttcctcgcacttctctccagcacctgtgccaatcgtagaagcagaagccctctcagtagtctctccttctgtaccagctgatacttcctcacacttctctccagcacctgtgccaatcgtagaagctaaaaccctctcagaagtctctccctctgtaccagatgatgcttcctcacacttctctcctgtggttgttgaacctgagtttcaagctggcagtgtggatattgagataggaagtgagcagaggccggatataatagatacttctcactctaattctgatgatgaaagtaatttccagggcaacaaccttgtcattactgcaacagatgacaaaagagaaacagaggcaactcagggaatagaaaactcggagactgatgaagagaggaacttgacgcacttaggcaatcaagagtcaaaagcagaccatcttgaaggagctgatgtttcagcagatgttgtgcctactgagaccagacaaatttcagagacaggagccggtgaggtgaaagagacggaaactggtgaggtgaaagaaaggtcaagttcgtggagcaacataatgtcatttgcgaaagaatttgcgaacttttggagatgagggtagatatagccagggagctttagacacgctcaggaagggtaggtagaggtgtgtaaagtataccagtagaagctgttttgttttgacattttgcgcaaaggtttggaatcgaccaagatgtcttaatctagactattattgtcctgctggctatgagtctagattaaaacacacaacagttttagaggctaataaaaaaatcgaccattttgtacaaaggtatagaatctcccaagatgtttaacatggtaatctatactatcgttgtcctactcacaaaaaaaaaaaaaagaaaaaaaaaaaaaaaaagct

SEQ ID NO: 744 - DNA, 1642 bp, Arabidopsis thaliana
  Clone ID: ARATH-23APR03-CLUSTER27955_1
aataattacttgtgattcttatttgtcttcttcaatatggcgagaagttctgttttgctatgtttaattctattggttacgttaggagttgtgataagtgtcacatttgccgacaacgttgaattgaaatcaaaagatctagagagcagtaagaaagataagaaggttgatcatgatagtacacacaaagagaagggaggtgaaaaggtagatggtgccggttctgatgatgaagacaacgataaaaaagaaaaaaagaaagagcatgatgtgcaaaaaaaggataaacaacatgaaaacaaagacaaggatgacgagaagaagcatgttgataagaagaagagcggtggtcatgataaagatgatgatgatgaaaagaagcacaaggataaaaagaaggatggacacaatgatgatgatgatagtgatgatgatacggatgatgacgatgacgatgatgatgatgatgatgatgatgatgaagttgatggagatgataatgagaaggagaaaattgggttatacgagctcaagaagggaaatctaactgtcaaattcacaaattggggtgcttcaatcatatctctccatttcccagacaaaaatggtaaaatggacgatattgttcttggctatgatagcgtcaaaacctacaagaccgacaaggtttatttcggagcaaccgttggccgagtagcaaatagaataggaaagggcaaattcaagttgaatggtaaagagtacaagacaagtgtcaacgatggaaaaaacacactccatggtggcaagaaagggtttggggatgttgtgtgggcagttgcaaaacaccagtacgatggcaagaaaccacacattgtcttcactcacacaagtcctgacggcgatcaagggtttccgggagaactcagtgtcacggtgacatataaacttgtcaaagacaatgaattgagtgtggtgatggaggcaaagcctaaggataaagcaactccggtgaacttagctcatcatagttattggaatcttggtggtcataattccggagatattttgtctgaagaaattcaaatcctcggctcgggttatacccccgtcgacggtgagctcattcccaccgggaaaatcaatccggtgaaaggaacagcatacgattttctccaactccgtcctattaaagataatatgaaggatcttaaaacaggatatgatataaattattgcttagatggtaaggcaaaaaagatgagaaaaatagttgaactcgtagataagaaatcagggaggaaaatggagttatccggaaaccaagcgggtttgcaattctataccggagggatgttaaaggatgtcaaagggaagaatggggcagtttaccaagctttcgggggattatgtttagaaacacaaagttatccagacgcattgaaccatcccaaatttccttcacagattgtcgagccagggaaaaaatacaaacacactatgctcttcaagttttctattgtttcatagattgttttagatgttgttacatgaacacccttggaaccatgtccaatgttcatgaacaagaaactaaatacattgtaatattttgtaacaatgcttaaattatcaaattatataaacctaacgtgaacaaaaa

SEQ ID NO: 745 - DNA, 2984 bp, Arabidopsis thaliana
  Clone ID: ARATH-23APR03-CLUSTER28016_1
agctgaaaacgcctctgaaactcgcgagatctattttcaaatcgaagaagacagcaattcgagggtttacttgtcttgtcttgttgactcgattcgtagacttttggtctgaagcttcttcgtgttttatcttaacaatggcgggttttatcaatcttgaggattccccaatgtttcaaaaacaggtcttctccttggaagggacaagtgatgagcttaaagatcgttgtcagaagttatacaaaggtgttaagaagttcatgggagctttaggagaggcatctactggagttagtgcctttgcagattctcttgaagagtttggtgctggacatgatgatccagtcagtgtttcaattggaggtccagtaatatctaagttcataaatacacttcgagagctctcctcttataaggagtttcttcgctcacaggtggagcatgtattacttgagaggctgacaaactttatgactgttgatctacaagaagcaaaggagtctcggcgtcggttcgataaagctgtccattcttatgatcaggcacgcgaaaagtttgtgtcgctaaagaagaataccagaggagacattgttgctgagttggaagaggatttggagaactcgaagtcagcatttgagaaaagtcgtttcaatctagtatgctaagtctacgaatagaagcactactacgattgtcttttgacctttctgcatttaaatggttttctctttggtttaaggaatgcaggtaaattcactgatgaccattgaagcaaaaaagaagtacgagttcttggaatctataagtgcaattatggattcccatttcaaatattttaagcttgtatgtttcttctcttattttgcatttagagatgtaaccaagtgtgaccaactaagggaaacatcagtacctcgttgtactccttaatgtggtctctttgttctccagggttatgatctattaagtcaattggagccttacatccatcaggtattgacatacgcacaacagtcaaaagaacagtctaagattgaacaagatcgatttgcacaacgcattcaagaattcaggactcaatctgaattagacagccaacaggcctctgctaaagcagatccctccgatgttggtggaaaccatgtttatagagctatcccccgtaaaaacgtagaagcaaactcagtttcaacagcagacaaggaagtaactaaacaagggtatctattaaagcgatcagctagtttgagagctgattggaaaaggagattctttgtgcttgacaaccatggatccctatactattacagaaacaccggtaataaatcagcgaaatctcagcattactacagtggtttaggagagcatagtagcggcgtctttgggagatttcgtacaagacacaatcgatcagcttcacagggaagcctagattgcaatatgatcgatctccgtacttcactgataaaattggacgcagaggacacagatcttcgactctgttttagaattatatctcctcaaaagacttacacactacaggctgaaaatggagctgataggatggattgggtaaataagatcacagcagctataacaacacgtctgaattctcattttctgcagcagtcaccagcaagatacttggataaaaagaatactagttctggtcctgccactgaaaacctcaccctgaatcaaaaagaagattataatcaaagactaaatgtgggggatgacgtccttacaatactcagagaaattcctggaaataacacttgtgcagaatgcaatgcacctgaccccgattgggcatcattgaatcttggagttttgatgtgcattgaatgctctggtgttcacaggaatctcggcgttcatatatccaaggtgagatcgctcacattggatgtgaaagtatgggagcctacaatcttggacttatttcggaacttaggcaacggatactgtaattcagtctgggaggagctacttcatcaccttgacgatgacagtgaaaagggatcgacagacacacttgcatcagtttcgaaaccatcttcagaagattggtttactctgaaggagaaatatattaacggaaagtacctggagaaagcactagttgtcaaagatgaaagagaagcaaattctactgcctcaagtagaatatgggaagcggttcaaagcaggaacataagagacatctaccgactcattgtaaaagcagatgcaaatatcatcaataccaagttcgatgatattactgaccttgatgtatatcaccaccaccatgttgatgcaccagatgaagtaaagaaaaggcacgatccaaatgcgtgtcagagaatcaagaattcgaacgaagcaagaaactgtcttcaaggctgctcattgttgcatgtggcgtgtcaaagcggtgacccaatcttgcttgaactgctgttgcagttcggggctgacataaacatgagagattaccacggacgaactccattacaccattgcatcgcatcagggaacaacgcatttgcaaaggttttgctgagaagaggtgctcgtccatcaatagaggatggtggaggattaagtgtgttggaaagggcaatggagatgggagccataaccgatgaagagctcttccttctattagcagagtgtcagtaaattaccaatataccatttgctgattgattgctacgcaaaggaatgtaacttgtaactgttgtagtatttggtcatgacttgctcatcgcattgatgctccaatatttacctaattcccgaaggagatagaactctaggaaatgtcaagattccgacctactgtattagcctttgtaatgttatacataagatgatctcaaagattctaagcctgcacctcaaagtttttttttcttcttctgtatttgatatccgagatacaaatatgtgttttgtagccggaaactttattatagacaacattctcattgcccaac

SEQ ID NO: 746 - DNA, 1060 bp, Arabidopsis thaliana
  Clone ID: ARATH-23APR03-CLUSTER28055_1
attcttgtccattaagactcggcggattaaaaaaaggtttggcctttccgtggagtagtttcttgacattttctttctgctatctcttacacaattgggtatttagctgacacgacgaagaaggtctctcatcaattatctgagatttttacataagaaaggctccgacaaagcagatggaagacgatatgtggtgcgttagctcatctggttcttctagaagctatcgatcggaaactgctgctaagtatcaatcagggccttatcaagatttggaagagtttgaagaagttgacgacgatatagcagtggagtatccatgcccgttttgcgcaagtgattatgatttagttgaattgtgtcaccatatcgacgaagaacatcgtcatgaagctaacaatgggatatgtcctgtatgtagcaaaagggtgaagatgcatatggtggatcatataacatcacatcatagagatgtcttgaagagtgagcagaaggaaatgtcttacagggaagatccatatttatctgataaatatcttcaacctcatcttgatgagttgccaccatctatgaatcatcatcagcatccctctaaacatgtttccgatcaatttttatcgttcatcaacaattctgcattaccaaatcagaccaagcttgtgctgcctgattcaagtgtagaagacaagaatccgattaaggattcgtcagcagcaaaagagggtacatcgtcgtgtcctttatcggatagtgataaattggagaaggcaaagaagtgtgagtttgtacagggactgttgtcatcagccatgtttgatgatgaatgtgactcttctgagtaaaataaagatgtgaagtcgccaatgggaaaggcaggtgattgtcattgttgtaattttattcagctctatttatatatatgcatcttttttacagacataacactagctttagccttataatataagctgatgagttttcagtttgtttcttcacaagaatcttttgtcgcagagcaccgtccttgcaaatttctttcctgcatctagttcccaatcgg

SEQ ID NO: 747 - DNA, 1184 bp, Arabidopsis thaliana
  Clone ID: ARATH-23APR03-CLUSTER28057_1
gatctgcgtggatgatgaatgtttctggagaatgtgtaggccgtgaaagatgcgaggaattagccaagtcttcttcgttttaccggaaagtttactcggagatagaagaaattggatgggaaccaataaggagattaggtggagatttaacgttttttagctttcacattctagataagaagggaagagctcacaacttagaaattcaactgaacagagactatcctaattcaccaccttctgtttctgcggtttgttaatgtcaaatccttaagcttttttcattctccgtagcgaattaacttttgcttcgatgtaggatgtgccatatatgtttacactagaatggtcaacaagttcaagattgaaggatgtaatgcaccaattccaaaagcatttggactatcttcaagaattttggtctgtcttggacaatatcgataaatctctatgtgttgttgatgtcaagcaaccagctcgtgcctctgctattcgccggattgatgctgggaatgattgtatcatcattgttcatatcgacttcaaagaccctaaatccctaccagagtcccggtttattggtcctgtgccttcagctacgcatatgaacaacttgcatatgttatggagaagaaattgcaaaagatggtcaaatgaaagatcatttcctgagaaccttgaatgtattctaggtactgagcttccaaagcctctaggtctccaagtggaagacgatcaacaacaagttgaatgtgggatttgctatgcgcagtttctacccaccgatgaggagctcggagctagaagtgggacacgaacagattacacatgtgaaaacatcagttgcaacaagtctttccatagcctctgcctcacagactggttaaggtctatcacaacaacaagacagtcatttgatgttctgtttgggaactgcccttattgttcagacccagttgcagtcaaaaccagcaacaaatagagttagacaaaccatcatcctaattagctgatatctgaatgttgtaatgaaacgtgatacaaagagaagagttagtacagtaatgagtagtagtagtaagtgaggacaaaagttcctttttactatttttcttctgtacgtttaagataagactcatgtagctttcaaataagagatgtgaatgtaccttgtttttttcaag

SEQ ID NO: 748 - DNA, 1651 bp, Arabidopsis thaliana
  Clone ID: ARATH-23APR03-CLUSTER28097_1
attctcgccatgaagccccctctcttccaacattatctttccacccccccaaaactcatcttcttcgttgaaacgatcgacttcgtaaatggcgtcgtcgaagcacgaagactatggcatcccttacacacctctcccatcatcgcaaccatctcaatccgtaatccttctaactccttatcgccgtcaccgtcgtccttctctccttcgtaagctccgttgttctctcctcttcaccgccgtaatcctcctcctctccgccgccgtttacttactctacccttcagatccagacatcactgtctcacgaatcaatctcaaccacataagcgtcgttgattctcataaaatcgctttagatctctcgttttcgctcacaatcaaagttcgaaaccgagatttcttctcacttgattacgattcgcttgttgtttcgattgggtatcgaggaagagagttaggtcttgtgaagtctaaaggtggacatcttagggctcgtgatagctcttatattgatgctacgcttgagcttgatggtcttgaggttgttcatgatgttatttatttgattggtgatttggctaaaggtgttattccttttgatactattgctcaagttcaaggtgatcttggtgttctcttgttccatatcccaattcagggtaaagtgtcgtgtgaggtgtatgttaatgttaacaaccagaaaatttcacaccaagattgtcatcgtaagtgaagtgcaatcctgagctggaggagagatgaagaaaccagataacatacgttgacatgttttgagttctggagaaatgatttgtaagtttttgtatagataaaattactcttaatgttaaaactgaaagatagaatgagaaagatgaaccactactttctgtaattaaagttctttcttaattcctcagatgtgtacaagtgtttgcttttatgttgtagacatgaataaaccactcaataaaccatgtaattcaaagtcttcaattcatacaagctaagtattcctttagcatcttccgtgagagatcgctcaaacttcccatcatcccctgtaaatctcttgaatacaccgattcatcgatgggaacagagaggaaataatcagtccattgacagtgagacaattttttgaacgcatgactttcatactcaaacgttgtttgggattccatagtgtttgagagagggggagaaagagagttagagagttgaaggtgaggagaagtatgggaaaaactaaagtgactataatactccttcaattttccttcactacaattgtatatatcatcggacttggtgtagaggacttccaataagcgtccaaaattgagggcttgcttgagaactcgacgtggcacggtggttgtttttagtagctcctcatttactatcttattgatgtctacgaccattttttgacactctagaatagcttcttctttggtaactacgaattgcttcatataatagttgatcgcatttgcagcaaacccattactcatgtcgctctcgaaatcagttatatcgtccatcagacgaccctttgcagctagagatttgattagtcttggtctcgatcttacccactcataagcttccatcccgacagcctctccccggacgcgtgggtcga

SEQ ID NO: 749 - DNA, 1236 bp, Arabidopsis thaliana
  Clone ID: ARATH-23APR03-CLUSTER28109_1
gacgagcgacctcatcgtctacatcgccgtcgcctgttaccgtccggtgctattctccttcacaatctcacatttttcgtaccggttagaagatgagaatcacgcagatcttgttatgtctggtaatagtggcattgtcttcaagctcccatgtctggtccgatcagatcttcccagctcatctagttggaacattcagcagaaacaatcgtgaaccaaagtacaagattgagttccttcctgaagattcaccttttcacccgggtgataatctggaatcaatggttatgttggataagcatggaaatcggtttttatgttacttaccgaaagaggaaaaagcgacgagtggatggacttctagtcagcaaaatattagtactgtgatgatggaaacacagcaactggtgaagctaaagactcctgatgaattgcttcaaccacttagtgaaaaatgtctttttaggcaagagggttggtggtcttatgagttttgtcatcagaagtatgtgcggcagctacacgttgaggatgaaaacaagattgttcaagagttttttttgggtacttttgacccagaggcaactgcggcgtttaatcaaactgtttctgatgcttcaactgatgcatctcagaggtatcactctcatgtatacaccaatgggaccacctgtgatcttacaggatcacctcgcgaagtcgaggtgaggtttgtatgcgcagaaacaagggcaatggtcacttcaatcactgaattatcaacttgcaagtacgcactgactgttcagtgcccaaccttgtgcaagcatccgctgttccagctagagaaaccagtgtcacacacgatccactgcaatgcgatcccagtggaagaagacgcaacaagaaacaaggaagaacaagcagtagacgaatcacctaagatgatagctgattcttgaaaaccgcctaagtgaatcacctaagagtaagagttaacagcgactgtatatacaagaactagcatatctccattttcagtgttacccgctgtagtgatcatggtttcaattgggatcgcttgctggtaggatgatgatactctctctgtaattttttgcatacttaaaatagcatttcaatagaaggtactgataaaccacttgtgaagcaaagactgcaagcttcatgtaacacatatgtttccgtttcactaatgaatttgttccaagtgtaggccaaaaaaaaaaaaaaaaa

SEQ ID NO: 750 - DNA, 1068 bp, Arabidopsis thaliana
  unsure (1)..(1068): unsure at all n locations
  Clone ID: ARATH-23APR03-CLUSTER28139_1
atattacaccaaaatttgaaatcatcttctttgattgtttttggtgtgagcgaagatgggaagatcgaattctcaatgcccatctcattggattctcctctgcttcttcatctcttctcagttttggggattctcacttcccacttcgataattcaacaaaatctcgagggttttaaagatcctgaagacggttttcataagattcattgttcaagagaacgtagcagagttgcttggaaaatcattcaagagtatctcatgccgtatgtggaaaaggagcggtatcagttaccgagtacttgtagagttcatcgagacaatgacatttatagagaacaagaagagcacaaattgcgttcagatattaatgagtggcgttgtggattctgcaaaaaggctttttatgaagagaagtatctcgataagcatttcgattcgcgccattacaatttacttaatgcgagtcatggtaaatgtctgtcggatctttgtggagcgttgcattgtgatcttgttgtagacacagctcggcttaagtccaagtgtaatcctgcagctgctgcaaaaaaccggcacttatgtgagagtttggctaatagttgttttccggtaaataaaggttcatcagccaaccgtcttcacgatttcttcttgcgtcagttctgcgatgcacatacatgttcaggaggatcaaagcccttatctcaaaaaccaaagaagaggagtatagtgtacattattttctccatcatcgttttggtagtgcttcttctctattacagctttgtctatttgttccgaagaggattaaagagaagatctcaagatttgaagcgtattagacacaatggtctgaagaagaaacccttctaaccatatcaagctttagctttaatggcggctgagagagagtacattttttttctttgcaagatgattacaattaggatcagattagtgcattttgcaacatcccttacaattatatcactacttacaccaatattgttacttagaattcaatagtgtttactgcccctagagcggtanaatcgcatttaacattt

SEQ ID NO: 751 - DNA, 1944 bp, Arabidopsis thaliana
  Clone ID: ARATH-23APR03-CLUSTER2826_1
ctcactagtcccccccccccccggagctttttttgttgtgatatatcccgtaaaaccctaaacatagtcacttcatcgtctcctccactgtatcattcaatctctgtcttccttctttttagcgacctcgtctccaaagctcacaaattttctacctttccggagtagagagaaagatgcaagcttgttgtggtggtaattcgatggcttctcttcagcaacctggacgggttcaaggatctgtctttcccccaattatgcctccagtgaccaaattttctcagcagttgaagttcaatatttcaaaacctttccgttcttcatttctgaaaagaaacctggtctctgaaatgagagcatcttcagtctcgctacctaatgtcgagataagcagcaaagaaatcccttttgaggactatggtcttggtgaagttgatccagaggtccgaaccatcatcacaaaggagaaagatagacaattcaggagcttggagcttattgcatctgagaatttcacgtctcgagcagttatggaggcggttggctcatgccttaccaacaagtattctgagggactgcctggtaaaagatattatggtggcaatgagtacattgatcagttggagacgctttgccagaaccgggctttggcagccttccgcttagattctacgaaatggggggttaatgttcagccgttatctggttcacctgcaaactttgctgtctacactgcgatacttagccctcatgatcggatcatgggtttggatttacctcacggtggtcatctgtcgcatgggttcatgaccgctaaaaggcgtgtatctggaacttcaatatactttgagtccatgccttatcgacttgatgaatcaacaggcattgttgactacgatatgctcgagaaaactgctacacttttcagaccaaagcttattatcgcaggagctagtgcatacagccgagattttgactatcctcgcatgaggaagatcgcagactcagttggtgcttttctgatgatggatatggctcatatcagtgggcttgtggctgcttctgtggtagctgacccttttgagtattgtgatattgttacaacaacaactcacaagtctttgagaggtccgagaggtggcatgatcttcttcaggaaggatccaattaatggggttgatcttgaatctgccgtgaacaatgctgtcttccctggtttgcagggtggccctcataaccacacaattggaggattagcagtctgcttgaaacacgcacaatcaccggaattcaaggcgtaccagaaaagagttgtgtctaactgtagagctctagctaaccgattggttgaactcgggtttaagctagtttctggtggcagcgataaccacttggttctcgtcgatcttagacccatgggtatggatggtgcgcgggttgagaaaatcttagacatggcatctattactctcaacaagaactctgtccctggggacaaaagtgcgttggtaccagggggaataaggataggatcccccgcgatgacgacaagaggactgtcagagaaagactttgtagtagtggctgacttcatcaaggaaggtgtggagataacaatggaagccaagaaagccgcgccgggttcaaagcttcaagatttcaacaagttcgtgacatctcctgagtttccattgaaagagagagtgaagagtctaaaggagagagtggaaaccttcacatctcgttttcccattcctggcgtttaagctataaacacacacagatatgctcttgttgtaccttaattattcacctttttcatctgtcttttagggtttttacttgcttgtgtcccaagtttaaagttacagttgaatcgagagaaattattttcaaaaataaatttatttgtggaacaatgattcgtctatgttcccaaatctc

SEQ ID NO: 752 - DNA, 1449 bp, Arabidopsis thaliana
  unsure (1)..(1449): unsure at all n locations
  Clone ID: ARATH-23APR03-CLUSTER28366_1
agtcagagattagaatttacattctttttgagggtttatgattaagaattagagagtgtgntcaagttaaatggngtctcngttcttcttcttcttcatcaaaaaaaaaaaatgtctgagaggaggattcattattcccagctcaaaaacgacaacttgaatcaaatctcgccttcttctgctccttctccaatcaccctgaatcatcaattaaccgactcttcttcttcttcttcctccggtggtaataatcgaataagccccatcattctcttcatcatcgttctcttatccgtaatcttcttcatctgtagcattctacatttgttggtcagatattacttaaagaagaaaagatcaaacctttcgtcatcaccaaacgaatctaatcaaaacccagaattttccgactccgatacttaccaaagacagcttcaacagctctttcatctccatgattcaggtctagatcaagctttaatcgatgctcttcctgtgtttctttacaaagagatcaaaggtacgaaagagccttttgattgtgcagtgtgtctctgtgaattctcggaagatgataagcttagattgcttccgaattgtagtcacgcttttcacatagattgtatcgatacttggcttctctcgaattcgacttgtccactttgtagaggaacccttttctctttaggtcatcaatttgaataccctgatttcaatttcgggtttttcgccggagatgatggaggaggaggagttagggtttctccggttcagaaaccagctgagaatgagattgggaagagagtgttttcagtgaggcttggtaagtttaggagcagtaatattgtcaacaatggtgaagtagtagtaggaggaggaggagagacaagtagtagtagtcttgataatagaagatgtttctcaatggggtcttatcagtacatagtggctgaatcagatctggttgttgctttgtgtcctaataatgaaggattgaagaataataaggatgttgaagggaagaagattaatatgagaagtaaaggtgagagcttttctgtgtcaaagatttggcaatggtctaataagagatcaaagtttcctaataatcatccatcagagactaatcttgtggttggtggttcttcttcttcttcttcttatgtttgttctggatctgatgggttatcggacgcgtgggggagatttcagggtccatgagattttaagggtatagatcagagggtagctttagttctgccattgatttaattgaattattgattttgtgtgttttggtgaattcattttgcttaacacgatatgaccactgtagtgttgttttgtgtcctctgtagctgaatctctctgtttgtttaagggaataagcttttgttctttgatgatgttatagtggtacactcttatatgtgatgtttctagttctaa

SEQ ID NO: 753 - DNA, 2401 bp, Arabidopsis thaliana
  Clone ID: ARATH-23APR03-CLUSTER2836_1
gggagtgagtttcgctttcctccgagaaaatttcagacttaaattttccggaatctaataaggagaagccattgttgaagaaactagtctctctgtttcgaatcttcaaattcagattcaatatctatcaggaaaatttcgcatgggggtgaaagtagcttcttcgtctactttccttcaatggactactcagcctattattcatcagtcttcttcaccatctcaaaccctagcttcgggaaccataacatctccttcaaaacgacgtagcacagtacacgacggccggtttctatcatgtcgtttcgtgacacagagactaaaccgttcggctcttttcggaactccgtcgacgaagcttcatcgaccccagtcatgtgagctatgggaatcatcatcagcgcgttctactaaaataaaagtgaagcgccttcctcaggattttcccgagtgagtttcgctttcctccgagaaaatttcagacttaaattttccggaatctaataaggagaagccattgttgaagaaactagtctctctgtttcgaatcttcaaattcagattcaatatctatcaggaaaatttcgcatgggggtgaaagtagcttcttcgtctactttccttcaatggactactcagcctattattcatcagtcttcttcaccatctcaaaccctagcttcgggaaccataacatctccttcaaaacgacgtagcacagtacacgacggccggtttctatcatgtcgtttcgtgacacagagactaaaccgttcggctcttttcggaactccgtcgacgaagcttcatcgacccaagtcatgtgagctatggaaatcatcatcatcatcatctagaccgatcaaaactcagtcgtttcgaagagtttatagcgcaaacttagatccattctccgacgaagagttctcgaaaaaaatccaagagctaactctcagattcaatatcccacaccatgacgacgacgagaattcaatcgagccgccatggaacgagatggttcatttgtcgagtattgaaatgaaagcaaacagtgttgatcttcctctttcacttcgtattataaagaagaaacgtcaatgggaagaaggagttaaacaagctggtgaatctgcgtgttgctcgatgaataaagctttttcttcaatggtgtttatgatacgggagcttcagagctttactttacatatgagagagattctgttctacgaagacttgcaagagattttgctaagagttagagaagagatgcaacaatctttcgtttggttgtttcaacaagttttctctgctactcctacgttgatggtttatgttatgattctcttagccaatttcactgtttattctatcggtaacaacagctccgctttagccgctgttgctcctcttcctccgacgattacggagttaacaactgttagtgaaacagaggaaacaaacgtgaagtttgattcctcggtggtgaaaacgttctttgtatcatctcctagtgggagtatagcttcagttggtggtaacaacaatggcggcggtggaaacgtcaagccggtgttaagcggaactgacggtgatggatccgatggatcagaacagttcagaacaatcatacccgaaggagtttctcaattgtcatcatcgaatttcgggtcagagccgtcagtatcgggacaagatgaacatagattgtggaattcgatggtggaggaagcagaacgaatgcagtattcaaatattgacgattcgttggatcaggagacgaggaagcggttcgtgtctcatgtagaggctcgagtagaagcagaggaagacactggttacttcaaaacagagctaatgtatcaaacagaactgtctcaagagcctaataatcctctactactcgctaactatgctcagttcctttacctcgtctctaatgaccatgacagagcggaagagtatttcaagagagcggtaggagtggaaccgaaagatgcagaggcgtttagcaaatatgcgacgttcttatggagagcacgggacgatctttgggcggctgaggagactttcttagaagcaattgatgccgatccgaccaactcttactacgccgctaattacgccaatttcttgtggaataccggcggtgatgacacgtgtttccctcttgatgacgagtctcatgaagacaccatttagataagaatgtgcaccatcaaagtctctctatataaaatattgtatacaataagtacaactaatgaatatacacatatgtgcataccattaatgtattatgtatatgcatgtttgtcaccaaggctcggtgggtaaaagagttatataatacttatggttgcgatcaaaaaaaaaaaaaaaaaaaaaaaaagagggcggccgc

SEQ ID NO: 754 - DNA, 1093 bp, Arabidopsis thaliana
  unsure (1)..(1093): unsure at all n locations
  Clone ID: ARATH-23APR03-CLUSTER2842_1
nncaagatctgcttctgcaaaaaaccttatcctgctatggcttccactttcgtctgctctctaccaaatcctttctttgcttttccggtcaaagcaactactccttcgacggctaaccatacgcttctcggaagtcgaagaggttgtcttagaatcaaagcgatttccactaaatgggaaccgacaaaggtactgtctttgccgacaaatgttttggttcctccgtttttaaaaacctcccgaacgtccgtacggctgcgagaagacgacagcaggggaaagtcgtaacggaggaagaagaagatctgcttctgcaaaaaaccttatcctgctatggcttccactttcgtctgctctctaccaaatcctttctttgcttttccggtcaaagcaactactccttcgacggctaactatacgcttctcggaagtcgaagaggttgtcttagaatcaaagcgatttccactaaatgggaaccgacaaaggttgttcctcaggcagacagagttcttgttcgtcttgaagatcttcctattaaatcctcaggtggagtattgttgcctaaagcagctgtgaagtttgagagatacctaacaggagagattatatctgttggttctgaggttggacaacaagttggacctggaaagagggttttgttctctgatgtgagcgcttatgaggtcgatttgggaaccgatgctaggcattgcttctgtaaagagagtgacttgttggccctcgttgagtgaagtcttgtccaagagggagagatttgaagattttacaagttttctgtaattttcagacagcaattgttgtttctagttaatccttcaatttaatatcaattgagatcactttcagaaaaaaaaaaaaaaagaaaagcaaaacgcgggcccgggaccccttccgggggggcccgggacccccgccggccaagcggcgggggggcaacggnccctcanctatgnttgacccccgtcccatgggggacaaaggcccccgccctcgggggcgggggggnnnntnncngctnnggggggnnggggggcggnngnncgngnngggcgccngnnggnngggngntgg

SEQ ID NO: 755 - DNA, 1949 bp, Arabidopsis thaliana
  Clone ID: ARATH-23APR03-CLUSTER2844_1
gaggcccccaccgtctttcgcgcgaactctgtctccagacactcccccccacaactactcctggcttctctttgcctatggcggccaccggctttcacacgctctctgccggccgatgattcaacggagaggagcacgggcacccccttggagtaaccctacccccggctgaccgaggctgcgccggtggcgccgggtagcagcgcgggagaagagggctaccagcactccttcagtccaggggtgataccaaagcgtccagggggctacgattttcaccttggctagggaatactgtcgggagcagtggtgttgagagactgagacaaggcaagggtggtgtacgcagacgtgaagaaggaggtcgagagatgcataaagtttgtgaagcagagaagggaggaggatccttacagacctctcttgccccgtctcaaatatcacctgcagcacggcctcctctcccaagtccccactttccacttttgaatacatttacataatttgctgatggtgctttgatacctcataatttattttttttctgcaaacagatatattccataacatttgggctttcacctcatgaatcatgatagcagcacccacattgtcaaattttcccgatacaaaacactatcacattttgggaaactagagatcctaactaaaagagatagttttagtgttgtatcaactcgggaatgagcttgagaagaaaggagagctctctgtcagagaagttaggctttggcttagtaccatcagcatctctgttggatggcttcatcatctccctcaccgcctctgttatctcctccacatgatcaactatcactccctctatccccatcaaatgctgcatgtaaaccgcctcggctacattgtttagctttccgtatgtcatcagagagagcttggattcttttatcttgttgacaagagcggggttgcggaatactcccttcacctccgagacaatcccttggaggcctccttctaaacatactttgattgcttcctcaagcgaattccttctcgtgtcgtggtacatctcagttcctccgttggtcaagaagaatacggggtaggtggtctgcaacttcctgacaagaagggctgcatcaggatggaagctggagaagatgatagttctgtcgtttccgatatcagacacgacctgcaagattgggaggagaagacgggagaggtgatcggaggaatagaagacgttgtcgtcaagcttgagttcgatgttgaaaccgaggtttggattctctactttctcaaaagcctcttggagagtacagaaagagtcgtcggttgcgacgctccacttatggatcttcccttcctttgactttctcagcaaaggctttcctgtcttgcctgtatccctctgtggcccgtaggacatgaactccgacaagcaaacctccgtgaccctcttctcgtacaccactccctgttcctcggagtagatgaagtcgtcgtggaatatgattgggcagccatctctggtgacctgaacatcgaattcgataaagtcgagagggaattttgaagcggcattaaaggagaggatggagttctccttgagagcagagaaccttagatccggcgactgcgacatgttcatgccgtgtcctctatggccaaccaccacaaacttgttattcgctttgcgagaggagcaaatgagcgacgggttctcagggaagtggtcgaggcttggcacttccgagacatgaatggcttttagagacatatttctatttttagaaagaaaaaagggctcgtctttctttctttctttccttcctgtgagattgatgttgtgaggagccccttccgtcgtcttctcgcagccgtacagacctctgttgccccggattaaggccgacctgcagcacggcctcctctcccaagtccccactttccacttttga

SEQ ID NO: 756 - DNA, 2852 bp, Arabidopsis thaliana
  Clone ID: ARATH-23APR03-CLUSTER28505_1
cgatcttgaatgtttttaaagctccttgaggaactttcatctcttacagaggattttcttgggaacttttctcactttcttctttaaatcaagttgctactttttttgtttctttagataaaatcgatattccattcacagttacttcataagtttgcagaggaaaaataaaatttaatctcttctctttgcaggttttgatgatgatgcttatatgattttatttagtagttgtgtgtgttttatggtcttgtgtggctatggagaaactctattgtggcatgccgttactgcttctggttctgcttttagcttccattgatggctctacacagctacaatcatctcaatctcaaaccctcttgaggctgcaacagcttctctactatcccaaagtgttaaacagctggaacaactatacagatttctgcaattctgagccaagcccttcgctaaccgttgtgtgttatgaagatagtgtaacgcagcttcacattataggagacaatggaactcatatgttaccaaagagtttctcaataaactcgtttgttactactcttgttaagctccctgatgttaaagttctcacgtttgtgtcccttgggttatggggttggttacctcagaaaatcaaccgtttatcctctttggagattctcaatgtgagttccaatttcctctttggaccaatccctcatgaactctcgtcgcttgctactcttcagacgcttatactcgacgagaatatgttttctggtgagttaccggattggattgattctttgccgagtttagctgtgttgagcttgagaaagaacgtgcttaatgggtcattgccttcttctttgagtagcttgtcaggtcttagagttcttgctttagctaataaccggtttaatggagctttgcctgatttaagccatttgacaaaccttcaagtgcttgatcttgaaggaaactcttttggaccgttgtttcctcggttaagtaacaagctggttactcttatactcagcaagaacaagtttagatctgcagtttcagctgaagaagtaagttctctgtatcagcttcaacatttggatctttcctacaatacattcgttggtccatttcctacttccttgatgtctcttcccgcgataacttacttgaacatttcacacaacaaactcaccgggcggctttcagcaaatctttcttgcaactcacagctgatgtttgtagatatgtcatcaaatcttcttaccggaagtttgcctacttgccttaaaccgagttccggcactagcagagatgttgtctatgcaagcaactgtttggctactacgaatgaagatcaacgtccagtttctttttgtagtaatgaagctcttgctgttggaatcctaccacagaggaggaacaaagtttccaaagtgggtattgctttaggtgtaaccgcaagcattctcggggtacttctcctcgccggtgccttatttgtggttcttaggagattaaatgctaagaaaacagtgacgaaatcttccccaagattgattagagagaatgcttcaatggggtacacatcgaaactactatcagatgcaaggtatatctctcaaacaatgaagctaggagggctcggtcttccagcttacaggacattctcactggaggagctcgagtatgcaacaaataactttgaatcctctgctttcatgggtgaaggttctcaaggacagatttatagagggagattgaaagatggatcctttgtggcaattaggtgtctgaaaatgaagaaaagttgcagcacacaaaacttgatgcatcacattgagctcatcgctaaactgcggcaccgtcacttggttagtgtgctcgggcactgcttcgagtgctacttggatgattcaacagtcagcagaatgttctttgtctttgagtatgtcccaaatggagaactcaggacctggatttctgatgggcacatgggaagattgcttacttgggaacaacgcataagcgtagcgataggtgtagcaaaagggatccagttcttgcataccggtattgtgcctggtgtttatgataacaaccttaaaatgacagacattttgcttgacaataaccttgcggcgaaactcagtagctataatcttccattgcttgtggaaggtcttggaaaggtggggcaagtaggatctcggagcggacctaaaggcactccaagcatcaaagacgaagataaaatcgatatctatgattttggagtgatattgcttgaacttatagtgggaagaccattgagagcaaagagtcaagtcgatgttctaaaagagcagttacaagcaagcatttcagcggatgatggagcacgtaggagcatggtggatccaacggtccatagagcttgttcagaccaatcactgaagacaatgatggagatatgtgtaaggtgtctccttaaagaccctttagaacgtccttccattgaagatgtcctgtggaatcttcagtttgcttctcaagttcaagaaggttggctacaaaacagcaatccctcgagcaatctcggctcgccttctcctgctgcttcctctcttcctcctccctctcgtttacacgtaacaacactcgaatctccccgagattcaggatgtgaagaacatgagaggtagagagacgagggtttttgtttggtcttgttcactgatcactactctttggaaagaacataacctttttgtttgtaatttgatgtttgtttttgtttttttgtctttagttgtgttgagcttaaacgatcataacagttaataatatagttaatttttcttaaaaaaagaaaaaaaaaaaaaaaa

SEQ ID NO: 757 - DNA, 2443 bp, Arabidopsis thaliana
  Clone ID: ARATH-23APR03-CLUSTER28512_1
gagctcgcgagtcccccccccccccccccccaacacgaacgttctcagtctttgactcagactcccaccgcgtaattccgagctaggtttccatttctccggcgaatcggacctctctctcgctctctcttccaatttccccttttttcgtttcccagcgatgatttgcaagtagcttccgctaataatcgcaactctctgacggatgctatggcaatgggacttattcgtcttctttctatagcttttacacttgttctactttcaatccttcctcttcatctctctctcgctgatgagataacatctattgaatctgtacctgaccttcagaagctaatgtatgttgctgttgatgggtttccttgtgtacgtcttctcaatctgtctggagagattggatgttcaaatcctggaataaataaagtggtggctccaatcataaaattaaaggacgttaaagatttggttcagccacacactattttggttacagctgatgaaatggaagatttctttaccagggtgtcaactgatttgagctttgctagcaaaattggtggtgttctagttgaatcaggatctaatttccaacaaaagttaaaagggttttctcctgataaaaggtttcctcaagcccagttttcaccctatgaaaacgttgagtacaaatggaattcagctgcatcaagcatcatgtggagaaattataattttcctgtgtacttattgtcagaaagtggcatatcagctgtgcatgagatcctttccaagaaaaagatgaagcatggaacatataccagtgatgttgctgaattcaatatggttatggagactaccaaagctggaacacacaattcggaggcttgtttgcaggagggaacttgcctcccattgggcggatatagtgtttggtcctcgcttccaccaatcagtgtttcgtcttccaacaatcgcaaaccagttgtgctgactgtggcctccatggatactgcatcatttttccgtgacaaaagttttggtgcagattcaccaatatctggtctggtagctcttctaggagcagttgatgctctttctcgagttgatggtattagtaatctcaaaaaacagcttgtgtttttggttctgaccggagagacatggggttaccttggcagcaggaggttcttacacgaattagatctgcattcagatgctgtcgcaggccttagcaatacttcgattgaaacggtgcttgaaataggatctgttggaaaaggtttaagtggagggataaacaccttctttgctcataaaacaagggtttcttcagttacaaacatgacactggatgctttaaagatagctcaggattcacttgcatcaaaaaacatcaaaattctttcagcagatactgcaaaccctggaatacccccatcctccttgatggctttcatgagaaagaaccctcagacttcagctgttgtacttgaagactttgataccaactttgtgaataagttctaccatagtcacctcgatgacttgtcaaatatcaactcctcgtctgtagtagctgctgcttctgttgtggcccgaacactttacatcctagcaagtgacaacaaagatacaagcaattcagctctgggatccatccatgtcaatgcttctttcgttgaagagcttctaacctgtcttttagcttgtgaaccgggcttatcttgcaacttggtaaaagactatatttcaccgacaaacacttgtccaggcaactatgctggcgtcatcctcggagaaccttcctccaaaccttaccttggttacgtcggtgatgtttctagattcctatggaactttctggcagataaaacatctgtccaaaagggaaatacaacctcagtttgttcaaaaggagtctgtagcaaaactgacgaagtgtgcatcaaagcagagagcaacaaggaaggaacatgtgttgtctccacaaccaggtatgttccagcttattcaactcgattgaagtataacgatggagcttggacaattctaccacagaactcatcagattctatggggatggttgatccagtgtggaccgaaagcaactgggacactttaagggtgcatgtgtacacagtccagcactcagcatacgacaatgcagtcctcgttgcaggtattacagtcacaacgttggcttacatcggaattttggctgctaagtcaatcatcacaaaagccttgaagcaggactgagacttgtatttaattccctctcctctcggctcaaaattacttgtcagtttccgtaagacattgcctaaccagcaacaccaccaataccttagtggtagaaaccttttttctcaaccaaggttattaaaatatgtctttgagctaattcatgttaaattctttattacactggcaagaaatttataagaaaaaagtttgcttc

SEQ ID NO: 758 - DNA, 1504 bp, Arabidopsis thaliana
  Clone ID: ARATH-23APR03-CLUSTER28532_1
gtttttaaaccctaaagagaccgccaaaaaaaaaacactctctcttctctctctgtctctatctctcgatatcgacggaaatggcgtcgggttgcgttaaaaatgttggtacctcgccgagtcactcatggacgagctccaaaatgtcattgacccgtgaatctcaaccgttggccccagcgttagaaaacgaagatcctgttgacgactttgagtttctactcgaagatcccgtcacaatgctatccgccgacgagcttttctccgacggaaagcttgtcccgcttaagttttctggcgtaacttatccggaagagaagcctataacgtcggtggttcatacggcggtgaaaccatgccgaagattggaaatggagatctccggcgtcgtcgatccttatctcttctctccgagagctcctcgttgcaccgtgagatggcgtgagcttttaggtcttaagagactcgccaaaacgcaacaagaagcgtcagcgtcgtcctcgtcgcgtttgtcttcttcttctccaaaccccaaaacggcatcgtttagacattttctcaaccggagttctaaatctaccgctcaacaaccgtctcatccgccgccgggaaaagactcagatatcttggagtcatcgtcaacgtctatctcctcttcacgtctctctctttcgtcgtcttcttcctccggtcacgagctagacgaccttccaagactatctttagatctcgacaacaaacccggaacaccaaacccgttcgctcggtcacgtgcccaccaccaccaccacttgcgtaaccaaaaccaaccaagaaagccacgacgtcacacacaggttgatgaatcaacagagagtagtattgagtcgagagtaatgacggtgacggcggatagtccgagactcaatgcttcggggaagatcgtgtttcatggactcgagagaagctcaagcagtcccggtaacttcactggaggaccaagaatgaagcttcaccatggaatgccgagatctcactcagctaatgtcagaatcactcctgttctcaatgttcctgtctcttctctccgtagcgggcccaaatcaggcctcttttttggccagcttttcgcttcttcttcttcagcttcatcgtcttcgtcgtctggaaacagagcacagttgcagagcaataacatcaagaaccgtaccaatcgaagcagacttgaaccgacaagcgaactctaagtaccgaaccggattctaattgtaccgactttattaggtggtaaatgtttcacttttagttttattggggttgtttcgttagataagattagatttgggtccagaatgtaaataattttgattttcgttgaggttatttcttcgtagagcgggttgttcgataacaagtcagtcattaataataactgtagcgagagtgagaagtgcttcccatgttcagagatcgattccagagatattaaaccacatgctttgataatataaacaagttttgactc

SEQ ID NO: 759 - DNA, 2009 bp, Arabidopsis thaliana
  Clone ID: ARATH-23APR03-CLUSTER28548_1
tcactagtccccccccattcggcgaaagcacaaaagaaaaaaacacaagtttcctgattcctctcttctctgcgattttagctctagggatcgatttcggcgtcaaacgtcgtcgttttcgaccatctcctacttactactactcagctgcttctgccttctagggttctttctccgttcaccctccgccgcacgagttgtccagctccgccgcattcttctgtctcccagatcaccggcttttagcaaatccggctgcttttcactctaattcgtaaaccacttgtgggatttgagcatcttttacattctccaaaatctctgctttctagggttttgtgagttttggtgggatgagtagtgtgttcagtgatcagatcctgattgataagctcgctaagctcaatagcagtcaacagtctatcgaaactctgtcacattggtgtatattcaatcggagcaaagcagaattgatcgttacgacatgggagaaacagtttcacagtacagagatggatcagaaagtccctcttttgtatttggctaatgatattcttcagaacagtaagcgtcaaggtaatgagtttgtgcaagagttctggaatgttcttcctaaggctcttaaagacattgtttctcaaggagatgataatggcaaaagcgctgtcgcacgtgtgatcaagatatgggaagaaagaagagtgtttggatcacgttcaaagagtcttaaagatgtaatgcttggagaagatgttcctctgccacttgatatcagcaaaaagcggcctcgcggatccaaatcttcaaaacgggagtcaaaatcgtccagaacgaaattaacatcaagtggtggtgtggctgagaaggtagcatcagcatatcatttggttgttgcagaaaactcaaatgaagaagctgagatgaataaatgtaagtctgcagttaaacgaatccggaagatggagaaagatgttgaagaagcctgctctactgcaaaagacaacccgaagagaaaatctttggcgaaagaattggaagaagaagaataccttttgagacaatgtattgagaaacttaaatctgttcaaggaagtagaagttcccttgtgaaccagcttaaagatgcactacgtgaacaggaatccgaactggacaatcttaaagctcagattcaggtagctaaagaacaaacagaggaagcccaaaacatgcagaaacggcttaatgatgaggattacacatcaaaacaaacaactgctgccactacgataaccgagacaaatgacaacaccaaatctggtcaagcatcaaaaatgacgcctgcatctattgctgcaatgctcacagcgtcaacctcatcacatatgataatgcagtctgttctatcttcattcgcagctgaagcaacaaagacttctggtctatccaaatcagagagcacagttccggtctcagacactaatgcttcattcccttcttacaacaactcccagaatcagacacctaccacacaaggtcagtaccatgtaatacctaatccaccaccaccacagttcctaaaaccaccggtaatgaataacccttacgcctttggcaacattccgttaatgccacctgggcttccgccaccaccaccaccaccacatttgataggtaatcaacagcctcaaattcctcagtcgaactcagctcagcaatctcaacaaggtccaactttccagccaccagggataatgtattacggagctccacaccattcttaaaatagaaatgatgttagttaatagctttagatagttctgaccctttttatctgctcgaatgcggtttcgatgttacattgttgggtcaaatcaaagtagaactactgttcctctggttgtagaatcctcaccttttcccgttacagatatttgtaccacaagtttctacaacataatgtaataatttctcctgttcaaaaaaaaaaaccttcctgtatgtatgtatacttctataccttaagaacc

SEQ ID NO: 760 - DNA, 1727 bp, Arabidopsis thaliana
  Clone ID: ARATH-23APR03-CLUSTER28597_1
gccaccagaaaaagaaacaatttgacagattcattcattagaagaagaagacaacaatccatcttcttctccccattcctcgtttcaattttgcagatctcgtctccttctcgatttattattaatatagagatggcaagttcaaaggggtctcagaatcatagaaatctgggatgcaatgggaaacaagctttactgcctccgaaaagtccgtttacgggtggtccaacgtttagtgcagattttgttccaagtagtgtgattggatccaaggctgttcagaagcttggagaaggaaatgccaatcatcatcgaacttcatctgagagttttcttattgaggaacagccttcttggcttgacgatcttctcaacgaacctgaaacacctgtacggaaaggagggcatcgacggtcatcgagtgattcatttgcatatgtagatgttcctgttggttttgatgttgattacacgctttgggatggtggtagatataataacaataatggtttctctaatcacgttagaggtcccaaggagtctgattaccttagaagccagcctgttcctttctacccttcagctcatttgtccaaacagaaaataagaccgtgggattcattaccagattccggtgctcgcccgaacagtagttctggttgttaggagagcagctctatcacaagatcagggtcttctggtagcctacgtgatacagaaaaggcttattctgctgctgatagcaagaaagatttcataaataatttcgcaaagtcgtcattcgaaaaacgggataatcctctggctaagtctgctacttccgaggctgatacgaaacgtgctagacagcagtttgcacagcgctctcgagtccgtaaaattcagtacatagctgaactggaaaggaacgttcagatgttacaagtatagggttctgaagtgtctgcggagcttgagtttctcaatcagcagaatctaattctcagcttggagaacaagtcccttaagaatcggttggaaagcttagcacaagagcagcttataaagtacttagaacatgatgtattggagaaagagattgtgaggctaagggctttataccagcttcaacagcagcaagagccgcagcagcaacatcagacaaaaaagcaaggatcatctagccaccagcgttcgaagagtagagatctagagacgcaattcacgaatctgtccttgaggccttaacagttcaaagttcctgccgaaaatagttttatgcttatggctagagcttgagctgtcttcatggttccaggccagcttcttgtgtgtctttccctatcgcattagtagctgctcagtttgtgcttatgcttcttagtttattttcatctttgttgacccggtttgacatctcgatgagcaagtgccagcgattgatgggaaaacggcataaatgaaacaacgagttcgctggaggcggtttggtctgtctctgcgcacatcagggctctcaaatctcgggctgtgtctcgcttgtattgtgtgtctgaagagaatgttccctgtaaaacgtgtagtggtgtaagctttgtatcaactgtcgtttgtcttgctcatctgtttgtgtaaccaaattctcatcatttatcagaaacttgaacaccttaagaaatattttggttctgatgtaacgatagcaaatttaacgtttgaaactactaataaaatgttgaccgttcttc

SEQ ID NO: 761 - DNA, 1324 bp, Arabidopsis thaliana
  Clone ID: ARATH-23APR03-CLUSTER28602_1
gatttcctagttttagggttcctcccggcaacgaacgcagagaaatttgaaaagatgaatccattgacgcaggtgaagaatctacagaagataaacgctagggaatcagatttaggaatatctgatgaagcttcatggcacgctaagtacaaaaactctgcatatgtctacgtcggaggcataccgttcgatctcaccgaaggtgatcttctcgccgtcttctctcaatatggtgaaattgttgatgtcaatcttattcgagacaagggaacgggtaaatctaaaggttttgcttttcttgcttatgaagatcagagaagtaccattcttgctgttgataatctgaatggagctcttgtgttgggacggaccattaaggtggaccattgtggggcatacaaaaagcacgaagaggaggatgaagagacgcgacgccagaatagagaggctcgtggtgtatgcagagcttttcagagaggagagtgtactcgtggtgattcttgcaaattttcccacgatgaaaaaagagctgcaaatactggttggggtcatgaagaggatagaagttccaagtgggatcatgataataatagagagggtcgtggtgtttgcagagcttttcagagaggagagtgtactcgtggtgattcttgtaaattttcacatgatgaaaaaagagctgcaactactggttggggtcatgaagaggatagaagttccaagtgggatcaagacaagttaaatggtgctaaaaagggtggtacaagttttggcaatcgaggagatttcaaacctgatgtggaagagaaaagttacagaggaaggggtgatggagatgcctcgtatggccggcctaaagagagagaaagagtggatagggaggatatggggccaaggtcaagagatgcttatgatatgaaggaacaaaagagatcaggacggtatgataatgcgcattctagaaggcacaatgatgaaattgattatataagggaggacaagggatccagagcacaagattgggagaaaaggaaggcagaatctagaagagatcgtaacgacagggaggaaaaagatagggattcattaagaagggaagatcgccgtcgttaaaggggtagatagtggtatgcatactcaatggttttcagttttagctagtgtctgtggaaatgacctttgttctttccaagagagttacctgtggttatataaactgcttcattctgtaacggggattctatgtttgttgtgacacctgagacttgttgatttttccgtttggaatgaaagaagtcgttatatccaaaaaaaaaaaaaaaaa

SEQ ID NO: 762 - DNA, 2062 bp, Arabidopsis thaliana
  Clone ID: ARATH-23APR03-CLUSTER2870_1
gaatttgagatatttactagtcagaaaacaccaaaaccctccgtttcgtgggtttcctccagaccttgagctccttgttcaattcacactttttctctcccaactcttcttccaggtttcctctgctactctcaggtcttgttagggaagtaatcagtggaattggatttagtcttttggttctgaattttgtaaagtcctgcagtgattggtctcattatggcaacttacgtttcaccgtgttttactccttcggattctcggttactaactgttcttagaaagaatgttttaccggagaatcatttaggcaggttgaactccattagaacgattgacagtaagaaaaaccgagttgttgttgccgctcagaaatctgaatcttctccaatcagaaactctccacggcattaccaaagccaagctcaagatcctttcttgaaccttcacccggaaatatctatgcttagaggtgaagggactagtacaatagtcaatccaagaaaggaaacgtcttctggacctgttgtcgaggattttgaagagccatctgctccgagtaactacaatgaggcgaggattaaggttattggtgtgggaggtggtggatcaaatgctgtgaatcgtatgatagagagtgaaatgtcaggtgtggagttctggattgtcaacactgatatccaggctatgagaatgtctcctgttttgcctgataataggttacaaattggtaaggagttgactaggggtttaggtgctggaggaaatccagaaatcggtatgaatgctgctagagagagcaaagaagttattgaagaagctctttatggctcagatatggtctttgtcacagctggaatgggcggtggaactggcactggtgcagcccctgtaattgcaggaattgccaaggcgatgggtatattgacagttggtattgccactacgcctttctcgtttgagggtcgaagaagaactgttcaggctcaagaagggcttgcatctctcagagacaatgttgacactctcatcgtcattccaaatgacaagttgcttacagctgtctctcagtctactccggtaacagaagcatttaatctagctgatgatatactccgtcagggggttcgtgggatatctgatatcattacgattcctggtttggtgaatgtggattttgctgatgtgagagctataatggcaaatgcggggtcttcattgatgggaataggaactgcgacaggaaagagtcgggcaagagatgctgcgctaaatgcaatccaatctcctttgttagatattgggattgagagagccactggaattgtttggaacattactggcggaagtgacttgacattgtttgaggtaaatgctgctgcagaagtaatatatgatcttgtcgatccaactgccaatcttatattcggtgctgttgtagatccagccctcagcggtcaagtaagcataaccctgatagctacgggtttcaaacgacaagaagagggagaaggacgaacagttcagatggtacaagcagatgctgcgtcagttggagctacaagaagaccctcttcttcctttagagaaagcggttcagtggagatcccagagttcttgaagaagaaaggcagctctcgttatccccgagtctaaagcccaatctaatcactaccctgcacactgcagcaataacaaacgtgtgtgtactggtagtctggtactgccttctgggatacagcaagatgtgttgatgtatgatcaagaatctgtgtgggtgtgtatatgttctgtcactgcctctggtcgtgttcttgaataggttgttttagaaatcggagtttctctctatgtcacttccaaaacaaaaaaggagaagaagaatcacacttctcgaaccataaacatacttataagattatgagagttttagcagaaattattgtcaaaaaaaaaaaaaaaaaaaaataaacatactttataagatttatgagagtttttagcagaaatttattgtcatttttcattcagttaataaaaaaatcaatagcgatataccagc

SEQ ID NO: 763 - DNA, 1303 bp, Arabidopsis thaliana
  Clone ID: ARATH-23APR03-CLUSTER29025_1
ataaacaacaactctctcaccaatctcaaaacaattctctctctctttattcttcttcttcagcttcagatttcagatcttaaatcttcaagtcttcttcttcttcttctgcaaccatggctatgcaggttaaaaattgtgttaatagaccaggcgattttgtgggatattatggtcggttgttttaaagagagattacttctttcttaatgtattgatccgtattaggaacgttgtgagagtttatgttctgatgaacttatatcttcctcagatgccttttacctcaagacaagaaagccttataccatcactaaacaaagagagaaatggacagaagcagagcatgagaagtttgtagaagcattgaaactctatggcagagcttggagacgaatcgaagaacatgttggaacaaaaactgcagttcagattcgaagccatgcgcagaagttctttactaaggttgctcgcgattttggtgttagctctgagtccattgagatcccgcctccaaggccaaagagaaagccgatgcatccttaccctagaaagcttgtgattcctgatgcaaaagagatggtatacgctgaactaaccggatccaagctgattcaggatgaagataaccgatctccaacatcggttttatcagctcatggctcagatggattaggttccattggttcaaattcacctaactcttcttcagctgagttatcatctcacacagaggaatcattgtctctagaagcagagaccaaacagagccttaagctctttggaaaaacttttgtagttggtgattacaactcttcaatgagttgtgatgattctgaagatggcaagaagaagctatactcagaaacacagtctcttcaatgttcttcttctacttcagaaaacgctgaaacagaagtggtagtgtcggagttcaaaagaagtgagagatcagctttctctcagttaaaatcgtcggtgactgagatgaacaacatgagagggttcatgccttacaaaaagagagtaaaggtggaagaaaacattgacaatgtaaaattatcatatcctttgtggtgaagtgttcgtttgtgtcaagtcagttgtgtaaactcttttgatctcaacatcagattatgtgtataatgtcagagtattagggaaagtttttttggattagattcgtaagatcactccaaagtttcgtgtctttccatataaccagttagaaattgagatccttgtacttaaacatttttatttgatcaatcaaatcttcttgataactctaaattgttgtacc

SEQ ID NO: 764 - DNA, 1586 bp, Arabidopsis thaliana
  Clone ID: ARATH-23APR03-CLUSTER290_1
gaattggctgtgtctctctccatcgcctccttcttctctgacaaactctcctccgttggtcggagtttgtttcttcgctcgttcatcacaagcttcgtgtactggtaattgttccattttttctagctatttcggaaaattggatggaagaagcatctgaaatacgcgtgtaaatgtcgctgattgtgtcgttgaggcagagccattgttgattcttagagaaattttgctcctttatttctccagtttgttaaactctcgattacgcccttgaaatgcattcgaccgggaagagaaatttcttagctgttatcagattattgtttactagttcgagcttggtcagaaaggctggttgtagaaatctcatttctgctacctttaccaccaggtgttcgacgttatgcctgaatgaatctgaagaatgcattgaggattctgatctatcgtctaggagaaaaaaatttgattatgttggagaagttggtgaaaaagagaaagtgagagatattactagtagtcctttacaagttttacgaagatggggttgtgatgatgaggaaatatccaagctttttactcgtaggcctgctttgcagagagccaatgttgctcagttagagtttaagttaagccttcttaagccactgggaatcacgtcttcagaccttgtgaagattcttaactgtcgtcctaggttctttagttgccgtcttgtccttgatgaaaggatcaactacttcatggagattttggggtcaaaagaggtgttgcgcagagtcattatccggaatccgtcactcatgttgtatgacctcgatgacaagatcaaacccgcgatagaatactacaaagggttgggctttagccaacaggatcttgtcgcaatgttgatatcgcgacccacgttgattccaagaacaaactttaacaatgagaagtttgaatacattgagaaaactggagtcaccagagaatccaagatgtttaaatatgttgcagtcatcatcggggtctcgaggatggagacaatcgaagagaaagttagaaacttggaaaagtttgggttctcggaagaagagatttggcacctgtatggaaaatgcccaatccttctctctctctctgttgagaaagttcagagaaacatgactttcgtcatagcctcgatgaaacttccagctcattccgtggttaagcacccttgtttgcttctcctcaacctcgagtctcgtctaaaacctcgtgcggatctcgttaagagagtcttggaaatgcgtctaaagccattgataaaagaagtgagcattttcagagcggtaaggatgagcgagaaacggttcttgaaggtttatgtaatgtgtcatccacaagatattgcaaccgagctgatggagttttacgagaaatccaaaaacatgaaacgtttagctgagaaatccaagaaatacatccgtaaaggattccccttttgaatctctttttcatcttttgtttctttggatatgttcattaaagatgtaacattgtgtagaattttccagctttatcaatggatacttttgaaccaaaaaaaaaaaaaaaaa

SEQ ID NO: 765 - DNA, 2706 bp, Arabidopsis thaliana
  Clone ID: ARATH-23APR03-CLUSTER2912_1
acggcagtgttggatcggaggattttgatctgtggagacgaatatgaaaggtgaaacttatcgagtgttctgtgtcggaaccgccgataccaagcttgatgagctacgattccttgctggatcagtgcgatcaaatatcggcgcattctccaaaaactcgtcttccaaggtaagattagctctgacgaagaaagactcacctgaatcactattgaccaattttacgaaatatgaaggatttgactcaattttaagttttctggagaattggaagattgtgaatggttgatatttttgtgagccgttttattggaataacaggttgaggttgtgattgtggatgtttcggcgggtgctgatcagaagcagatcgataatgttgcagactttgcgtttgtaacaagagaagaagttctctcatgctacattggatcgaaccaggaggaaaaaccggttaaacttccggatgatagaggcgaggcagttggtgtcatgagcaaatgtcttgagaattttcttaggcaagcctttgaggataattctcttgctggggctataggccttggcggaagcggaggaacatcgctcatatcatctgcttttaggtctctccctattgggattcctaaggtcattgtatccactgtggccagtggtcaaactgaaccttatgttgggacctcagatttggttttgatcccttctttagtagatgtttgtggtatcaacagtgttagcagggtggtcttttcaaacgctggggcttcttttgctggtatggtagtcgggaggcttgagttgtttagaagctccccaagcgataacggcaaatgtactgtgggcataactatgtttggagtgacaactccatgtgtaaatgcagtccaggagatattaacaagagaaggttatgagacactagtgtttcatgccactggtgttggtggcagagcaatggaatctttggttaaagaaggatttatacagggagtaatggatattacaacaaccgaggttgccgaccatctcgttggaggggtgatggcatgcgatagttcccgttttgatatcaccatagaaaaaggaataccgttggttttaagtgtaggtgccttagatatggtgaactttggtggtaaagatacaataccttctcatttccaaacgagaaagattcacgtccacaacgaacaggtttctctcatccgaacgacagcagaagagaataagaaatttgcaaggtttatagcagataaactgaacaaatcaacatcaaaagtaagggtttgcattccagagaaaggtttatctgcactggatgctccagggaagcctttctgtgatccagaagctactggtgctctcataaatgaattacaggggctcattcaaactaatgatgacagacaagtcaatatttattctcaccacatcaatgaccctgagtttgcagaggcattggttgcttcatttcttgagatttgtccaaaaacttacgcacaaatcaaaccctctgaaacgacttcgactaaacctagtactggagagcatgatgatggacatgtgagatcgaggcttgaaaggattccatacagtcctaaagagtttcccaatgcaaagccagaaaccttggaacgaactcaggccattttgggacggttgagagatcaaatagagaagggaataccaataattgggggaggtgctggtactggaatatctgcaaagtttgaggaagctggtgggattgatttgatagtgatatacaactctggacgttttcgtatggctggaagaggatccttagcaggcttacttccatttgctgatgccaatgcagtcgtgcttgaaatggcaaatgaagttttacctgtagtgaaggcggtgcctgttctggctggggtgtgcgcaacagatccatttcgtcgtatggactatttcctgaagcagttggagtccattgggttcgttggtgtccagaactttccaactgttggtctctttgatggtaattttagacaaaatcttgaggagacaggaatgggatatggtcttgaagttaaaatgatctcagaagcgcacaaaatggggctgttgaccactccatatgctttcaacccaaaagaaggagaagaaatggcaaaagcgggagctgatatcatagtagcccacatgggtctaacgacatccggaaatattggggcgaaaaccgcagtttcagtggaagaaagcgttgttcgtgtacaagctattgcagatgctgctcgtagattcaacccagacattatcgtcctctgccacggaggtccgatatcgggtccagaagaggcagagtttgtgttgaagagaacacagggttgtgtccatggcttctacggagcatcaagcatggaaaggctacctgtagaacaagcaataacaaacactgttcaaaaatacaagtccatatcgatcaagtgaagtcaaaataataagttcacttagaaacctttatctttggtgtttctagtatatttgcatgtgttgtggcctatgggtgtggatgtttccttttgttgcatggttttttttttctggtcatctttgattgcctctgcaggatcttatatgatctctagttctgtattacacgtttttgtattttaataaagttcatagtgctcaactctcaaaaaaaaaaaaaaaaaagggcggccggtcagtagc

SEQ ID NO: 766 - DNA, 3212 bp, Arabidopsis thaliana
  Clone ID: ARATH-23APR03-CLUSTER29259_1
cttgttccttcttctttcttcttctccttcgtcgacccaaactagtttcaaatcccatcctctcgtactgatttatcactcgcctcttcgtatacatatataggtactcagacctcttttggtctaggtccagatttcgattcctgttaaaatatcagaagcgagattttacgtttgatagaagagaggatggtcggcagtggcgctagggtttcgatttcggctactactcggaagatgattcagaacattaaggagaccactgctgggaactatagcgaggatgagattatcgcaatgcttcatgaatgtaacatggatcctgatgagaccgctcaacgcttacttcttcaggatccattccatgtgggtattgccaagcgtgttgagagggtacagaacatcaacaacagggattctgctgaatcacaatggagatctggtggagggggccgtggtagcaggggtggtcggatgaatttctcttctcgtcatgcatcaaatgatgttgctggtgcaaagaattctttcaaaaaagaaaacggtccaaagcaggttattgatccatcaacttcaacctctcaagagataaaaacgaaagatatagctctggtctcaagccattctgctgtgatggataaaagtactgttggtccgaaatcaggaagctctgatgttcgccagtcttccaacctaccagctggttcaggtcaacttaaagctggccgatcttcagtgccctcaaacaacattgatggtgcaccgtcttctgtggaattaagcaaaaatcgtgtagcagttggctctagggttgtgcatactgagcagaaggcagttgattctctgccactccctcgtccatcctcttctgaagttcgattcacatcttcaaatcccaaatcagagcaaacagcacctgaacagcacattggagaaagcaagtcccataccagatcccgtggggttgggaagactgccgtgaatgatacttatggttcaaggcctgcttcatctcatagcaacagcacgggtagtcggccttcttctaactacagtaatcggtcacatcagactgtcggtcctcaaagaggtgctggttccattaaggaatggaaaccgaagccagtagtgaaccataacactacccagggctctggtgcatcatctacaggtgaaactcttgcagttcctactgaagccagtgacaaatcagttgaagatgctaccccttcggcagaagccacatccagattgcagagacagcttgaagacttgcagattcaacgtcagcatgttattattccaaaccatattcttgttccagaggctgaacgaaccaagttaagctttggaagctttgatgctgacttttctattacgtctagcacagtagcctttcctcagagtgaaaagagatctgcacctctttctcataattcgcaggaagttgaagaaagttttgcagaggaggaatttaggcacccaactgtccattcgattgaaaaagaagaggacggtaatgtttactccgagtcaccttcacaagttccagataatatggctggtgaaggtaatactgcaacaaatacagctccagagtatgatgtcaccaagcaggagaatatgttggagtccgaaagcaatcaaaactcgtttgaccaggttccaagtaatattattgggattgttcctccagctcctgggaaccagcatccacaatttgagacttctgaccctcaagcacgtgatgcccttcgtcttcccagttttatgggccaacaaccttttgatacggcgagctactatgctcagttctaccgctcaggtcctgacagtgatggccgtgtttctcccttcgtttccccaggggttgcctccaaatttaatgggattacagtattgcctccgcattcatctcaaaccatgcaagagggtggaaataacttggtcctgtctactgctagtccaccaccactggtaactcaagctgctggactaatgcagagctctatacctgtcacgcagcagcctgttcctgttttccgccctccgggcttacatatgtcgcattatccaccaaactacgtgccatatggatacttctccccattctatttacctccccctacaatgcaccaatacttaagcaatggtgcatatgctcagcaacctcaggcaagcggtgtatatcctccacctcctggaactgcaacaggaggcaaatacacactccctcattacaagcctgggactaatacaggaaacatgactcatgtcggtattactggtgggtatggaccaacatatgggtctttcccagcaggatataatcccacctctgctgcatcggccgggaattcgacttccaatgaggatctcaactcattgcagttgaaagaaaacaacggctacagtacaacagggcaacagagtgaagcattacctgtatggattactggaccaggacgagatgtgccaagctctttctatggtttacagcaccatgggcaacacgtgacttatgctccagcacaagctggtcacgtcgcattcccaggtatgtaccatccgggacaagcagtaacagcaacaggagtccatcatccgcttttacaacagtctcaaggtgtggctggagctgaaatggttgcacctgcgcctaacgttttccaacagcctcagcaaacacagatgaattggccaagtaattactgaaacaggaagtataaaggagaaaaagattttgaagattcaacaagtttcaaattccagagaaatcaggaaagatatatgggtgcgggtttttgttgacttgcgtgtgtgtgtgtgtgccatctaacaaattaccaaagagatgaagctatgaagttgaaggcttaagcatgaaggagatttacagagagaatgatcataagggtagggaaaggtattgtatgaaaccagtgttttggtgttttctatatctttttttttttcttttgatttagcaaatttttttctttcttagcttttaagaggtcttttttagctctctttttaagtttctgagctaagacaagaactttgctacctgagtctgtatctgaagactcttcctctcttccttcttttcttagcctttggtcaatgttttcaaatccgagtcagcaatcaaattggacaaatttcttgctcgcgaatcaactttctctgaatgtttattcctcaatttg

SEQ ID NO: 767 - DNA, 1476 bp, Arabidopsis thaliana
  Clone ID: ARATH-23APR03-CLUSTER29761_1
tagtccccccccccccccgattatcaacagtcttcaacttctcatctctttcttcctccatgagagacttgagtaaataatacatagttttaaatttccccttttctaatcttatctctcccaaatacataaacccatcccaaagatttcgagtttacaatttaaaaacagttttgtttagtgcaatctttaccttatctttacttctatcatctattcttcttcttcctccatctctagaaaattataatacttcttgtttcttaaatcttatttgtattacaataaccaaaacccaagtttacaaaacatttcttcttcttgtttttcgaaaccctaaatgttttgagttgtcatggatgtaatagctactacaactactatagtatccgacttggattcacgacaacccgaaatcgaagctccgatccggatccagcccgcgaagcctatttctttctcaaacggcaaacgctgccaccaccatcatcttgcatctgaagcggttgcggttgcgacttataaagaatgtctaaagaatcacgcagcaggtatcggcggtcacgctttagacggatgcggcgagtttatgccgtcaccgtcgtttaactccaatgaccccgcttcactaacgtgcgctgcttgtggttgccaccgtaacttccaccgccgtgaggaggatccatcttctctctctgccatcgtccctgcgatcgaatttcgacctcacaaccgtcaccagcttcctccaccgcctcctcctcatctggcggggattcgtagtccagacgacgatgattcagcttctccaccgccgatctcgtcttcttacatgcttctcgcactctctggaggaagaggaggagctaacacggcggttccaatgtctaggaaacgttttaggacgaagtttagtcagtatcagaaggagaagatgttcgagttctcggagagagttgggtggaggatgccgaaagctgatgacgtggtggttaaggagttttgtcgggagattggagttgataaaagcgttttcaaagtgtggatgcataacaacaagatttcaggacgcagcggcgctagaagagctaacggcggagtagtagtaggaggagtaggagatagtcgtcagagtgttgttccgacaaatgggtcgttttcttcgacgtgaggaaaagaatggaaagcgttgaaaaagcgtcgtcgttttagaggctaattcttttttggtttttcttctctgtgttttgaagattttttatttttagtcaacgggtcaaaatcttttttctattccactttgttttgttatgtcttgtagtttgtactcttgttagtagtttatctttgttagagaggtgatttgagttgtatctttcgaccaaatgtgagaagaaagataaatgagtaacctaaaaccgaataacaaagtcaattaatccaattgttttctaaattcaaaaaaaaaaaaaaaaa

SEQ ID NO: 768 - DNA, 1838 bp, Arabidopsis thaliana
  Clone ID: ARATH-23APR03-CLUSTER29795_1
atgtttaaaccccaacatatgtatgacagggaatttggtaccggcaacggctacagcaacgggaacggctacaccaatggaaacggccacaccaacggaaacggcaattacaacggcaatggccacgttaatggtaacggaaaagctaacggagccaaggtggtaaagatgaaaccaatggacagtgagttgctgagagagcaaggtcacataatggttgattttattgctgattattacaaaaaccttcaagactcgcctcaagatttccctgttctgtcccaagttcagcctggttatctccgtgacatgttgcctgattcagcacctgaacgacctgaatcgttaaaagaacttctcgacgatgtttcgaagaagataatgccggggataactcattggcaaagcccgagttactttgcatactatgcatcaagcacgagtgtggctggattcttaggagagatgcttaacgccggcctgagcgtcgtcggttttacctggctcacttctcctgccgctactgagctcgaaatcatcgttcttgattggcttgctaaattgctacaactccccgaccattttctctccacaggaaatggaggaggagtaatccaagggacaggatgtgaagcagtgcttgtggtagtattagctgctagagggagaatcctgaccgacccacgcgtccgattacttcctcaacttgttgtctatggctctgaccaaacccattctagtttccgaaaagcttgtctgattggtgggatacatgaagaaaacattaggctgctcaaaactgattcttccacaaactatggaatgcctccagaatcacttgaggaagctatttctcatgatctcgctaagggttttatccctttcttcatttgtgccactgttggcacaacgtcttcagcagcggttgatcctttggtcccattggggaacatcgcaaagaaatatgggatatggttgcatgtggatgcagcttatgcagggaatgcatgtatatgtccagaatatcgaaaatttattgacgggattgaaaacgcagactcctttaacatgaatgctcataaatggttatttgctaatcaaacttgttcacctctttgggttaaggatcgatactctctcattgatgctctcaaaacaaatcccgagtatctagaattcaagggtcaggtttccaaaaaagatacggtcgtaaattataaagattggcaaatttctctctctcggagattcagatcactgaagttatggatggttttacggctctatggttccgagaacttaagaaactttataagagaccatgtcaatctcgctaagcattttgaagattatgtagctcaagatccaagttttgaggttgtcactactcggtacttttcactcgtttgctttcgccttgcgccagttgacggcgatgaagaccaatgtaacgaacgtaaccgtgaactgcttgcggctgttaactccactggcaagatattcatctctcacacggctctatctggaaaattcgttttacgatttgctgttggtgcaccgttaacggaagagaagcatgtcactgaagcatggcagattatacagaaacatgcctccaaatttacacgcaacgaccattattaataatatttcaaaagaaacccactatcttttttatttcgatcaataaagtcctttattttcaacgatttccactggagggggacattgttatgctattaggaataaacttatcaaatcctcttttattaaaacaaaaaaaaagttgaaagccgtaaaatttgttccttctaaaaaaaaaaaaaaagggcggccgc

SEQ ID NO: 769 - DNA, 2223 bp, Arabidopsis thaliana
  Clone ID: ARATH-23APR03-CLUSTER2980_1
aaattaaaatagaattgagaaaaaaagtttgatcagccatcggaggagaagagagaatgatagataactggatcacgagaagtcacaaatctcaaagaagaagaaagaaaaccaaaatcaagaacaataacaacaattcgcaatgatttgagccaaatctaaaggatggagttgatgaaattgttcttctagatgtttgttttggggatatgaacaaagaagaatctgagtttaatacactatgtggaaacagattctgagtaagcttcctaagaagtcttcttctaagaaccattcttcttcatctagttccacttcaaaaagtagtgataatggcgccggtaaatcgggtaattctcaaaccaagaacgctcctcctgtaaaaccttctgctgattcagggtttaaagaagggaatttgaaaggaaatggtagcggtttcactccatatgaagcattcgtgaacacggtggccattcttaatgcagagaaaaagaactagtttgtgagacttccaaaagcactgataatggcgccgcgaaatcgcatgctaagaacgcttctccagccggcaaatccgctgcttctgactcgggttttaaagatgggaatctaaagagtagtgggaacaacaacaacaacaacaacaacgcaagaagtggttagaatggtttctgttaacatattcagaaccttgaatcctcaacaaagcaaaacttgttcattaaaaagttgaacttgtgccgtgtagtgtttgatttcacggatcctacaaagaacatcaaggaaaaagatattaagaggcagacattgctggagcttgtggattatgtgaattctcctaatggaaagtttagcgaagtcggtatccaagaagtcgttcggatggtctctgctaacatatttagaacgctaaatcctcaaccacgggaacgttctacatcgcatctacggtaaatttatggttcatagtcctttcataaggaagtccattaataacattttctatcggtttgttttcgagactgagaaacacaatcgcctgaaactgacaccaagctggctaagagatatatagatcaatcttttgtcttgcggttactggatttatttgattccgaggatcctagagaaagagattgtctgaaaaccattctccatcggatctatggtaaatttatggtacaccgacctttcatcaggaaatccattaacaacatcttctataggtttgttttcgaaacagagaaacataatgggattgctgagtttctagaaatcttgggaagtatcatcaatggattcgctcttcccttgaaagacgagcacaaagtgtttcttgttcgagttttgatacctctccacaaaccaaaatgcttgcaaatgtatcatcaacaattgtcttattgtatcacacagtttgtggaaaaggattgcaaacttgctgatacggttataagaggattgttgaaatattggcccgtgacaaacagttccaaagaagtcatgtttctgaacgagttattggaagcaagctaagcaactcagccaccagaatttcaagggtgcatggtaccactgtttcgccaaatagctcgatgtttgaacagtctgcattttcaggttgcagagagagctttattcttatggaacaacaatcacattgagaatctgataatgcaaaaccgtaaagtctttcttccaattatattcccagcgtgggagagaaacgcacagaaacattggaaccaagctgttcatagcttgacactaaacgtgcgaaagatatttcatgaccttgaccctgagttatttaaagaatgcctcgcaaagttcaaggaagatgaatcaaaagcagctgaaaccgaagcaaaacgtgaagccacttggaaacgtttggaagaactcggagtgcgaaaggcttcataaagttagagttgtagagaagaaagagagagaaagagagcttctgtatcttctattgacatgttgttcttcagatacatacttgagaagagaaaagtttcatattggtctcttggtttgaaggaaaaaggaaactcaaagatgtaagattgttcctgttttgatttccattatttttatttcttgtttcctcttaaatcttcctgcttgttaaaatgggttatttttgctacattgtatgatcatcacttgttccactttcttgagacttgtcttattcattcatcaaaaaaaagc

SEQ ID NO: 770 - DNA, 2165 bp, Arabidopsis thaliana
  Clone ID: ARATH-23APR03-CLUSTER29842_1
gaaaagaaaaaggaaattcaaccacaaccttcgtcttctcttgaaactctcctcatctctctcaagaaagattcaagttcgagtcttagctatgtctggaaactcagaaggactgttagagagctcaggcggcggcgtgggaggttccgtcgaggaggaaaaagacatgaagatgcacaaaagtcgtgaaaaaggaaattcaaccacaaccttcgtcttctcttgaaactctcctcatctctctcaagaaagattcaagttcgagtcttagctatgtctggaaactcagaaggactgttagagagctcaggcggcggcgtgggaggttccgtcgaggaggaaaaagatatgaagatggaggaaaccggtgaaggagccggcagcggaggaaaccggtggccaagaccagagactttagctctattgagaatacgttcagagatggataaagcttttcgtgactctactctcaaagctcccttatgggaagaaatttccaggaaaatgatggagcttggttacaagagaagttcaaagaaatgcaaggagaagttcgagaacgtgtacaagtaccacaaacgtaccaaagaaggtcgtaccgggaaatccgaaggcaaaacttaccggtttttcgaagagttagaagctttcgagactctcagttcctatcaacctgaacctgagtcgcaacccgcgaaatcttctgcagtgatcacgaacgcgcccgcaacctcttccttgataccatggattagctctagcaatccatcaaccgaaaaaagttcttcaccgttgaaacatcatcatcaggttagtgtacaacccatcaccacaaaccctaccttcctcgccaagcaaccatcttccacgacgccttttcctttttatagcagcaacaatactactactgttagccagccgccaatttcaaatgacttgatgaacaatgtttcatcgctgaatcttttctcgagctcaacttcttcatctactgcatctgacgaggaagaagatcatcatcaggttaagagctcgagaaagaagaggaagtattggaaagggttgtttacgaagttgacaaaagagttaatggagaaacaagagaagatgcaaaaaaggttcttggaaacactggagtatcgtgagaaagagagaatctcaagagaagaagcttggagggtccaagagatagggagaatcaacagagaacacgaaacattaatccatgagaggtccaatgctgcagctaaagacgctgcaatcatatccttcttacacaaaatctcaggaggacaaccacaacaaccgcaacaacataatcataaaccatcacaaaggaaacaatatcaaagcgatcattcaataacgtttgagagtaaagagccgagggcggttctattggatacaacaataaagatggggaattacgataacaatcattcggtgtctcctagttcttcaagatggcctaaaaccgaggtcgaggccttgataaggataagaaagaatcttgaagctaactatcaagaaaacggtactaagggaccattatgggaagagatctctgcagggatgagaagattgggatacaatagaagcgcgaaacgatgcaaagagaagtgggaaaacatcaacaagtactttaagaaagtcaaagaaagcaacaagaaacgtccccttgattccaagacttgcccttattttcaccagctcgaagctttgtacaacgagaggaacaaaagtggggcaatgccattgccattgcctctaatggtgactccacagagacagttgcttctctcgcaagaaacccagaccgagtttgagactgatcagagggaaaaagttggtgataaagaagatgaagaagaaggagagagtgaagaagatgaatacgatgaagaagaagagggagaaggagacaatgagacaagtgagttcgagattgtgttgaacaaaacatcttcacctatggacattaacaataatcttttcacctaagtggttttataatcattttattatatacactttcctgtaaaatggggttgaaggaaaaaaaaaaagcatatacaacaaatgtaagtaaatggcttgattttttagttattagtattccatttcgtgatatatttaataaaataattgattttaaagaaaccaaa

SEQ ID NO: 771 - DNA, 2126 bp, Arabidopsis thaliana
  Clone ID: ARATH-23APR03-CLUSTER2995_1
gatgcgtcaatcttaggtctccgaggtctcaattatttcatcttcttcagagatttccgtcaatgttactctggatgtgcttcgaggtctcaattttctgcggtgatttctgtaaaatcttctgggtgtgatgctcaatgttgatcatctgtggaatattgttggtcttctttagcatgagcaaagtgttggatttgttgaagtttgttagattgacggatgaatgatgatttagaagacgccggtgggaggaaaagaatctatacggcaggatctggaggttttaaccgtttcgaggaggcttgtgaaaagtgttggccatgaatagaagaaaaaaaatcataaagatgaggtggtagaagatggaggtggtgcaaggggaggggggaattgtttaagcatcagtgttggttgcagagttgctgatacgggtgaggattttgaggatttaagtaataagagatggtctagtgctagtgaggagggtaagggattgatgacaatttgtggaactgaagaaaataggttagattgtttttcttatggggttagagagaggttctggaagaagaataatagaagataactagcagactcgggccaggattaccgcaagcacgtttatcttcccgatgatattctggaaatgtgtttgatgaggcttcctttgaccagcttattgaatgcacaccttgtttgcaagaaatggcaatccatggccaacactcagcggtttctccagatgagacgagaaggctcctttcaaacaccgtggttgtttctgtttgctgctcttaaagatggatgctcctctggtgatattcacgggtatgatgtttctcaggacaaatggcataggattgaaactgatctacttaaaggccggtttatgtactccgtgacaagcatccatgaggagatttatatagttggaggtcgttctatggacagaaactctttcaagtcccacagagggatcttggtattcagcccttcgatcaaagcatggcgtaaaatcgcgtctatgagacatgctagatcacttcccattgttggtgccactgaagttacttcagagttttcgaccatgcagaccaaacagaatcgccaagatagacgctttcacctgtcaagagttggcggagagtcagacgtttatgaagaccctcacaggctatcggtaagacgacagaacagaaactcggctgatcaaaatggaaccaaatcccacagattaataagacaaaagcttgatcggcttaaccgaaacagctccaagagatttgtgctcattgccataggaggcactggcatattcgatgagccactggattcaggtgaaatatacgactcagcaacaacaaacacatggtcagaaatgcagagactcccgatgggttttggggttgtaagttgtgggattatatgcaatggaatcttctatgcttattctgagaatgataagctatcagggtatgacattgagagaggcttctggattacaatccaaacatctccaatccctcctcgggttcatgagttctaccctaaacttgtctcctgcaaccatcggttgttcatgctctctgtttcatggtgcgatgaaggagatgggcaaattgggaggagaaacaagaaagtggggaagaagcgggggttggagcatgttgtgctcatatgatccgaggtttctgtactccaccacgcaccaatgaattggagcgccaccaatgtcttagaacaccacatactactgagagtagagaagatcaagatgatttgggcagaggtattaagtttcttcactgtctgcgatgtattaactgaagaagcttcttggagacatgtttcgaggaaccaaaggagtcaaaaacttaatctatcttgtacgaacaagaccattgcattgcttcatctctgatcttcttcattctttttgttaactttacaggactcgtcgaaattgattgattcatgtattgaaaagaaatgcaatgtgctagttcctagattgattggaaatgtaatatttatattttaatattttcgggatgtttacaaaaaaaaaaaaaactttccgtacgaggtaggaatgttatccgcgagggcatttggatttgaaaact

SEQ ID NO: 772 - DNA, 2488 bp, Arabidopsis thaliana
  Clone ID: ARATH-23APR03-CLUSTER2998_1
ggaagctgaagaagaagaagaagaagaagaagaagaagcagtaatagaagactaatctctatttgcggaattatactgacttcgaggagtctaatatcgttttatagttgaagatattacgactctttatctcatttggatgatgtccgacatttccattgacgcattgggccaaactatgggggactttagtaatcatgagaaacttggatttgatttaggagcatttgttggagacttggcttttgaagaagattcaggcagtgaggatatttcattggaagggcttcaacaagaacttgaagaatgtgtaaattatgaggttgttgccaatatactgtctagtggtgacaaacttagagaatatgcaaaaggggttgaaaacaatctacgcaaggttgaattggattcaatcgaggattacataaaggaaagtgacaacctagtctcacttcacgatcagattcgtgactgtgacagcatcctgtcacaaatggaaactcttctcagtggatttcaggaagagattggttctataagttcagacataaagattcttcaagaaaagtcaatggacatgggtttgagattgaaaaaccgcagggtggctgaatcaaagctagcaaaatttgtcgaagacattatagtgccaccaaagatgatagatgtaattgttgacggagaggtgaatgaagagtatatgaaaacgcttgaaattctgagtaagaagctaaaatttgtagaagcagatcaggcagttaaaagttccaaagcgttaaaagatgtagagcctgagctcgaaaagcttcggcagaaagctatttccaaggtgtatgattttattgtccagaagcttatagccctgaggaaacccaaaacaaacattcagattcttcaacagagtgtgttattaaagtacaagtatattatctccttcctcaaggaacatggaaaagaagtgtttatggatgttcgtgctgcatacattgataccatgaacaaggtgttaagtgcacattttcgtgcttatattcaagcacttgagaaactacagttagatatagccacagcatatgacttaattggggtagagaccagaaccaccggcctcttctcaagagctagggagccactaaagaaccgctctgccgtttttgctttgggtgacaggataaaaattataaaggatattgatcaacctgctttgatcccgcacatagccgaagccagctctctcaaatatccttatgaagtgctcttcaggagcctgcacaagctacttatggatacagctacttctgagtatatgttttgtgatgatttctttggtgaagagtccatattctatgaaatttttgcgggtccattttctgtcatcgatgagcacttcaatcccgttctttcaaactgttttgatgctattggcctgatgcttatgattcgcataatacaccaccaccagcttatcatgtctcgccggagaattccatgcctggactcatatctggacaaggttaatatttctttgtggcctcgtttcaagatggtgtttgactcacaccttagcagtctgagagatgcaaacattaagacattatgggaagatgatgttcatcctcactatgtcatgaggcgttatgctgaattcacggcttcgtttattcacctaaacgttgaatatggagatgggcagcttgatataaatctggagcggttaagaatggctgtagatgggttgattctcaagcttgcaaagttgttcccaaggccaaagcagcaaattgtgtttctcataaataactacgatatgacaatcgctgtactgaaggaagctggaccagaaggtgggaaaattcaaatgcattttgaggaaatgctaaagagtaacacttcattatttgtggaagaactgctggtggagcatttcagtgatttgatcaaattcgtgaaaaatcgagcttctgaggattcgagcttaaatccagagaggtccattacaattgctgaagtagagccactggtgaaggactttggaagcagatggaagacagcgattgagttgatggacaaagacatcataacttccttcagtaacttcttgtgtggtatggatattttgagagctgcattgacacaactattgctctattacacaagactcacagactgcatcaagaagatagatggtggatctgctctgaatagggatcttgtctccatccaatctatcatgtacgagatcaggaaatactccaagactttctgaaagatagcatatgtggctccttaatgaagagtatgtaagataagtcaaaattttcaaagtgaatctaaagccagtattatgggtcagtaatgtatctatctttcaaaccagtaagagttcctctaatgtctttcttttgctaaattctccacaattatctgacctatatgtttggaatcgacttcctcgtctcgttccaagagccattcgttacattgacat

SEQ ID NO: 773 - DNA, 3377 bp, Arabidopsis thaliana
  Clone ID: ARATH-23APR03-CLUSTER3001_1
gcacgagctcactagtcccccccccccccccgagagagtcaaatatttctgcacggaagcttcgaaaagaggtcatcaatggagtcttcactcttttctccatcttcctcttcttactcttctctcttcactgcaaaacctacgcgtcttttatcaccaaaacccaaattcacattctccatcagatcctccattgagaaacccaaacccaaactcgagaccaattcatcgaaatcccaatcatgggtcagtcccgattggctcacaacactcactcgtaccctttcctcaggaaaaaacgacgagtcaggtataccaatcgcgaacgcgaagctcgacgatgtcgctgatctcctcggaggtgctctcttcttacctctctacaaatggatgaatgagtacggacccatttaccgtctcgctgctggtcctcgtaatttcgtaattgtgagcgacccagcgatagctaaacatgttttgaggaattatccaaagtacgctaaaggcttagtcgctgaagtctctgaatttctatttggttcgggtttcgctatcgctgaaggacctctttggacagcgaggcgtagagcggtggttccatcgcttcacaggaggtatttgtctgtgattgtggagagagtattctgcaaatgtgcagagaggcttgttgagaagttgcagccttatgcagaagacggaagtgctgtgaatatggaagcgaagttctctcagatgacacttgatgtcattgggttgtctctttttaactacaatttcgattctttgactactgatagtcctgtcattgaagctgtttacactgctcttaaagaagctgagcttcgttctactgatcttctgccatattggaagatcgatgcattgtgtaagatagtcccgagacaggtgaaagctgaaaaggctgtaactttgataagggaaactgttgaagaccttattgctaagtgtaaagaaattgtcgaaagagaaggcgaaagaatcaatgatgaggagtatgtaaatgatgctgacccaagtatcctgcgtttcttgcttgcaagcagagaagaggtatcaagtgtgcagttacgggatgatcttctctcaatgctcgtagcgggtcatgaaaccactggatctgtcctcacttggacactttatctcctaagtaagaactcatctgcattaaggaaagcacaagaagaagtagacagagtgttagaaggaagaaacccggctttcgaggatataaaggagttgaagtacatcactcgttgtataaacgagtcaatgcgtctctatcctcatcctcctgtcttgataagaagagctcaagttcctgacattcttcctgggaactataaggtcaataccggacaagacattatgatttcagtctataacatccatcgttcttccgaggtatgggaaaaagctgaggaatttctgcctgaacgattcgacatagatggcgcaatccctaacgaaacaaacactgatttcaaattcatcccattcagtggagggcctagaaaatgtgtaggcgatcagtttgcattgatggaggcaattgtggcactcgcggtgtttcttcagcggttaaacgttgagctggttcctgatcagaccattagcatgaccacaggagcaaccatacacaccaccaatggattgtatatgaaggtgagccaaaggtaaaaaccagaatttatgttttcatgataattgattggtgtgaatggacttgtttcatagtactcttgagaaataaccacaaaaaaatgaattatggaaaatagttgtaccatcggaaatgtgaattttgaacagtgagatgctagtaccattaaagtttggtaattgtgttatcatttcaaatcaaactttcatacagcttgtgtttgttctccatttttcagtaattacgaaaatcaaaattttatttttttttgaatttctaaataatagactaaggtctaaaaccatcccattccatatggaccacacgtaacattaaccttaaaaaccatataaaaccatataaaaccaatactagtgggttctatagcgatgtgtagtttcactttcacgtacgaggaagattaaaaaaaatggagaacgaaagctcagagagtagaaacagagctcgtcttgccattatggagcttgctaacatgattagcgttcccatgtctctcaatgccgccgtgcgactaggcattgccgacgccatttggaacggcggagccaattctcctctctctgccgccgagatcctccctcgcctccacctaccatctcacactaccattggtggcgaccccgagaatcttcagcgtatacttcggatgctcaccagctacggtgtcttctccgaacaccttgttggatccattgagaggaaatactctcttacggacgtcggaaaaactcttgtaaccgactccggcggcctctcttacgctgcctacgtcctccaacatcaccaggaggcgttgatgcgagcatggccactagttcacacggcagtggtggagccggagacagagccgtacgtgaaagcaacggcgaggcggcatacgctcagtatgggaaaagtgaggagatgaatggtctaatgcaaaaggcaatgtctggcgtatctgtaccgttcatgaaagctatattagacggctacgatgggtttaaatcagtggatattttggttgacgtaggaggtagtgcaggggattgtctgcgtatgatccttcaacaatttcctaacgtccgtgaagggattaatttcgatttacctgaagttgttgccaaagcccccaatattcctggagtgactcacgtgggtggggatatgttccaatcagttcctagcgctgacgctatcttcatgaagtgggtgttaacgacatggacggatgaagaatgcaagcagataatgaagaattgctacaacgcgttaccagttggaggaaagctgattgcgtgtgagccggtcttgcctaaggaaaccgatgaaagtcaccggactcgtgccttgttagaaggtgacatctttgtcatgaccatctatagaaccaaaggtaagcatagaaccgaagaagagtttatagagcttggtctctccgcgggattccctacttttcgacctttctacattgattacttctacaccatcttagagtttcagaagtaatattcaagcatttttcttctcatatttctaaaagcttcaaaataatgaatcaaaagacctctttgttaattgagttgagatatctagtgaagacattaatattttcatcaagatgtaataatctaaagtctatattctaagtgcatccttaaaaggcattttccatatatataagtttcatctttcg

SEQ ID NO: 774 - DNA, 1895 bp, Arabidopsis thaliana
  Clone ID: ARATH-23APR03-CLUSTER3008_1
gaccccataagttatattttaaggctatggaagccctcctcctccctccttcgccggaaccccaaaatcaaatcaccaatccggcgaattcaaagccaaatcatcaatctggtgacgtacataaagatgagacgatgatgatgaagaagaagaaggatacgaatccatcgaatttggaaaagagaaaactcaagggaaagaagaaagagattatggacaacgacgaagcttcttcgtcctattgttctacatcttctacctctaattcaaattctactaaaagggttacgagagtggttcatagattacgaaaccctatgcggttaggtatggctcgacgaagcgttggtgaacgacaagctgaaaaattggcgaagcctctgggcttttcacttgccgcttttgctaatatggttattgcgagaaagaatgccgcaggtcagaatgtttatgttgatgatcttgttgagatctttgctactcttgtcgaagaatcattagccaatgtttatggtaataagcttggttcctttgcgaccaactttgagcaaacattcagcagtactctaaagatccttaaattgaccaatgaatgtgcaaatccacatcagtcaaacaataatgatggtgggagttgtaatttagatcgctctaccatagacggatgctcagacaccgagctatttgagagggagacttcatctgctacgtctgcttatgaagtgatgcaaggcagtgcaacagcaacctctttgatgaatgagcttgcccttttcgaagagactctacaactctcttgtgtccctcctagaagttcagcaatggctttgaccacagacgaaaggtttttaaaagagcaaacacgagcaaacgacctaaagaccgtggagattggtcttcaaataagagagttaaggtgcaaagagacggcgctaggattaaaatttgaatcaaacaacctggggaaagcggcgctagagttggatgtttcgaaagctgcattcagagcggagaaattcaaaaccgaattagaagatacaagaaaagaagagatggtcacaagaatcatggattggctcctcgtaagtgtcttcagcatgttggcttctatggtacttggcgtttacaatttttcaataaagagaatcgaggatgctacctcagtatgcgaccaatccgaggagaaaagttcgtcgtggtgggttcctaaacaagtttcatcgattaactcaggcttcaacaccttcatctgccgggttcgagtttgggtgcagatatttttcggtgtgttaatgatcattgtcttcacttactttctaaacaaacgatcatcaggtacgaagcagacaatgccgataagtttcatcgttcttttcctcggtatattttgcggtgtatcgggtaaattgtgtgtggacacattgggcggtgatggcaaactctggctaatagtttgggaagtgttttgccttttgcaattcgttgcaaatgtcttcacattggctttgtatggtctaatgttcggtcctataaacgtgactcaagagaccagatcgaaccgttgtaacagtatgtttccatattgggcaaggcgcagtgtcgtgtatgtggtgattctgtttgttcttccagtcataaacggtcttttgccatttgcaacatttggtgaatggagagacttcgctatgtatcaccttcatggtgggtctgactatgcttgagacgaggaggccatctttgtattgtaatttattgtaacgatttgggttttttaatcttattttattttaaaaaaaaaaaaaaaacaattgtatcgctattacaaagttatgtattcgagttatatgtttgtattgttgtcaaaagaaattaaaattatgcttttcgatatgacg

SEQ ID NO: 775 - DNA, 657 bp, Arabidopsis thaliana
  Clone ID: ARATH-23APR03-CLUSTER30130_1
aataaacaaaaaattaatacaacaagatcctgctatgtcgtccacggcgagaaatatttctggcagcgggaaccgaaagtcgagtaggctgcagcggcgggctccaccgcctcttaagataaacccttgcgaagcgaattggaaagtggctattcctcttctatcacctacggagtcgccgccacaaaaaccaccggcggtaatgaagagggaggagcaacggtggggtaaagaggcggagaagccgccggtttttaagaagtggcagcatccggcagctccgttttactaccagccagcaccgtcatcgaatcagccgtttgcatggccaaattaacggtctcttaatattaggtctatcacacaaatacataaatatttgaatctttttaattgtatgccgatcatattgacaaatagcatattttattttttttaacattaccatctttatgcagtatgtatgttgggtttgatgttgttatgtccttgtaaccattaattaataactaatatatatagtgtattgtttcgtatactgtgtaatgttgaagacactagctaagatcgccgtgtaatttgatttcttttataaatatttttcttaaagaaaaaaaaaaaaaaaaagggcggccgctctggtcataggatccaagc

SEQ ID NO: 776 - DNA, 2570 bp, Arabidopsis thaliana
  Clone ID: ARATH-23APR03-CLUSTER3015_1
gaaacgcttcatctctctctttctctctctcaagctgtcaaagtcacctctgtattcgcgtgaagataatttctcacaattagggttttttttttcttctgagttaactgttccatctccatcctaatcttcaccttctccttgatttcgagatctctgtcaatttgttgaatctgttctttatctaattagctcaactccgagtctttgctggattttgaagcttttgtagctgaagcaaatttgtaatctgtgatggtgtatgcactgattctgggtatggtattgtactctaggatctcgtagcgagaatgccaggcattcctcttgttagtcgtgaaacctcttcttgttcaagaagcacagagcagatgtgccatgaagactcccgtctgcgtatttcggaagaggaggagattgctgctgaagagagcttggctgcctattgcaagcctgttgaactctacaatatcattcaacgccgtgctattaggaatcccttgtttcttcagcgatgtttgcattataagattgaggcaaaacataaaaggagaatacaaatgactgtattcctctcgggcgctatagatgctggggtacaaactcaaaaattattccctctgtatattttgttggcaagactcgtttctcctaagcctgtcgctgagtattctgcagtatataggttcagtcgagcatgtatcctaactggtggattgggggttgatggagttagtcaagcccaagccaactttcttctccctgatatgaatagactcgcattggaggcaaaatcaggatcactcgctatcttgtttatcagctttgctggtgcgcaaaattctcaatttggcattgattcaggcaagattcattcaggaaatataggaggacattgtttatggagcaaaatacctctgcaatcactgtatgcgtcgtggcagaaatcaccaaacatggacttgggacagagagtagacacagtctctcttgttgaaatgcagccttgcttcataaagctaaagtccatgagtgaggaaaagtgtgtctcgattcaggtgcccagcaatccactcacctcgagctctccgcagcaagtgcaagtcaccatatctgcagaagaagttgggtcaacggaaaaatctccttatagttcattttcatataatgacatctcttcctcttccttgttgcaaattatcaggttgagaacaggaaatgtagttttcaactacagatactataacaacaaattgcagaagactgaagtaactgaagacttttcttgtccattctgcttagtaaaatgtgccagtttcaagggcctgagatatcacttgccatcaacccacgatctcctcaatttcgagttttgggtaactgaagaatttcaggcggtaaatgtctccctcaagactgagacaatgatatccaaggttaatgaggatgacgttgacccaaagcagcaaactttctttttttcacggaggaggcaaaagagtcaggtacggagctcaaggcaagggcctcatcttggattaggttgcgaggtgctagataagactgatgatgctcattctgttagaagtgagaagagccgaataccacctggaaagcattacgaaagaattgggggtgctgagtctggtcaaagagttcctcctggcacgagtcctgcagacgtgcaatcatgtggggatccagattatgtgcagtcgatagctggaagtacaatgttgcagtttgcaaaaacgaggaaaatatctatagaacggtcggacttgaggaaccgaagcctccttcagaagagacagttcttccactctcatcgagctcagcccatggctctagaacaagtactttcggaccgggatagtgaagatgaagttgatgatgatgtggcagattttgaagatagaaggatgctcgatgatttcgttgatgtgactaaagatgagaaacagatgatgcacatgtggaactcgtttgtgaggaagcagcgagtattagcagatggtcacattccatgggcatgcgaggcattctcaagattgcacggacccatcatggttcgaacaccgcacttgatttggtgctggagagtgtttatggtgaaactgtggaaccacggtcttcttgatgcccgaaccatgaacaactgtaatacctttctcgaacagctccaaatttgaaaacccaagaaatcattaatttaagtagaaaaacaaagaaagacaagagaagaagagttttgggttctcatttaactacttttggtgttttaagagaaagaggagcatatttatgcatgaatttgtcctcatcttttttttttttttttttaattataaatgtgtacattggcttatctttgacgcttgttcttcgagtaatgctttatacatgttccttactcgtgtgatcttctacggtgcgccccccaccgcgggttccacttgcgattgttggggcacgcggcgtgcaggagacctgtctcgggatggtgccgactcgcgtccgagcgctctgccagggtgtcggtccaccggggtgggcgcggtttgtgcaga

SEQ ID NO: 777 - DNA, 1360 bp, Arabidopsis thaliana
  Clone ID: ARATH-23APR03-CLUSTER303_1
gtcatagatcatctccctataaataagacaaccgggacaaataacccgaaatagaaattttgatttgattttgatgaaaaatggaaccacaaattctttttctctatctctcactcttcattctctccctaaacttcttcttcacgaatcttaaaccaaggctagtccgcctcttccagccttctttagaatctcgtgtcaagaccgctcttttatcccgaaaggaagtagccgcgtttcttgattctcccattgtcgaagacgaagaaggcgaagaaagagaagaggaagaagaaggaggtatcgtttcaaatgccaactttacgtttgagtttgatccatacatgatgagcaaagccgaatcagtgaacaaagctctagaagaagcaattccagtcggagagccactcaagattcatgaagccatgcgatacgcgattcttgcggctggaaaacgtgttaggccaatactctgccttgcttcttgcgagctagtaggtggccaagaaaatgcggcaatgcccgccgcttgtgcggttgagatgatccacacgatgtctctaatcaaagacgatttgccttgtatggacaacgacgatttgcgtcgtggaaagcccacgacgcacaaagtctacggcgaaggagttgccattctctctggtggggctctcttgtctcttgcctttgagcacatgaccaccgctgaaatatcctcggagagaatggtttgggcggtgagagaattggctaggtctattgggacaagaggtttagtcgcgggacaagcgatggatataagcagtgaaggtttggacttaaacgaggtcggattagagcatttggagtttatccatgttcataaaaccgcggttttgttggaaactgccgcggttcttggcgccataattggtggtggatctgatgaagagattgaaagtgtgagaaagtttgcaaggtgcattggattgttgtttcaggtggtggatgatattttggacgagacgaagtcgtcggaggaattgggaaaaaccgccgggaaagatcagctcgccggaaagctaacgtatccaaagttgatagggttggagaaatcgaaagaatttgttaagagattgacgaaagatgcacggcaacatcttcaagggtttagttctgaaaaggttgctcctttagtagctcttactacttttattgctaatagaaataagtgattatatatttgttttgtttgtgtgtgttgggtttatgtatacatgctaaagtagtgtgttcccttatttttaagtgtaaccacattttaagatgtttattaatgaatatttaaaaatgtacataatttttataaaaaaaaaaaaaaaaa

SEQ ID NO: 778 - DNA, 1304 bp, Arabidopsis thaliana
  Clone ID: ARATH-23APR03-CLUSTER30887_1
aaattcaatctttctccgccattcagatttcgaggagacagagacagagaaaaggattcgtgtaaggaaaagcttttaaacttctctttctatttatccctcctttcttctatctctctctctctcgatatcgatacaagagagatggagaaagaagaaggagaaacaacaacaacgatcggcgttgttccgggtgcgctttatatttattttcttccttcgtctcctaaaaattcaatctttctccgtcattcagatttcgaggagacagagacagagaaaaggattcgtgtaaggaaaagcttttaaacttctctttctatttatccctcctttcttctatctctctctctctcgatatcgatacaagagagatggagaaagaagaaggagaaacaacaacaacgatcggcgttgttccggcggcgccggcgaaattaccgactccgatatattctctgagcttttgggaggtcacggcagcttccggcgtcgttttagggtttattttgggtcttgtttgcgtttatctcacaatgcctcaatctgattacagctttctcaagctacctcgtaatctcgaagatcttcagattcttagagataatcttgagatatacacaagtgattacacagttcaagttcttgttgggtattgtctggtgtacgtttttatgcagacgtttatgattcctggaactgtgtttatgtctttgcttgctggtgctctctttggagttgtcaaaggaatggctcttgttgtctccactgcaacagctggtgcttcctcttgttatttcctctctaagctcattggtagacctttactcttatcgctttggcctgacaagctcgtattcttccaagatcaggttgcgagaagaaaagatcggttgctgaattatatgctgttcttgaggctaacaccaacattgcctaacactttcattaatgttgcttctccaattgttgatgttccttaccatatcttcttcctagctacattcatcggtctgattcctgctgcatttgtcactgtccgggctgggcttgctcttggagagctaaaatcattgggagatctctatgacttcagctccatggcgactctgtgtctcattggtgtgctctctgtgactccaaccctaattggcaagaaacaagcatagaagatgaagatcaatacgatgatgatgatgaaaacagagcatttcaacagcctctttgtgtatatatcatgtagaatgttaagaacttaagatcaatcaatcataaaactctgttctctaaaaaaaaaaaaaaaa

SEQ ID NO: 779 - DNA, 1510 bp, Arabidopsis thaliana
  Clone ID: ARATH-23APR03-CLUSTER30893_1
aatctcaaaattcagtccttttggtgtctcatatgcgcttatagagagatttagcactaaggaggcgcggagatgagggcgaaagctgcttcggggaaagccataatagtgctttgtctagccagctttcttgcaggctcactgttcatgagtcgaactttgagtcgctcttacatacctgaagaagaagatcaccatctcacaaagcatttgtccaaacatttagagattcaaaaggactgcgatgaacataaacgcaaattgatagaaagcaaatccagagacataataggagaagtatcgagatctcaccaagcagtaaaatcattggagagaacaatgtcaacattggagatggagttagcagcagcacgtaccagcgatagaagcagtgagttctggagcgaacggtcggcgaaaaaccagagccgtctgcagaaagtgtttgcagtgataggcattaacacagcattcagcagcaagaaaagacgtgactcggtgagacaaacgtggatgccaacaggagaaaagctaaagaaaatcgagaaagagaaagggattgttgtaaggtttgtgataggacacagtgcaacaccaggaggagtattagataaagccatagatgaagaagattcagagcataaagatttcttaagactaaaacacattgaaggatatcaccaactctcgacaaagacaagactgtacttctcaacagcaactgcaatgtatgacgcagagttctacgtgaaagtggatgatgatgttcatgtcaatttaggtatgcttgttacaacacttgcgagatatcaatcaagaccaaggatttacattggatgcatgaagtctggtcctgttctttcacaaaaaggagtgaagtaccacgagccagagttttggaaatttggagaagaaggtaacaaatactttaggcatgcaacaggtcaaatttacgcaatctctaaagacttagctacatatatctccactaaccaaggaatactacaccggtacgcgaacgaggatgtgtcgttaggagcatggatgttagggttagaagtggagcatgtggacgagaggtcaatgtgttgtggaactccacctgattgtcaatggaaagcacaagctggtaacgtatgtgctgcgtcgttcgattggtcttgcagcgggatttgtaagtccgttgaccggatggctcgtgtgcatcgagcttgtgctgaaggagacactcctctagctaattttcgcttcttcgtctgagcttgttttactacttagctacttttgcttagtttgataagtatgtcgttgaatgaataagggaaggctatagtaataaagttgttgttatgacttttttttttggtgtggaaaatttggttatgagttttggaaccttggtgattaagttattatgggttttatttttgtatctctttaagtgacgtcgtttgagtttcgtttgaataaaaatagcagctttcaagatgaaaaaaaaaaaaaaaaaaaa

SEQ ID NO: 780 - DNA, 1604 bp, Arabidopsis thaliana
  Clone ID: ARATH-23APR03-CLUSTER308_1
gatatgtgtctatcgttagcttctacagctcatcgaaacacacagttccgtagcagagttttagttttagcagagttggtgaaatcaatgggccaccaaaacgccgccgtttcagagaatcaaaaccatgatgacggcgctgcgtcgtcgccgggattcaagctcgtcggattttccaagttcgtaagaaagaatccaaagtctgataaattcaaggttaagcgcttccatcacatcgagttctggtgcggcgacgcaaccaacgtcgctcgtcgcttctcctggggtctggggatgagattctccgccaaatccgatctttccaccggaaacatggttcacgcctcttacctactcacctccggtgacctccgattccttttcactgctccttactctccgtctctctccgccggagagattaaaccgacaaccacagcttctatcccaagtttcgatcacggctcttgtcgttccttcttctcttcacatggtctcggtgttagagccgttgcgattgaagtagaagacgcagagtcagctttctccatcagtgtagctaatggcgctattccttcgtcgcctcctatcgtcctcaatgaagcagttacgatcgctgaggttaaactatacggcgatgttgttctccgatatgttagttacaaagcagaagataccgaaaaatccgaattcttgccagggttcgagcgtgtagaggatgcgtcgtcgttcccattggattatggtatccggcggcttgaccacgccgtgggaaacgttcctgagcttggtccggctttaacttatgtagcggggttcactggttttcaccaattcgcagagttcacagcagacgacgttggaaccgccgagagcggtttaaattcagcggtcctggctagcaatgatgaaatggttcttctaccgattaacgagccagtgcacggaacaaagaggaagagtcagattcagacgtatttggaacataacgaaggcgcagggctacaacatctggctctgatgagtgaagacatattcaggaccctgagagagatgaggaagaggagcagtattggaggattcgacttcatgccttctcctccgcctacttactaccagaatctcaagaaacgggtcggcgacgtgctcagcgatgatcagatcaaggagtgtgaggaattagggattcttgtagacagagatgatcaagggacgttgcttcaaatcttcacaaaaccactaggtgacaggccgacgatatttatagagataatccagagagtaggatgcatgatgaaagatgaggaagggaaggcttaccagagtggaggatgtggtggttttggcaaaggcaatttctctgagctcttcaagtccattgaagaatacgaaaagactcttgaagccaaacagttagtgggatgaacaagaagaagaaccaactaaaggattgtgtaattaatgtaaaactgttttatcttatcaaaacaatgttatacaacatctcatttaaaaacgagatcaatcaaaaaatacaatcttaaattcaaaaccaaaaaaaaaaaaaaaaaaaaaaaagggcggccgctcagagaaaacaagct

SEQ ID NO: 781 - DNA, 2589 bp, Arabidopsis thaliana
  Clone ID: ARATH-23APR03-CLUSTER30962_1
ttttttcatgaaacttatctgatttttaaaattagtcattacattcaatcacgttaaaaacttataataattattttctattttcctcctctcatatatacaaaaagagaaagaggaaaaagacttctccaacaatggttgcaaaagccaaggcagagaagtgatatatagtgtgacatattgagtgcagacaccgtaagagatgacgtagtcctcaagtgaactggagacaagctaagcacaaaccctaattaagactgaagctcctgagaggaagaagaagaagaagaaaaaaggctgttgttacttctctccaagctactgtttgacacagagtcattatcctccacgtcaaccatcgcgaggctcaagtgtaattctgtgttcgaatttgggtaaacctcgtcgtcgaaaccatcttcgtcatcttcttctatcttcacccatttcgagacatcatcttcgcctcttagcagcttcaatatctccttgatattgggacgataagtggctgctcttgtgagacaatgtgtagcagcaagaaccatcttatgaaactgatcctcgtcgaaagtaccagcaatattcggatccaagagctcttttgcattgccctttttcgatcattggttttgcccacatgaccaaactctcttgccctcttgggctatcagatgaaatagaagttcttcctgaaatgagttcaagcaaaactactccaaaggcatatacatcgactttatcgctaacttttccatacataaagtactcaggagctagatatccaaatgtacccaccacatctctttgtatcgtgtatcgacaagacttcgatccccacatcgaaagaccgaaatccgaaagctgaggttcgaactcatctgagagaagaacattggaagatttgacatctctgtggatcacaggattagaacattggttatgtagataatcaagagcttccccctcccctattgctatcttgagtctctcttcccatctcaagacatgcttaccctgaagagtctcctccaaactccctttggaagagagattgtaaacagagattaggtcgttgtaatgaacgcatacaccaatcaaaggagagatgtttgagtgactcaaagaagagactatgctcacttcatgaacaaactccttcactgcttcttttacagatggtttcaagatcttcactgccacgcctttaccatcttcaagaaaccctttgtaaacttcattacatcctccttttccgatcagattctctaaagagaaatctgatgttgctgtcttgagaacatcatagctaaaccatctgtttatgtccttgagtatgtctttaagttgtttatcacaaaagctctgttgacaagtctgattcggatgatgtggaaatctttcaggcaagctcatgacccaattgacaactgatattttcctagtctgatgttgaaccattggagtagctaaagtggatgttcttagtaatggccaacctggtgtctggtctactacctctaccgatggaagagatagagatcttcctgatatctttctcttctcttgacccgttgttttcgcaagatctttgtctgaaaatccttcagagagttcagaacttggtcttgaacttatcttttgagcaagaggtagttggtaatggttggaacgtctaaagactatattccctctgtggatggccaaaatatcggtggttgaaggaagctcttttgcgcagcctttagctatttttagactaatgaaaaaatatcttaatttactttgttgtttaactccaacaacaactgacatggcgttgtatctctttgcttctttaactaaaacccctagaactgaatttccctttaacacttctcctttgagctcaatcttctttgttgagcagaattcaatgtatggttttaagtaccgatccagcgatgacttgcttttcaaggcacggtaataagtaaaacaaacatggacaacaacaacacaatctccatgttttgcaacttcttcaagtgcccattttaaaacctctacgccactttcatcaattggaattccaaccaatataatgttcctctgcttcacaatcactttatccactgccattttttttttgctctcacaacttcttttttttcttcctttttctttgtgagaagaaattggaggacctgaatacgtaaatgctgatagatcttctggagatatttaagaagattggctttattttacttgttttttttgtagtgaagataaatatgatatgatcaaagaagaagaaagtgtcggtgagaagatagagatagtatgatttagcgaagccaagaaaagggtccagtgaacaaaagaagacaggggaccaattttgttttttcaatttacttcctttttttaatttttaatttttaattttttttataaagattatatttaagggaaaagaaaggtgaataaatgagggctctttttgtgtgatgttgttggttttatatgaagaaatgagttggttaggagaaagtggcaagttcagcgggaaaaggcatgaaattaggtgttttaaaagggccaagtccc

SEQ ID NO: 782 - DNA, 1186 bp, Arabidopsis thaliana
  unsure (1)..(1186): unsure at all n locations
  Clone ID: ARATH-23APR03-CLUSTER3098_1
catcaattgaattaacaaaaactccaaagactccatcgaacaaaaccttcagttttaattcgatttagggttttgaagctttcgctttgttcgttgtttcgttttcgaatcggattgagagaatcaaacagcttaagggcagtttcttagttaaaagtaaccaagtttacatggttgagctagacattcagattccatcagcatacgatccatttgcagaagctaaagattcagatgcaccaggagctaaagagaacattcacattcgaatccagcagaggaatgggaaaaagagcttgacgactgttcaagggcttaagaaagagtacagctacgagaggattctcaaggatttgaagaaagatttctgctgcccccggcgtaatcaattgaattaacaaaaactccaaagactccatcgaacaaaaccttcagagagaatcaaacagcttaagggcagtttcttagttaaaagtaaccaagtttacatggttgagctagacattcagattccatcagcatacgatccatttgcagaagctaaagattcagatgcaccaggagctaaagagaacattcacattcgaatccagcagaggaatgggaaaaagagcttgacgactgttcaagggcttaagaaagagtacagctacgagaggattctcaaggatttgaagaaagatttctgctgcaacggtaacgttgtgcaggacaaagaactaggcaagatcatccagcttcaaggtgatcaaaggaagaaagtgtctcagttcttggtccaaactgggattgctaagaaggatcagatcaagatccacggtttctaaactgaacccgaattggatcgtttgatatatctatactatttatgcgaataattggtgtggtgtggtgtgtttgtgaccattacaagtttttaaagctttggttttgttattgacttttgcaatgataagaaatatttcgattgttctaaaaaaaaaaaaaaaaaaaaaaaaaaaaaaaaaaaaaaaaaaagggccaaaaaaccagctcttgttccctcggggggggggccgggncccaattcccntnttngggnggnggnnaanantncntngggcgggnntttanncnngggganngggaaaaccnggggttcccantttatngccttgggnaattcccctttnccantggggntnnt

SEQ ID NO: 783 - DNA, 1651 bp, Arabidopsis thaliana
  Clone ID: ARATH-23APR03-CLUSTER3104_1
gggggaaatcatgaaccctagtaatggcgttcctcttccgcattcgaacatcggaatttatactccagaaagcgactcaattccgattgaagtcttcttcttcatctatcttcacactaaaatctctcactagcaagcagaagaagagccgagatactctctcccttctcaaatccgagaataatcctgatcgaatcctcgaaatctgccgatccacttcactctcacctgattatcacgtcgaccgtatcatcttctccgttgcggtggtgacactagcgagagagaaacacttcgtcgctgtatcgcagcttctcgacggtttcatccaaaaccaacccgatccaaaatccgagagtttcgcagtccgtgccattatcctatacggcagagcgaatatgcttgatcgatctatacaaacatttcgcaacctcgagcaatacgagatcccaaggacggtgaagtctctaaatgctcttcttttcgcttgtttaatggctaaggattacaaagaagcgaatcgtgtctacctcgaaatgccgaagatgtatggcattgaacctgatctcgaaacttacaatagaatgattagagtcttgtgtgaatcaggttcaacgagttcatcatactccattgttgcagagatggagaggaaatggataaagccaacagctgctagctttggtttaatgattgatggtttttacaaggaggagaagtttgatgaagtgaggaaagtgatgagaatgatggatgaatttggtgttcatgttggtgtagctacatacaacattatgattcaatgtttgtgtaaaaggaagaaatctgcagaagcaaaggcgttgattgatggggttatgtcttgtaggatgagaccaaactctgtgacgtattcgcttttgattcatgggttttgcagtgaggagaatttggatgaagctatgaatttgtttgaggttatggtgtgtaatggatacaagcctgatagtgaatgttacttcactttgatacattgtttgtgtaaaggaggggactttgagacagctttgatcctttgtagagagagtatggagaagaattgggttccgagttttagtgtcatgaagtggcttgttaatggactagcaagtcgttcaaaggtcgatgaagcaaaggagctcattgcggtagttaaagagaagtttaccagaaatgtggacttgtggaatgaagtcgaagctgcattgcctttgcctcagtgaacaaaggtacacatagaagaagtcattcatcttcgatttgacatgaggatttgaagtttttgagattggttagtttagctgaaatcatctgtcaaaattgaaatgaaaggggatatagtttgaagagaatcttgtcgttgagattaagaagctatctctctaaggattggtgctggtgaattatcaattttcttactgaatttttttgaacatgttgtatataaatggaatgtaacatttttcaatatatcggaaacgatgagcataatcgcttcatggccttgctgatgaattgaatctcgaatgtcttttgttggcatgggaccatgttagcttcatgaaaatgtccatcaggttaagcttatgtaagaccaaaactcttcattataatgatatttacattcttctcc

SEQ ID NO: 784 - DNA, 1650 bp, Arabidopsis thaliana
  unsure (1)..(1650): unsure at all n locations
  Clone ID: ARATH-23APR03-CLUSTER31097_1
ntnntttnntntttttactnntannnnaaatnntctanatanagttnaataccagctgcnantcngcgcgcngnggaccnngtnnttnncnnccaaggacggcagcnannactntngtactgnaataaatnnanatnatatnantanangggtccggcaatgtctggcccattgccgaagccaaagaacttgcgcgctgtccgatcaggtgttcgcacctcagatgcagagcctgacctgatcttcgcacacaagtcttgccggctctcaaccggattcgtgtgtcccccctgactcgactctcgacagctcaagctaacgcccgccctccaacgccctctcactgcccctttccttagggattaatggaagctccccacctgccagccgctgcctccacgtccgaacgctaagcgattagagaatcgaccccatcacatcacgatgtctctcctctcactctccatcggctcaaacttcctggtcttacaccgatccacactctcggttcgcctattcgcgaggggcgttctccttctcgctttgccccctccccgactcttggctcctactgcgcaccctgttgtattgtcagtcttgtctacctctcagactgactggatcccgggccccccctcctttttttttttttttttctgtgaatatgtattgtggtattatataataagtcaacaaggatttggtttgctttttgcagttctatatgaagagcatttacaactgataatcaagtgaaagtttagaggattcatctacaaatagactcaaatcaaacttgggtgaactcaagagcgtttgcgtctggatcacgagtaaatatcgctggcctccctgacttactcattgtatatgcaattccagctttgtctaagatctctttcagatttgaaacatcacggattgcaatacaagcgtgtcgatcccggcctccgtgctcgggtctacctgttaatggatctggatttggaagctccataagatgaatcatttctgaacctacccataaccatgctcctctatatggaagcttgtcgtgaggccttgcttcgttgatctcaaggcctaaaatgttctggtaaaactcgagtgaccgttctaggttctcgcagagcagaccgacatgatgaaccccaacaactccataatcggttttgttgttaagctctttctcttgtacaacactaatcccttcaattgacgatccttgtgccttagccttcaagctataaaacctaacattgatcctttctttcctcacactcttcttctgaaactcaaaccgctctttcgtagagagattcgtgcaaataacctttggtcgtaaatcaagtgaagctgaagaaggtctgaaaatagaagccatggaagagaatcttggattaggctctcaacacaggagcaagagtttttttttgtctttaaagtaatgatttcatgttttttattttctncnnncnncanatcnaagnnncaaaaagttnncgtcccgtcccngnnaccnntatngtatcatatctanngcnncnnntccctcctcngnaacatgtataccgnncgnggtnatatttcnctgacnncgangccccccgntanacgcccnncaaacacgnccacgtnctncanngntac

SEQ ID NO: 785 - DNA, 1024 bp, Arabidopsis thaliana
  Clone ID: ARATH-23APR03-CLUSTER31172_1
aaactcaactcactcaaaccaaaaaaagaaacatcaaaccctaaaacacacataacaatcacaaatgaagaatccttcagtgatctcttttctcatcattctcctgtttgctgcaactatttgcacccacggaaatgaaccggtgaaggatacagccggaaatccacttaacacccgcgaacaatacttcatccagccggttaagaccgagagtaaaaacggaggtggtcttgtcccagccgccattacagtacttcccttttgtccacttggcatcacccaaacacttcttccctaccaacccggcctaccggttagcttcgtattagcacttggcgtaggatcaaccgttatgacatcttcggctgtaaacatcgagttcaagtccaacatctggccgttttgcaaggagttttccaagttttgggaagttgatgattcctcatcagctcccaaggagccttcaattctcatcggtggtaaaatgggggaccgaaatagctcgtttaagattgagaaagctggagaaggagctagagcaaacgtttataagttgaccaccttttacggaaccgttggagccatcccaggggtttggttaagcgcaccacaactaattatcaccaaggatacggctaagaccttactcgtcaaattcaaaaaggttgatgatgctactacggctactagcaacttatacttcccgggttgataatttaggtctaaggatgttcccgttctactaatcaactggtaaaaattattgtaatattaagcctgagactcgtccatggcctaaaataatgagttattttcaaatttcaattaataagaaagaaaaatgtggccagatccagatacatagatgttgagaatcattcataggcattgctgttgaatctgtttaaggcatgaaatagttttcttcttcattctactttgtatccgaaaattttctctcctcttgtaaagatcttgagcttgagaaaacattgatcattcatagcaaaaaaaaaaaaaaaaa

SEQ ID NO: 786 - DNA, 1705 bp, Arabidopsis thaliana
  Clone ID: ARATH-23APR03-CLUSTER3117_1
caagcttcttcgattttgctctctcttacacagccaatcggtgttttcgcagctttcaggcctcaatccaagacattctatataagcatattgcagaagaggcggttctaattgttgcattgagtttatcgctatgacgtagggaaattctaatttaggggaggcctcagagtttgcactaacttcataatcggctcttgacgttgttgagtgtaattgaacaagaatgtgtaggcagaattgtcgcgcgaaatcctcaccggaggaagtgatttcaactgatgagaatctcttgatatattgtaaacctgttcgactatataacatctttcaccttcgctctctaggcaacccatcgtttcttccaagatgcttgaactacaaaattggagcaaagcgcaaaagaaagtcaagatctactgggatggtagttttcaactataaggattgtaataacacattacagaaaactgaagttagggaggattgttcttgtccattttgctctatgctatgtggtagcttcaaggggctgcaatttcatttgaattcatctcatgatttatttgaatttgagttcaagctttcggaagaataccagacagttaatgtttctgtaaaacttaattccttcatatttgaggaagaaggaagtgatgacgataaatttgagcccttctctctctgctcgaaacctcgtaagcggagacaaagaggtggcagaaataacaccaggagacttaaagtatgctttttaccgttggattcacccagtttaactaatggcacagaaaatggaatcaccctacttaatgatggaaaccgtggtttaggatatcccgaggcaacagagcttgctggacaatttgagatgaccagcaacattccaccagccatagcccactcttctctggacgctggtgctaaagttatattgacaagcgaagctgtggtccctgctactaagacaagaaagttatctgctgagcgatcagaggctagaagccacctacttcttcagaaacgccaattctatcattctcacagagtccagccaatggcgcttgagcaagtaatgtctgaccgggatagcgaggatgaagtcgatgacgatgttgcagattttgaagatcgccagatgcttgatgactttgtggatgtgaataaagatgaaaagcaattcatgcatctttggaactcgtttgtaagaaaacaaagggttatagcagatggtcatatttcgtgggcatgtgaagcattttcaagattttacgagaaagagttgcaccgttactcatcactcttctggtgttggagattgtttttgattaaactatggaaccatggacttgtcgactcagccaccatcaacaactgcaataccatcctcgagaattgccgtaatagctcagtcactaacaacaacaacaacagtgtggatcgtcccagtgactcaaacaccaacaacaataacattgtggatcatccgaatgacataaaaaacaagaacaatgttgacaacaaggacaataacagcagagacaagtaattaaataggaaacactccggtttagatgataccgatttatcggattgtaacttattcttctttcttaaaaaattgtttaggagcaaacaaattttttatatgttagtgtattcaactgattacatttttagttaaaaaaaaaaaaaaaaaaaaaaa

SEQ ID NO: 787 - DNA, 3046 bp, Arabidopsis thaliana
  unsure (1)..(3046): unsure at all n locations
  Clone ID: ARATH-23APR03-CLUSTER3120_1
ctgaaagctccaacccgagtaagatcatctttcacctttctgcagaattgatcttctctacttccccctgttgtcttctcttctccacgaacttaattttatcaaaaccctggccactttgattcattcaaaatccgatccaacgatgactattgcactaagcttccggtgagatccctccgtctacgcccccttcttcttctacgccttctccgtcttcctcccccaccaacgccgcgcggatgggatcctctgtgattccgattgtaaacaagctacaagacatattcgctcagctcggaagccagtctacgatcgcgcttcctcaggttgttgttgttggaagccaaagcagtggcaagtctagcgtcctagaagcactcgtcggccgtgactttctgcctcgtggtaatgatatctgcacgcgtcgtcctcttgttctccagctccttccagactaaaagccggcgctaatggccggatccgatgaagagtggggggagtttcgtcaccttcctgaaactcgtttctatgatttctctgagattcgtcgagaaattgaggctgagacgaatagattagttggagagaacaaaggtgtagcagatacacagattcgtcttaaaatttcttcacctaatgtattgaacatcacgcttgtggatctgcctggtattaccaaggtgccagttggtgaccagccatccgacattgaagcacgtataagaacgatgatcttgtcttacatcaagcaagatacttgcttgatattggctgttacccctgctaataccgatctagcaaactctgatgcccttcaaattgctagcattgtagatcctgatggtcacagaacgataggtgtaatcacaaagttggatattatggacaaaggtactgatgctcgaaaactccttcttggaaatgttgttcctcttcgacttggatacgtgggagttgtaaatcgttgccaggaggatattttgctaaaccgcacagtcaaggaagcacttctcgcagaggagaagttcttccggagtcacccggtttaccatggtcttgccgatcgtttgggtgttcctcagctagcaaagaagttaaatcagatccttgttcaacatatcaaggtcttgcttccggatttgaagtcgcggataagtaatgctttggttgctacagcaaaagagcatcagagctatggtgaattaacagaatcaagggctgggcaaggagctcttctcctcaactttctctccaaatactgtgaagcatactcttcattgctggaagggaaaagtgaagaaatgtctacgtcagagctctctggaggagcaagaattcactatattttccagtcaatctttgttaagagtttggaggaggttgatccatgcgaggacttgacagatgatgatattcggactgcaattcagaatgcaactggtccaagatctgcattatttgttccagatgttccatttgaagttcttgttaggaggcagatatctcgtttgttagatcctagccttcagtgtgcccggttcatttttgaagagctaataaagattagccatagatgtatgatgaatgagttacaacgatttccagtcctacgaaagcgcatggatgaggttatcggggatttcctgcgagaaggtcttgaaccctcagaagcaatgatcggggatatcattgatatggagatggattacataaacacttcacatccaaattttattggtggaaccaaggccgtggaagctgcaatgcatcaagtgaagtcttcgaggattccccatcctgtggcacgaccaaaggacactgtggagcctgatagaacatcttcttccacgagtcaagtgaaatctagatcgtttctcggcaggcaagctaatggaattgttactgatcagggagttgtatctgcagatgctgaaaaagctcaacctgctgcaaatgcgagtgatacaaggtggggtatcccttcaattttccgagggggtgatactagagcagttactaaagatagcttattaaacaaaccattcagtgaagctgttgaggatatgtctcacaacttatccatgatctatctaaaggagcccccagctgtcttgaggccaaccgaaacccattcagaacaggaagcagttgagattcagataacaaagctgttactaagatcatactatgacattgtaaggaagaatattgaggactcggtaccaaaagcaatcatgcatttcctggtaaaccacacaaaacgtgagctgcataacgtcttcatcaagaagctttacagggagaacttgtttgaagaaatgttgcaagagccagatgagatagcagttaagaggaaacgcacacaagagactctccacgttcttcagcaagcttacaggacactagatgagttgccactggaagcagattcggtgtcagcaggaatgtcaaaacatcaggagttactgacatcttcaaagtattcgacaagcagctcatactcggcatctccaagtacgacaagaagatcgagaagagcaggagatcaacaccaaaatggatacggattctaacatgatccaaatatctcgaatatctctcgactgtgataacgcatttcattcatttaatggctctttcaggttttggtattaaattatgtgttggtcatatgaagaatttatataggaaaccagtacacagtgtgggttttggtccttttggactctgcattggttgacttgataagggagtgaaaggtgatatagtttttttttcccaatttgtttcaaatgctccccctgcaacaataacgggaagcaaacacctttcactctaaatttttttttggggaatgtttaatcaataagttatattacatgatnggtcnanangaccttataaattgngtagtttttttgtttttngagcaanganaannggaaaattcccctnaaaaaaaaaaaaaaaaaaaaaaaaaaaaaaaaaaaaaaaaaaaaaaaaaaaaaaaaaaaaaaaaaaaaaaactcgagggggggcccgg

SEQ ID NO: 788 - DNA, 3406 bp, Arabidopsis thaliana
  Clone ID: ARATH-23APR03-CLUSTER31233_1
atgaaaggaagatcgtatcggttttcaagtacggatcctcatgaggattgggttgatggactttggactgtggattgtgtttgtggtgtgaatgacgatgatggaacagagatggttaaatgtgatgattgtggtgtttgggttcatactcgttgttctcgttttgttgaaggacaagagctttttacttgtcataagtgtaagagcaagaacaatgttaatgatagtgaagagactgaggttgctcagttgttggttgaattgcctactaagactttgggaatggagaattcgtgtactcggagtgtacctttcaagcgtccttttaggttatggacccacgcgtccgcggacgcgtgggttcatgtgcaaggaatcccgggtggggatccgtctctttttgatggattgtcgtcggttttctcccgggagctgtggaagtgtagtggttatgtgcctaagaagtttaaccttaagtatagagagtttccttgctgggatgagcaagagaaggatgaagacggtgcaggggttttgttttcgatgtcgaaggagaatgtgattgctgctcctgttagtactttggttggaatgaggaggagtcttgatggtaaaggaggaaccaatgacgtgaagcttggttgtgactctggtgaaacggatagaaaacattctcagggtgctattaagaaggataagaggttgcttcgtcctatgatgacgaataaacgaagaaaagaattgttcggtgcttcaaaagagcggatgaagaagaaggttgaagttgtagacaaagaagaagatgataagaaaggttttgtcggtaaaacaggaaatcgacctgccagtgatgctaaaccatcagaatctcgtaaggacatagaagcagaaggttttactagcgacgttgggatcacgaagagtgtaaaggccaagaaagctgctctggaaactggcggtgatgaatctggtaatacagaaattggtgttgaatgctccagagaacagaatctttctgacgttcatgctaatggtactggaaaacaggaagagaaagctggtcatcatttccgaattgtgcttaaaagctctgcaactactgatccttctgtcctcggaggaagagatgttccacacaatgaggctaataaggaggaggagagacaaggcacaatagctgatgctccagaagataatgcagctgattcttctgaaagttcccagaagccttctcttggttccatggttggtaaaacacgagaaggtgaagagaaaaattgtgatgatgttagtaggaaaatcagtacgaggaagaacaaattccaaaaagaaacagctgatactggtgccagtggagctctaggcctgcagactctagaccatatggattctaaagtgtcagggagctctgcgtctcagatctctggaggttctgaacttaacaaaatgacaccgagcagttcacttcctgatgatcacaaaccgcagtctgttgaaatggtatcagagggaataagtagtggcaatagagacagagctatcgaattaaaacgagaactggtggtttcagaaactgaaaaagatattcaggaaacaaagcctggatctgttttatttcaagagccatcaaagccttgcagacctattccgcatacggtttcaggaaatggtaggcctaagatggtagtatgcattggaaaaacatcgtcaagttcagccactgaaaagtcccctaagccctcaacttccaggaattctattcctggcttgaagcaacaaccaggtgatgatgataatgatgctaataccaatgatgaggactgtgtttccagtgatgtgatccgagagagagatggggatgatgaaccttcagagaaagctccgaaacatcctaaattttctattacctctaagaaatcgatgcagcataaccgtacttcccattcttcagtttccaagacaagagagtcttcctcttcttcaaagacatcttcagcaactcggattaatggtggttcttctgaggctcctagtaaacattcgctttcaggaaccttcccgaaaaatgaaaagcctggacaatcaatattccagtcatcaactaagaaccctgtgcagtctataatttcccttgctccaaatctgagcgatgaagagcttgcgttaagactgcaccatcaactcaatagttctcctcgagttcctcgtgtcccccgcatgagacagcctggtagcttgcccctgtctccaaccgcccctagttttaagcgcacttctagttctggtagcaaggatcacacaacgttttccagaaggaaaaacaaggatacatccaaagaaggttactgcaatttacgtgatgatgatagatgcagtacaaggagtgccaaaaatcgtcggtctcctgataggaggacacaacaagacagtggaagcagaggagggagtttgtgttccaaaggggaagaaaatgaaaccaccaaaacctcttcttattcctctcggaaagtacttctcccgccaaactcgactacaagcacaagcagcggacccatgttcatccagcgagttgaatgagcataataagccttctccacacagttcccctaggaataatggtactccagtacatcgaactttgccaggattaatcaatgaaatcatgaacaaaggcaagaggatggcatatgaggagctctgtaacgcagtcttgccgcactggcctcacttgaggaaacacaacggagaacgatatgcatattcaagccattcacaggctgttcttgattgcctgaggaataggcatgagtgggctcgtctggttgatcgtggccccaagactaattccgggaaaaagaaacggaagctcgatgcagcagaggaggattcagatgagaacgaaagcagtaagggaggaaggaagcgactgcatcaacatcactctcaaggagaagagtttcccaaaggaaaaaggaaagcaagaaaacggagaaggctttctattcaaagaaaaggcattaaagtgttgagaaagaagagaaacgaagaagaagttagcgaagaagacgaggaagatgcgttctcggacacaagcgaggagagcatcttctgcgatgaagaagaagaagaagaagaagagggccacactgctactggtactggacaagtctctgctagtagctctgaggaagctcaagccacttcatgagcctcctctctcttctctctatgtaatatagaaagtatatgtgtattatatagctcttgtgtattttaccaaaaagctttttcctcagtagacaatactaataatttaagcttgtctagagtgacatattgggaatgggatgatctttttgtgagctgtataaatataaaaaaaaaaaaaaataaagttaggcgcacc

SEQ ID NO: 789 - DNA, 1446 bp, Arabidopsis thaliana
  Clone ID: ARATH-23APR03-CLUSTER3128_1
attagtaataaacggtcaaagaatgggactttcattgagagtgagacgtcgtggaggaagtgttagcaagaaagagatcattccggtgacaagttgctcggaggaagtggagataaccataccatcgcagtttcaatgtccgatatcttacgagctaatgaaggatccggtgattattgcctcggggatcacttacgaccgcgaaaacatcgagaagtggttcgagtccgggtaccaaacttgtcccgttacaaacacggttttgacaagtttggaacagattccgaaccatacgattcggaggatgattcaaggttggtgcgggtcgtcactaggcggcgggattgaacgaatcccgacgcctcgtgtacccgtgaccagtcatcaagtctccgagatttgtgagaggttatccgctgctacgcggcgtggagactacgccgcgtgcatggagatggttacgaagatgacgagactaggaaaagagagcgagaggaatcgaaaatgcgttaaggaaaacggcgcgggattggttctttgcgtttgcttcgacgcgttttccgaaaacgcaaatgcgtcattattattggaggagactgtgtctgtgctgacgtggatgcttcccattggtttagaaggtcaatccaaactcaccacgacgtcgtcgtttaatcgtttagtggaactgttgagaaatggtgatcaaaacgctgcgtttttgataaaagagcttcttgagcttaacgtaactcacgttcacgcgttaacaaagatcaatggcgtccaagaagcgttcatgaaatcgattaatcgcgattctacatgcgtcaactcgttaatatcaatccaccatatgatcttgacaaatcaagaaaccgtatcaaggtttcttgaattggatcttgtgaatataacagtggagatgctagtggattcagaaaacagcgtttgcgagaaagcgttaacggtattaaacgtgatttgtgaaactaaagaaggaagagagaaagtgagaagaaacaagctggtgataccgattttggtgaagaagattttgaagatttctgagaagaaagatttggtttctgtgatgtggaaggtttgtaaaagtggtgatgggtctgaagttgaagaagcgttgagattaggtgcgtttaagaagcttgttgtcatgttacaagttggatgtggtgaaggaactaaggagaaagttacagagttgttgaagatgatgaataaagttatgaagatgaatggttttgttgatcgttcttattcttcttcaattgagtttaaacatgttaagaaaccattttaatacattttgtatagaggaaacaccacaatttttttcaaatcaaaaataaaaacaaaaaaaaaattggaccgacggtttgataaaccagaccttaaaaaacaaaaaaaaaaaaaaaacccacgcgtccg

SEQ ID NO: 790 - DNA, 2053 bp, Arabidopsis thaliana
  Clone ID: ARATH-23APR03-CLUSTER3133_1
ggttttgtctttttgatttttgaaatttgattttcaaaaataaactaaagcatcattgcctcccattatcgtcacgcacgcagatcaatgattctctcactctgcttctcattcacgcttcttctttgaattcacttttctattcctttctttttctccgtccgagagagtatagagagacccatttcttcgatccatccgctgagaaaaaaaagaagaaaaccaagcagtagtagaatggatcattcagcgaaaaccacacagaaccgtgttttgtcagtgaagatgtggccaccgagtaagagtacccgtctcatgcttgttgagcggatgaccaagaacattaccaccccttccatcttctccaggaagtacggtcttttgtctgttgaagaggctgagcaagacgccaagcgcattgaagatttggcctttgctactgccaacaaacacttccagaacgagcctgatggtgatggcacttctgctgttcacgtctatgctaaagaatccagcaagctcatgcttgatgtcatcaaacgtggtccacaggaagaatccgaggttgaggtgagcaaggatggtgatgtcttttttgatatatctggtgggagcagagcttttattgaagaagaggaggcacgcgaccttttgaggcctctggctgacccgcgtaactcctataccaaaatccgttttagcaacaggagttttgggtctgaagcagccaaatttgctgcgagcgttttgtcttccatcaaggatcagctgacggaagtggatctctcggattttgttgcaggaagaccagaggctgaagcgcttgaagtcatgaatatgttttcatctgctttagagggttctaagcttaggtatctgaatctctcggacaatgctttgggagaaaagggaattagggcatttgcttctctcatcaattctcagcatgacttggaggagctctatctgatgaatgatggcatttccgaggatgctgcacgtgcagttcgtgagcttctcccttctactgacaaaatcagggttcttcagtttcataacaacatgacaggagatgaaggagcaactgccattgcagagattgtcagggagtgtccatctttggaagatttccggtgttcatctacaaggattggttcagaaggtggtgttgcactagctgaagcacttgaacactgtagccacttgaagaaacttgatcttcgtgacaacatgtttggagtcgaaggtggaattgccctggccaagactttatcagtcttgactcatttaaccgagatctatatgagttacctgaacttggaggatgagggaacagaggcactttctgaagctctacttaagtccgccccttctcttgaagttctagaattggctggtaacgacattactgtaaaatccactggaaatttggcagcttgcatcgcctccaaacagtctcttgcaaagctgaatttatctgagaatgaactcaaagacgaagggactatcttaattgcaaaggcagttgaaggtcatgatcagttagttgaagttgacctgagcaccaacatgatcagaagagctggggcaagggccttggcacaaactgttgtgaagaaaaatactttcaagcttctgaacatcaatggaaacttcatatctgaggaaggtattgacgaggtaaatgacatgtttaaggactgtctggacaagcttgttcctttggacgacaatgaccctgaaggagaagattttgaagatgaagacgaagaggaggaaggcgaagatggcaatgaattggaatcaaagcttggaagtctgaaaatcaagcaaggggaggaatgatgtgatgcttttgttgctatgtaggtaggttcagtgttatctctctttctggattcggtaaacatagttaagtaggtatctaaggatctaagattgtcttcagatttatttccttgaagcgaaattgttatcttcgtgtaaaccagaattgttgttggtcttttggttatgaatatttaaatgatcttttagctgaaaaaaaaaaaaa

SEQ ID NO: 791 - DNA, 1490 bp, Arabidopsis thaliana
  Clone ID: ARATH-23APR03-CLUSTER3164_1
gaaatatattcatcaaataaacaaaaatctctgtatttttttttaaaaagatggctgatttggatttacagaggaagatggtatctccgaagctccacgtcaccattcctgagccgtgtaagctctcctccgtctcttctccaatctcctcctcttcttccgccgcttgctctgcttacgagctttacctccgtttgcctgaacttagaaacctctggtcctctctctatttccctcactggatctccgagcccgttctcaaaccagctcttcaagctcttgagatcactttccggttaatcctcaccgttgcttctgacacacgtccttacatcaaccgccgcgaatggatccgacggttggattccctcactaccagccagataaaaatcgtggcggctatctgcggagatgaagacaactacgaagagaacgtatcggcggctccggtcagcaatggctggagctcgttgagtttgctttcggagatcgccacgtgtcgtacatcggagagtgttggacagaagatcttgtctacgatcgagaatgagatgcgttggtgtaagtatacgctcggtttaggagaaccaaacctcgccggaaaaccgtatcttcaatacgacgccgtttgtctcccggaggagctacatagcctcaagaacaatccttacgcagatcacatcgagaaccaagagaatcaaatgctctacactagtcatcagattcttgaatcgtggatttacgtttctgtgaatcttttatatagaatcgaatcgagaatcgaagagggaaaattcgaaaaagcttcttcagacgtctacttgttggagagaatctggaagcttctatcagagattgaagatttacacattcttatggatcctgaagatttcttgaaggtgaagaaacagttacaaatcaaatcgacgtttccaaacgacgcattttgttttaggtcaaagggcttagtagagatggcgaagatgtccaaagagctgagacagaaagtgccagctgttcttgaggtggaggtggatcccaccggaggtccgaggttgcaagaggcggcgatgaagctttactcgaggaaaacagagtacgagaagatacatttgcttcagggaatgcaggccgtggagtctgcagccaagagattcttcttcggataccagaagttggttgcagcgatgattgggaatgcagaggcgaatgcaaatagaacggtggcgaatcacgagtcctatgattcactgactcaggtgtttatggagccaccgtattacccgagcctagacgccgcaaagacatttctgggagagttctggagccaattgtgatgcaatggaagatattgacacaactacttaacaaacactatcaacagatgtaacactactgaaatttttggaagcatctaacgatcagtgtatgaatatatgtaactcattttttttagcaaaaaaaaatattcacaaaaaaaaaaaaaaaaa

SEQ ID NO: 792 - DNA, 4384 bp, Arabidopsis thaliana
  Clone ID: ARATH-23APR03-CLUSTER31661_1
atggcgcggcaaatgacgtcatctcagtttcacaaatcaaagactctcgacaacaaatatatgctgggagatgaaattggtaaaggagcttatggtcgagtttataaaggattagacttggagaatggtgactttgtggccattaaacaagtctctttggaaaatattgttcaagaggatcttaacaccattatgcaagaaattgatcttttgaagaacttgaaccataaaaacattgtgaagtatcttgggtcgtcgaagacaaagactcaccttcacattattttggagtacgttgagaatggctctcttgcaaacattattaaaccaaataaatttggacctttcccagaatctttggtggctgtttacattgctcaggtcttggaaggtttggtatatctgcatgagcagggtgttatacaccgtgatattaagggtgcaaatattttgacgacaaaggagggtcttgtgaagcttgctgactttggagttgccactaaacttaacgaggctgatgttaatactcactcggtggttggaactccttactggatggctcctgaggttattgaaatgtcaggagtttgtgctgcttctgacatttggagcgttggatgcactgttatcgaacttctgacatgtgtacctccttactatgatctgcaacccatgccagccctctttcgtattgttcaggatgacaaccctcctattcctgatagtctttctccagatattacggactttctacgacagtgcttcaagaaggattccaggcagaggcctgatgcaaagacactgctctctcacccttggatacgaaactctagacgagctttgcagtcatcacttcggcatagtggcaccatcaaatatatgaaggaagccactgcaagttcagagaaggatgatgaaggtagtcaagatgcagcagaaagcctttcaggagaaaatgtgggaatatcaaaaactgactcgaaaagcaaattacctctggtaggggtgtcgagttttaggtctgagaaagatcagtcgacacccagtgatcttggtgaagaaggaacagataattcagaagatgatattatgtcagatcaagttcctacactgtcgatccatgagaaatcttcggatgctaaggggacacctcaagatgtatcagactttcatgggaaatctgaacgtggtgaaacacctgaaaatcttgtaacggaaacttctgaagctagaaaaaatacttcagcaataaagcacgttggcaaagaattatccatcccagtggaccagacatcacatagttttggccgcaaaggtgaagaacgtgggattcgaaaggctgtgaagactccatctagtgttagtgggaatgaactggctaggtttagtgatcctcctggggatgcttctttgcatgatttatttcacccattggataaagtgtctgagggaaaaccaaatgaagcctcaacatccatgcctacgtcaaatgtcaaccaaggtgattctcctgttgcagatggtggaaagaatgatctggctacaaaattgagggctacaattgctcagaagcaaatggagggggaaacagggcactcaaatgatggtggtgatctttttcgcttgatgatgggtgttttgaaagatgatgttattgacattgatggcttggtatttgatgaaaaagtgcccgcggagaatctttttcctctgcaggcagtcgagttcagcagactggtcagctccttgaggccagatgagtcagaagatgcaatagtatcttcttgtcagaaacttgttgccatgtttcgtcagagacctgagcagaaagtagtatttgtgaccccacgcgtccgcctccctctaatggatctactcgatattcctaaatctcgagtaatatgtgccgtgctgcagctgataaatgaaattgtaaaagataataccgacttcctggaaaatgcttgtcttgttggtcttattcctttggtaatgagttttgctggttttgagagggatcgatcacgagaaattcgtaaggaagcagcctacttcttgcagcagctttgtcagtcaagccccttgacgttgcaaatgttcatatcttgccgtggaatacccgttttggtgggatttcttgaagcagactatgccaaacacagggagatggttcacttggctattgatgggatgtggcaggtatttaaactcaaaaaatccacctcgagaaatgatttttgccgtattgctgcaaagaatggaattcttcttaggctagtcaacactctttatagcttgagtgaggcaactcgactggcttctatatcagggggcctggatggtcaagctccacgagtgcgctctggtcaacttgaccctaacaatcctatttttggtcaaaatgagacttcttcactcagtatgattgatcagcctgatgtattgaaaactaggcatgggggtggtgaagagccttctcatgcttcaacctcaaattctcaaagatcagatgtccatcaaccagatgctttgcacccagatggtgataagcctagagtaagcagtgttgcaccagatgcctcaacctctggcacagaagatgttagacaacagcatcgaatatctctttccgccaataggacatcgacagataagcttcagaagctggcagagggcgcctctaatggttttcctgttactcagacagaacaagttcgacctttgcttagcttgttggataaagaacccccttcaagacattattctggtcaactggattatgttaagctcgacccacgcgtccggagacatgaaagtagacttcctcttttgcatggatcaaatgaaaagaaaaacaacggagacctagattttctgatggctgaatttgcagaggtctctggacgtggaaaggaaaatggaagtcttgatactacgactagatatcccagtaaaacaatgacaaagaaggttctggctattgaaggagttgcttcaacatctgggattgcatctcagacagcatctggagtactgtcaggttcgggtgttctaaacgctagacctggaagtgccacatcatctggtttacttgcccatatggtctctacgctgagtgcagatgttgcaagggaatacttggagaaagttgctgacctgcttcttgaatttgctcgagctgatacgacagtaaagtcatatatgtgcagccaaagcttactcagtcgtctttttcagatgttcaaccgtgtagaacctcctattctgttaaagatactggagtgcacaaatcatttatcaactgatccaaattgcttggagaatctgcagcgtgcagatgcaattaagcatttgatccccaaccttgagcttaaggatgggcatcttgtttatcagatccatcatgaggtgcttagtgcactattcaacctgtgcaagataaacaagaggaggcaggaacaagcggctgaaaacggaatcattccgcatctgatgcttttcattatgtcagattctcctctgaaacagtatgcattgccactactctgcgatatggctcatgcatctcgaaattcaagagaacagttaagggcccacggtggtcttgatgtttacctgagtttactcgatgatgaatactggtccgtgatagccttagattcaatcgctgtttgcttggcgcaagacaatgacaaccgcaaggtagagcaggcattgctcaagcaagatgcaattcagaaattagttgacttcttccagagctgcccagagagacacttcgtgcacatattggagccattcttaaagattatcacgaaatcatatcggatcaataagacattagctgtaaatggattgactccactgcttatttcaaggctagaccatcaagatgcgattgctcgacttaacctcctaaaactcatcaaggctgtttatgaacatcatccacggccgaaacagctgatcgtagagaacgaccttcctcaaaaactgcagaatctaatagaagaacgacgagatggacaacgttcaggaggccaagttctggtgaaacaaatggcaacatctctcctcaaagcacttcacatcaacacaatattgtgagtccaccaaaacgataatatcccttgggggactgtacatttactcccatttttccaagaagaaagtgcctgttcttcttcccttccatttacaaaatgtgaaacttaaaagatttgtaattgtttagttgtggcttctcttgtgtggtttttgccatatatgcccccaacgcgtgagctttttgtaggatagttgttgttatggctgcccttctttatgggggctgttattatgtgatcgatgtcggctcctttgaatgagaaaaagctagtttggt

SEQ ID NO: 793 - DNA, 1540 bp, Arabidopsis thaliana
  Clone ID: ARATH-23APR03-CLUSTER3175_1
aaagacggcgtaagagtttagactaatcggttaccgattttctctaatcttaaatagacttgttcgaattctcaagatacacgatgattttgaaaacgaactcaggtaaacgatggaggagatatttgctctgatagtctcaatgattctcatagttgcaggtgattcccttgtcgttgaggtgaaaaccgagatttggtagacgatggggggaatttttggaccgatagtcgcaatgactctcatagtaccggtgattccttggtgcttttgggaacgtgcgagagatgctcggtcgctgcaggaggtagctgcaccacctccagttttcacgaatacagccgtgggacagtgaagatgaagatgaagattaagctggtggaactctagccagagcgtcaatgaagaatgagaataagctgcaagagcgggaagcacaaagacaagctatggaagcgacactcgagtcgatgaatacaaaaccaagattggtatgcagaaatgcggaggaagaaggatgaagaacgcgaggcagaagagctgaagttggaagaagaagaaaaagcgcgacaagccaaagaagaagaggcagctgcgttagagtttgacaaatggaaaggggaattttcagttgatgctgaaggtactacagaggaagtgcaaggtgggaatcaagatttgctttcagaatttgttgaatacataaagaaacagaaatgtgttccacttgaagatctcgctgcagaatttcatctacgtactcaggaatgcatcaacaggatcgcctctttggagagcattgggcggctctcgggggtcatggatgatagagggaaatacatttacatatcaatggaagagatgaatgcggttgcagattacatcaaacgtcaaggaagagttagtatctcacatctagcaagcaagtcaaaccagttcatcgacttggagcccaaagtacagcatcagctgactgaagaaattagcggcatggaagagatctcagtttcttagttgtgtttctcgggtaaaatcgtttgtcaaaaacaagagttaaaagccttaggtgctcactgcaacatgatggtgtttgggtcatataccttcttgttcttattttactagtttgagatccttaggcttgcatccatatacagtacatgaaataccatatgtttaaaaatattgattatcttaccattagaaaataaaataaacacacaaaagaaatggatatcaaaagtacagcatcagctgactgaagaaattagcggcatggaagagatctcagtttcttagttgtgtttctcgggtaaaatcgtttgtcaaaaacaagagttaaaagccttaggtgctcactgcaacatgatggtgtttgggtcatataccttcttgttcttattttactagtttgagatccttaggcttgcatccatatacagtacatgaaataccatatgtttaaaattgttgtttgtcttaccattagaaaataaaataaacacacaaaagaaatggatatcaaaaaaaaaaaaaaaaa

SEQ ID NO: 794 - DNA, 2806 bp, Arabidopsis thaliana
  Clone ID: ARATH-23APR03-CLUSTER31766_1
atggtgttcacaaaatcattacttgttcttctttggttcctctcttgttacactactactacttcatcagctttgtttaatccgccagacaattacttgatctcttgtggctcatcacaaaacataactttccaaaacagaatctttgttccagattcactccactcttctcttgtactcaaaatcggaaactcttctgttgcaacatcaactacttccaacaattcaaccaattccatctaccaaaccgctcgtgttttctccagtttagcttcttacagattcaaaatcacttctttaggtcgacattggatccgtcttcatttctcacctatcaacaactctacttggaacttaacctctgcttcaatcactgtcgtaacagaagacttcgtgctcttgaacaacttctccttcaacaacttcaacggttcttacatcttcaaagagtacacagtcaatgtcacttcagagttcttgactttaagtttcattccttcaaacaattcggtggtctttgtcaacgctattgaagttgtctctgttccggataatcttatccctgatcaagctttggcgttaaacccttcaacaccatttagtggtctctctctgcttgcatttgaaacagtctacagattaaatatgggaggaccattgttgacttctcaaaacgatacattggggagacaatgggataatgatgcagagtatcttcatgtgaacagctctgttcttgttgtaacggcgaatccttcttcgattaagtactctccttctgtgactcaagaaacagctcctaacatggtttatgcaactgctgatacaatgggtgatgctaatgttgcgagtccaagttttaatgttacttgggttcttcctgttgatccagacttcaggtactttgttcgtgttcatttctgtgatattgtgagtcaagctttgaacacgcttgttttcaatctttatgtgaatgatgatcttgctcttggaagtcttgatctctctacgttgactaatggtcttaaagttccttactttaaggattttatctccaatggttctgttgaatcttccggtgttttaaccgttagcgttggacctgattcacaagctgatatcactaatgcgactatgaatgggttagaggttttgaagattagtaacgaagctaagagcttaagtggtgtttcttcggttaagtcgttacttccgggaggatcaggttctaagagcaagaagaaggcagtgatcattggttctttggttggtgcggttacattgattctgctgattgctgtttgttgctattgctgtttggttgcttcaaggaagcagaggtcgacgagtcctcaagaaggcggtaatggacatccgtggttgccattacctttatatggactctctcagactcttactaaatcaaccgcttctcacaagagtgccacagctagttgcatttcattagcttctactcatcttggacgttgctttatgtttcaagaaatcatggacgctactaataagttcgatgagagttcgttgcttggggttggtggatttggccgcgtttataaaggaactttagaagacgggactaaagtcgcggttaaaagaggtaacccgagatcagaacaaggtatggctgagttcagaacagagattgaaatgctgtcaaaactcagacatcgacatctcgtctctcttatcggttactgcgacgagaggtctgaaatgatactggtctatgagtacatggcgaatggaccgttgaggagtcatctatatggagctgatcttcctccattgtcttggaaacaaagactcgagatttgcatcggtgcagcgagaggattacattatctacacaccggtgcatcgcagagcattatacaccgtgatgttaaaaccacgaatatcttactcgacgagaatctagtcgccaaagttgcagactttggactatccaaaaccggcccttcgctcgatcaaacacacgtgagcacggcggttaaaggaagctttggttatctagacccggaatacttcaggagacagcagttaacagagaaatcagacgtttattcgtttggtgttgtactaatggaagtactctgttgtagaccggctttaaacccggtattacctagagaacaagtgaacatagcggaatgggcaatggcgtggcagaaaaagggtctgctagatcaaatcatggacagtaacttaaccgggaaggtgaaccctgcctcgttgaagaaatttggagaaaccgcagagaaatgtttagcggaatacggtgtggaccggccttctatgggagatgtattgtggaatttggagtacgcgttacagctagaagaaacatcttcggctttgatggagcctgatgacaatagtacaaaccacattccagggattccaatggcgccaatggaaccgtttgataacagtatgagtataatcgatagaggaggagtaaattcggggaccgggactgatgatgatgcggaagacgcgactactagtgcggtgttttcgcagcttgttcatcctcgtggaaggtagaagaagaacacatttggtgaaaacaacagcagagacagacattgtttgtttttgaaaaatttatagaaagaaagttatttattgaagacttttgggaacaaacaacaaaatgattcattcagcatttattttcgattttttacggtgtatttgttttgtaatatagtgagtactgatgttttaaagcaaatcatgaatcagaatgtgattatggggcgcccggtacaaaaaaaaaaaa

SEQ ID NO: 795 - DNA, 938 bp, Arabidopsis thaliana
  Clone ID: ARATH-23APR03-CLUSTER31845_1
gagatcttcccatttccaccgccgctgtcacttccggcacatttttccaccgccgctgtcacttccggcactgtctccggtaaccgctgaagaacgatggcgactcaggctgctgctgctgcctcattcaagggcaacttaaagaaagctgtggcaggtataaagcgtatcaatctcgacggtcttcgttggcgtgtttttgatgccagaggccaggttcttggtagactagcttcccagatatcaaccgtgcttcaagccaaagataagcctacttattgtcctaaccgcgacgatggcgatatttgtattgttctcaatgctaaggaaatcggcttcacaggaagaaagctcactgacaaattctaccgttggcatactgggtacatcggacacctgaaggaacggagtctgaaagatcagatggccaaagatcccacagaggtcattcgtaaggctgtctggcgcatgcttccaagtaacaatttgcgtgatgacagggatcggaagctgaggatatttgaaggcggtgagcatccttttggggacaagccacttgagccatttgtgatgccgcctcgtagagttagagagatgcgaccgcgcgcaaggcgagcaatgatccgtgcgcagaagaaggcagagcaggcagaaaatgagggaacagaggtaaagaaaggaaagaagaggaccctctctgaagtacctgcgtagaggaattacttcagaggaaagctagtgatgtgactgtctttttatttgtaaagcaaagtttcataatgcagacgtggataagctttaaaggctttcttttttctcagacaataaacctgtttctggatctcaaacactgtatcacaaatgaagccaaacccatcttccttaaacatggatctgtttctggttaaaaaaaaaaaaaaaaaaaaaagggcggccgc

SEQ ID NO: 796 - DNA, 4844 bp, Arabidopsis thaliana
  Clone ID: ARATH-23APR03-CLUSTER31906_1
atgcaggtggctttcatggaaaatagactaggtaactctaatggagtgggaatttcgaagaaatccaggtctttagatcttaagacgctctataagtctagcatttccaaggattcagtgaataagagctttaaaagaaaacataggtctgggattgatggtgatcagttgaagcaggacaagaagagcaggaaagttgtttctctaagtagttttaagaaagtaggtagccagaacgagagtattctggataaggcatgcaatggcaccactatattgcacaatttggaggactccaaggaggtgggtttggatgagaaattgtgtgacagtaatgggcttcaagtgatttctgttggtttggcaagtagtacgatttatgttcctagacgcaggagagattttgttgggaggagtaggtttgagaatggcctagcacagaagtctgcaggggagtctgatagtcaggaggagctggttgttaatatccctaaggttactgctgaagaatctagtgttcaggatcaaccctctaaagttgaagagaaggactctgacaaagatatcaaagaatctaattccgcagctccgttgcagttggaaaatgggcattctaatcagtctccagtgaaagatgatcagctggttgttgttaaacaaagaaatagtaacagcagaaaaaggaagtcctcagcatcaaacagacgcgtgggaaaagaggccaagtcttcaggtgatgcttctggtagaatatccaaggtatcacgggaagatgatgaggagaatcttgaagctaatgctgcaataatgctgtcttcacggtttgatccaaactgtacccagtttccttcaaattctgttactcctggttcaccatctgcgagtagattgcatccattgccttctggtaagaattcagttgatcctcggtccgagttgcttagttctaaatgtgtctcagatgacactgatgatagaatgttgcgaccaaggagacataatgatgatgggaagggtaaagttcggaaaagacgccacttttatgaaattttgttttcagatgtggattcacactggttgttaaacaaaaagattaaagttttctggccattggatgagagatggtatcatgggtttgtggatggtttcgatggagacaagaacctgcatcatgtaaaatatgatgatcgtgatgaggagtggatcaacttacagggtgaaagattcaaaattctgttgtttccttctgaagttcctggaaaaaatcagcggaaaaggcgttgttcagagtcaaagtctactcagaaagtaaaagggaatgatacttccagcaaagacgaggagaagcagaaggaaaagctagaagatgatagctgcatggaatcagagccaatcatcacatggttggctcggtctagacatcgggacaaatcctccactcttaaggctgtacaaaagcggaaaaaaactgacgtaatgacatctaatgaatctgttaaaatgaatggggatgtcacagatagatcggctagttctcttgcatcatgtggattacctggaccaagtaaaaacgagttggaaagctctggttttcggaatggtagcatatttcctattgtctattgtaggagaagacttcatacagcaaagaaggatatctacaaagagtcaggttacaatagtgttgagtttttgaagcagtttcttgtatcaaaaagtccggatcctggtgtagagtttttgcctattgaagattctggggatctggagctttgttgcccgtggaatgaatcagagcaatttgagttgtccctcagcctacagggtgtttccttgatgagctactttcttatggccgatgttgactggctttcacgtgctgctcttttgcttcgtcatggtacacttgtgactttgtggccaagagttcgtttggaaatgattttcctgaataaccaagatgggttaaggtatctaatttttgaaggctgcttaatggaagttgttcaattgattttccgtatcttgatggtagtagatcattctaattagctaggtgctcatggagcggatgctgacttgctgttgcctgttttctcaattggtctccttgtttcttgcctccctggtttccaaaggccgcttggttttcttttctaccgtttccatgaggggttaccttcttagtggtctttcttggatcagaatgtctggagtcactctttgctggttatgcaagtttcttttgctgtgtgttctctctttttcatgttggtcctgctgttggttatgctgttgtgttctaggcttggtttctgctctggccttgtttctagaggttcttcttctgctgttgcgtggccctcttctgtttgcttcaagttgctaaattcgtctccttttgcacttcttttttctgctcggccacctactctgtttctctgttttcacttgttcttgatatgggagctgggtcttgattcagctgtcttcctacgatttgttcgcgttttggttactcttagcggttgggttatggcagttttttcttttgtgcattctgttctgtctctcgagagtttgtgcctttctgatgttccatttttctcttcttcctgtgcgcttgagtctttagaccttcattctccgtctcaaagtcagcagctggggtctgattctgaaaactggatgtcatacagttcttctgttgtcagacataagcatgaaaccaggtctaatgtttcggtgaatgggattagtattcaagttccaatatctgatgattgtgaggatggtactccgcagtcaagtaatctggccttgaatattcaaggtagtagcaactcaagtccaaaggccactgccccaagaagtatgtggaaccgaagttaaagttctttaaatggccatctctcgcatggttggtcggattcaaagggagactttttgaacactaatttggcaaatggacctaagaagcgacgtacccaagtgtcttattcattgccttctgggggttctgattctagaaacaaaggttccctgctcaaggggatgccgaacaaaagaattagaaggtctaccgctgatgttaccaaaggtattcagaaagatctcgagtctagtttatgtgatgccaatgtattagtcactcttggtgatagaggctggcgagaatatggagctcagattttcctggaaccttttgataataatgaatggagacttgcggtaaaaatctcagggacaacaaaatactcacacagggcacatcaatttctgcaacctgggtcagtgaataggtttacacatgctatgatgtggaaaggtggaaaagattggaccttggagttccctgataggggccagtggttcctttttaaagagatgcatgaagagtgctacaatagaaatactcgggctgctttagttagaaatattcctattcctggcatccgcatgatagaaagggataattttgatggaacagaaactgaatttattcgcagttcttctaaatattttcggcagactgaaactgatgttgagatggcattagatccttcacgtgttatgtatgacatggacagcgatgatgagcagtgccttttgagaattcgtgagtgttcgagtgctgagaatagtggctcttgtgagatcactgaggacatgtttgagaaggcaatggacatgtttgagaaggcttcatttgtaaagcagcgtgataactttaccttaatcgaaattcaagaattgacggctggagttggatccttggaagcaatggaaacaatatatgagctttggagaacaaagaggcagaggaagggaatgccattgatcaggcatcttcagccacctctatgggaaaaatatcaaagggagctcaaagactgggagttggttatgagcaaagcaaacactccaaattcctgtgggtcgcagaagaaacagtcacctactgagaagccagcgatgtttgctttctgttttaagcctcgaggtttggaagtcaaacacaggggaacaaaacacaggtcacagaagaaactctcagtttatgctcaacatagttctgctttgggagattatgatggctgtaattcatcaggaagaagacctgttggttttgtctctggcgacgagaggtttttatattcaaatcaaagctatgagcactcgaatgaattttctgtacatccaggaacatattcccctcgtgacctaggcatgggatatttctcgagcggtggaaatggatatcataggaatcaccaaaacaagtcgcaaagaatcaatgggaagaggaatacgagtgaacgatgggatgcaggctattctgaatgccccagttccaatcttgtctgttactccaacggatctcagcgtcctgatgtggaaggaatacggaatagtacagacattgatgagtacaaattgcgagatgcagctggtgctgcaaggcgagcatgcgctttggcgaagctcaagcgggaaagagcagagagtttgaggtacaaagcagatctagcgatccagaaagctgcagctgctctcatgtgtgcagaggcagttaaagcttcttccgaggacctaggcaacaacaatggggtagaaagctcaagcgaaggatgagtcaatagtacccctcttgttaagtctggtatgtcacctctgagcaaaagaagagatagtgattggtcatgtcctgttcgacacacgagctgttcttgacacgagttaacaaacgacccagatgagctccactgtacagagatttgcctccctctgctttaagtgagctatattttgatgcagcaaaaaaaaaaaaaaaggcgggccgc

SEQ ID NO: 797 - DNA, 2594 bp, Arabidopsis thaliana
  unsure (1)..(2594): unsure at all n locations
  Clone ID: ARATH-23APR03-CLUSTER3203_1
gaaataaaatcagttacagaggaggagcacatcatcgtgttcttcttcgactcggcgattccaaaaaaggacgcttgcttcatcgccggcgtcgctgtatcactctccggccgagtctttcactttttgtttcgaaggaatgcaaaactatggtgattgattaaatcgtgtgacaatcgaaaagttgaggaattgcaaggattcgagatagagtctaaaatggagcaccaagaccttacagattcgagaaaggatcctctttgcatttctcaattgaaaatttcttcttcttctctcgacccattgcctcaggccaacatggcagaggatttaacaaagagtcgtagacattcacctataaaagtggaagggagtgaagaaacttggggagtagaagatgatgatgaccttactgaccctatttttgataccattgagggcaatggacattcagatccaacaagctgcttcgatgctgatttaagtgagtacaaaaagaaggccacagtaatcgttgaggaatactttggcaccaatgatgttgtctctgttgttaatgaactaaaggagcttggaatggctgagtaccgttattattttgtcaagaagttagtctccatggctatggatagacatgacaaagagaaagaaatggctgcttttctcctctctaccctttatgccgacgtcattgatcccccagaagtttacagaggtttcaacaaactggtcgcttctgctgatgatttatctgttgatattcccgatgcagttgatgttcttgctgtctttgtggctcgggcaattgttgacgacattcttcctcctgcgtttctcaagaagcaaatgaaattgctgccagataactccaaaggtgttgaggttttgagaaaggctgagaagagctatctagcgactccgcttcatgctgaagttgttgagaagagatggggagggactgataattggactgctgaggatgtgaaagctagaattaacgacttgttgaaagagtatgtcatgagtggagacaaaaaagaagcttttagatgcatcaaaggattgaaagttcctttctttcatcatgagattgtcaaacgagcactgatcatggcaatggaaaggcgaaaagctcaagtcaggctgctagatctgttgaaagaaacgattgaggttggtctcataaactccactcaggtgacaaaagggtttagcagaatcattgattcaatcgaagatttgtctcttgacataccagacgcacgccgtattttacagtctttcatctctaaagcggcttctgaaggatggttatgtgcttcttctctgaaatcactctctgctgatgcaggagaaaagttacttgaaaactccagcgccaatgtttttaaagacaaggcgaagtcgatcatccgagagtatttcctttcaggtgacacttcagaggtcgtacattgtctagacaccgaattgaatgcatcttcgagtcagctacgcgcaatctttgtcaaatatctgataactctagcaatggacaggaagaaaagagagaaggagatggcttgtgtgctcgtctctactcttggtttccctcccaaagatgtcagaagcgcattctcgatgctcatagaatctgcagacgacactgctttggacaacccagtggttgttgaagaccttgccatgttcttagcaagagctgtggttgacgaggtgttagctccacgggatttggaagaagtgttaaatcagactcccgaggcaggctcaagtgtgggcgagaaagtgattcaaatggcgaaaacattgctgaaagcacgtctttccggtgaaaggatcttacgttgctggggaggaggaggaattgagacaaactcgccgggatccacagtgaaggaagtgaaagagaagatccagattcttctagaagagtatgtctctggtggagacctcagagaagctagtaggtgcgtaaaggaactaggaatgccgttttttcaccacgaagtagtgaagaagtcagtagtgaggatcatagaagagaaggagaacgaggaacggttatggaagctactaaaagtgtgttttgattcaggactagtgacgatatatcagatgactaaagggtttaaaagagttgatgaatcacttgaagatctgtctttggatgtccctgatgctgccaaaaagttttcaagttgcgttgaaagaggcaagcttgaagggttcttggacgaatcattcgcttctgaggattcgcaaagtaagaaacagaacggctcgtcttcttcctctggatgataacatttgagcaccatacctcaaacctcgagacgttggtttcacgcaaaatcaccttttggagttttttttttttttttcttataaacaaactaaaaaagttttggatactttttgatgacgtttcttacagaaaacaaatttatctttatcttagtgacgttttgttatagcacattattactttatgacctgttttttttgttcctttgtcaatgattacattgtcttgctaatattttcatacagaaattttattttatattctataaaaaaaaaaaaaaaannnnnnn

SEQ ID NO: 798 - DNA, 953 bp, Arabidopsis thaliana
  Clone ID: ARATH-23APR03-CLUSTER32181_1
tcggattacattctaaaagtaaatcattcatagccaaaaagctccgttctctctcttgcccagaaagggcgatttcagaagccacggttatctctcttatctcttcatattttccagagagaaagtcgattgctctcatgtccctttctccgtcgtccggagtttttcggcaaggccgtccaaatggtttcaattggctttagcccgacatccatggatggttggtcggtttctcttccgacatcttccggttctgttagcggagatggttggctttcgcccggcaaattctgctcccacatgagtttttggccggtttgctgtttttcttccactaagactgagttctaaacgttgtttctcttgtttttagtttcttatagttttttttaataaatgctttagatatgagttggtgatgaatctttaggtttgtatggcttaaattttttaatctccaattcaatcttttgaggttttagagttacaagaattattaagagatggcgtccttggttgaagaaacgaagaattttccgacgcttattcggatattcttatgctgttaaattatattggagcttcgatggtttaacttcgatgattaccaaaagaatcacaattcgattgttatcgacgctgattctctcaccgtgatcggtgctcaacggcaaaagttgttatcggaaatcttccgattacttgtctaatacgtgttgaggttatatcctcttgatgacacgtggtttcagattgggtcaaaagttgatatttcttcttcagtcggcattgttactatggtaggctctaggtagggcctcaactttctgtaatctcttaaaaggcctttattttggctatgtattgtatcgaatgtttaatataatgttacatttgtgaaaaaaaagaaaagtaaatcattcttctaaaaaataaaaaaaaagggcggacgc

SEQ ID NO: 799 - DNA, 1338 bp, Arabidopsis thaliana
  Clone ID: ARATH-23APR03-CLUSTER3230_1
ttcgttaagctctttcatactcggttccatctctctctctctttctcactgatctcatttcattccttatctttccaattttaccctcacgttaccttcgaattctccatctcctaccattcaaagcttctctcagatgtctatagtctctaagcttcgttctccggttaaaccaatagatgagtcacgagctatcctctgttcgaccgggaacagatttaaggttacgaaaacagaaatgacgaagaagccacaactgaatccacgagtgacgaaatctccggcgacgaagaagcccgattccaatttctcagtttcgactgatgattcctcttcttcttcttcatcctcggaacgttcgtcagtgaacacgacaaactctgggaaagtaaccactccgtcgaaacggaacggagttgagaagctcaataatgtcgttgcctccgtcgccgtcgttgaagacattagtcctaaaattccgggaccggtcaagagatgccactggatcacacctaattcagacccgatctatgttttgttccacgacgaggaatggggtgttccagttcgtgatgacaagaaactcttcgagctacttgtcttctcacaagctttggctgagtttagctggccttcaatcctacgcagaagagacgactttaggaagctctttgaagagtttgatccttcagctatagcacaattcacagagaagaggttgatgtctcttagagttaatgggtgtctaattctatccgaacagaaactgcgagcaattgtagagaacgcgaaatctgttctcaaggtcaagcaggaatttggatcgttcagtaattattgttggagatttgtgaaccacaagccattaagaaatggctatcgatatggtcgtcaagtaccggttaagtccccaaaggcagagtacattagcaaagatatgatgcagagagggtttcgctgcgttggtcctactgttatgtattccttcttgcaggcctctggcattgttaatgatcatctcacagcttgtttcagataccaagaatgtaatgttgagactgagagagaaacaaaaagccatgagactgaaaccaaactggatctgcattctccattacttgtttgatcagaaacagggattggactattaagaagatgagtgaccagtgtttgtattcgttatggaatgtaccatttgtagctagctgtgttcattgattatgctactatcctagctagctttgtctaactagatatttgatgatgtgttagtgtttgaccaaaagattgattgcagggaaataaagaatttaacattttgtaaaaaaaaaaaaaaaa

SEQ ID NO: 800 - DNA, 1623 bp, Arabidopsis thaliana
  Clone ID: ARATH-23APR03-CLUSTER3254_1
gagcgagtgattaatgggacattaatgttacatatagaaaaacaaaaaaataagttattgcctttatacaacaaagttcccaaaattttgaattttttgtaatcatctctaagattctgttaatggtctcgcctgagacatcatcatcacattaccaatcatctccaatggcaaaatacgccggaacaagaaccagaccggttgtatgtatctccgacgtcgttctcttccttggcggagctttcatgtcactaatcctcgtctggtctttcttctccttctcttcaatctccccaaatctcaccgtgaaaaacgaagaatcctccaacaaatgttcttcaggaatcgatatgagccaagatccaaccgacccggtttactacgacgacccggatctaacctacacaatcgaaaaaccggttaaaaactgggacgagaaacgaagacgttggttaaatctacacccttcgtttatccccggagctgagaatcgtacggttatggtaacaggatcacaatctgcgccgtgtaaaaacccaatcggagatcatttgttgcttcgattttttaagaacaaagttgattattgtcggatccatggtcatgatatattctatagtaacgctcttcttcatccgaagatgaattcttattgggcgaaacttccggcggttaaagcggcgatgattgctcatcctgaggcggagtggatctggtgggttgattctgatgctttgtttacggatatggattttacgccgccgtggcgacggtataaggagcataatcttgttgttcatggttggccgggagtgatttataatgatcggagctggacggcgttaaacgccggagtttttctcattaggaattgtcagtggtctatggaactcattgacacgtggacaggtatgggaccagtgagtccagagtacgcaaaatggggacaaatccaacggtcaatattcaaagacaaactcttcccagagtcagatgatcaaacggctctgctttacttactctacaaacacagagaagtgtattatccaaagatatacctcgaaggagacttttatttcgaaggatattggttagagatcgtaccgggtttatccaacgtaacggaacggtatctggagatggaaagagaagacgccacgttgcgtagacgacacgcagagaaagtgagcgaacgatacgctgcgtttcgtgaggaacggtttttaaaaggagaaagaggcgggaaaggaagcaaacggagaccgttcgtgacgcattttacgggatgtcaaccttgtagtggtgatcataacaagatgtacgatggtgacacgtgttggaatgggatgatcaaagccattaatttcgctgataatcaagtgatgcgtaaatatggtttcgtacactcggatctaggcaagacttcccctcttcaacctgtaccgttcgattatcctgatgagccttggtgaaataattgtgttttgttgttttataaactctttagatgtgcttttataatgagttgattattataatccatgaagtgaaaggtttataatgcggaatctttttgaataattcaatgattattggtttatttgatcaaaaaaaaaaaaaaaa

SEQ ID NO: 801 - DNA, 1480 bp, Arabidopsis thaliana
  Clone ID: ARATH-23APR03-CLUSTER32602_1
tttttagaaagagggtttattgtataattttttctcccaaatcttttttttttccgccgccgggaaaaaatgaatcatcttctaatcttagcgagaaactcgctgcggcggcggaattttaatctccgaccaccgtctcgttccttcagtagcaccatctcaccggaatcgaatcgctcgtcttttggcatagcattcgatatcgatggagttattcttcttggttcctctcccgttggtggctctcctagcgctctccgacgtctctacgatgattccggtgctttgaagatacctttcttattcttgactaatggaggtggcttgcctgaatctaaacgggcttctgagatgagtcatttattaggtgttcaagtttctccattgcaggtgatacaagcacattcaccctttcggaagctagtaaataggtttgaaaatgagctcgttgttgcagctggaaaaggggaacctgccgcggtgatgtctaattatggtttcaaaaacgtcatttcaatggacgaatatgcctcttactttgacaacattgatcccttggcgccatataagaaattgatgttcaggcaggatggtcacaaggagcttagatcaagagaagatgttctatcccaaagagttcaggcagcattaatagttagtgatccagttgattggagccgagacatccaggttctttgtgacattttacgaactggaggacttcctgggaaagaaattggacctcaacctcatttgtacattgccaatgacgatttagactaccagactgagtttcctactgaacgtcttggcatgggagcttttagaatcgcgttagaatcaatcttcaacagaattcatgaaaaacctctagagtacacatcatttggcaaaccaaatccatttgtgttcaaaaacgcagaagatgttctgaaagaaatcgctacatccccttattcttcaaaccaaggaagtcaccacttcaagacactatatatgatcggggacaaccctaaaatcgacatcagaggcgcacgacaggctgggactccttggttttcaatattaacgagaaccggagttttcaaaggaaaagataaccattccgagtttccacctgatctggtcgttgacaccgtcgaggaagcagttgatttcattttgacaagagagtccgccaagcaaagcttactgtcatgagttatatcactctcattttttctgaccagtccaagtatttcttgacgatttgagattttatttaacatattggttattttcacggcgaggccaaagaaatggtgtagtaacaagtaaacagaaattagtgaacattattgaatctagaagacactattttctttatgatttgagattttattcaactttcaacatattgtgtttctcttcacgattgtgattacattactaaattgataagtcattattttggtattaaaaaaaaaaaaaaagaaagggc

SEQ ID NO: 802 - DNA, 1351 bp, Arabidopsis thaliana
  Clone ID: ARATH-23APR03-CLUSTER32646_1
ctctcttcgtgtctgcggtgtctgcgcactcttcttcttcttcttcaatggctttcgcgtttgagaaaccataaaaggaaacttttcagagttttctcttgtctcctgttcgtctccgtgccgtgtatgtcactaaatttaggtttatcaatggagatgaaatgcacatttcaatcaactcgtgctcccgcccggtgcgccccgtggtccccctattcgaccctctgggctcccatcgttccgatcgttccgaattcacctgattcacttgcttctttcaggtctatcagacacttggagttaagatcttggtacaatgtgtttgagattcataggaaagaagtcaattcaagtcttttggaagtgaaagctatgaacaaagatactgaagctgatagtgatagtgataggaagattaaagaagaggaaaggagaaggaagattggattagctcatagaggaaaggtgccatggaacaaagggaggaaacacagtgaagacactcgaagacgaatcaagcagagaacaatcgaagctttgacaaatcccaaggttcggaagaagatgtccgatcatcaacaaccacacagtaatgaaaccaaggagaagataagagcttcagtgaaacaagtttgggcagaacggtcaagatcgaagcgattaaaggagaagttcatgtcttcgtggtcagaaaacattgcagaagctgcaaggaaaggaggaagtggcgaggcagaacttgactgggacagctatgaaagaataaaacaagatttttcatctgagcagcttcagttagctgaagagaaagcaagagctaaggaacaaaccaagatgatagcaaaagaagctgcaaaagccaggaccgagaagatgaggagagccgcagaaaaaaagaaagaacgtgaggagaaagaccgacgagaaggaaagattcgaaagccaaagcaggaaagggagaatccaaccattgcttcacgttctaaactaaagaagagactaacaaagattcacaagaagaaaacaagtcttggtaagatcgcaattggaacggatagggttgtttcagttgcagctaaactggagaaactggatttggatttgataaggaaagagcgaacaagaggagatatctcacttgctgatcagatccaagctgctaagaaccaacgaggaagtgatgttttatcgagatttggtctttttgccatgaaatcgatggattttgattaactcttttctactcctagtttatagctttctctttttttcttgtgccactaaataaataaacaaggttgacttgaggatataataaaaaaatagaaggacgcaaaaaaaaaaaaaaaaa

SEQ ID NO: 803 - DNA, 675 bp, Arabidopsis thaliana
  Clone ID: ARATH-23APR03-CLUSTER32655_1
tttttttttcataagacagtggtttgatgaaaattgatcaaaacaacaacgctcaaatcaatttgatcacattcacttaagaaaagaaaaacatcaaaagaagcaaagaacaaactaaatgagtaaatctcaactcaatagcaaaaagctcacaaatctacaaaagtttttatgccaaacaaaatccataacttgtttaaccgatttaacattatcatcacaaaacgatacgctaattgttgacctaaaaacatgaaatatataatttataacaagagactccatcagaacttgatatttcgaaaatttggatcggagaaaatttctcactgatctccggcgaaaagaagcctccgagagacggcgattcccgatttcttgttgtgaccttctcggaaccctgaatccgattcgtcgtgataccatcccactgatctctgcgcttcgtgtacgatctgagaaataccttctctgacggattgtttgttgtggcggatgtcgtggattgtggcagagatcttccagtagagaggacggccaacgtagaagagaaccaccattaaagcgattaagatcactgtacggaaccagattcttgttgtcggtgacgatgatggagacgccattgataatcttccggacgcgtgggcggacgcgtgggcatagaaaaaactc

SEQ ID NO: 804 - DNA, 1459 bp, Arabidopsis thaliana
  Clone ID: ARATH-23APR03-CLUSTER32804_1
cattgcaagctgatttatcttagagacgtccaataaagcaagacagggttgcattgtactaagctccaattaccaaatctaaacaccagaaaccgcaatatatcctggttgggttttatacacaacataagataatagtatcatttggttcatcaaatgaattcagttttagttacaatcagatagatacagagtcattgcggacctaaaagcgagagggagcgcaaaccaaacctacttacgcacatgacgattatacgggtctatgctaaaatccttattgatcacttcacatctgcacctcaaactctaaggagctgcattttgttagcaaaagcaataccaatccaatcaggctgcgaagaagaccactgcaactgattaatctccgaaccagccgaataaaccgacatcggatcaatcccattgggtccagcaacagtaggaagctcccaaataagagcctgtgtatcatcaccaccagaacaaatatgtttacagctctgaggcgcccaagctatagcattcacactagcctgatgtctttcaagctcagcaacaggcatagtcggcgaacgaatatcgagaatcacaaccttattagaatccatcaaaatcgtagccatatatctaagatcttgtttgttccaagcaagtcttaacaaaggcgtatcaggctgaggactctcgtaaatgattgtagaatgttccttatcacgtaaatcaaagatcctaacggatccatcagcagagactgatgcgaaaaccctagcttctccccaagcaatgtcatgaacctctttatcatgagctataagctgagtctcaacaacagacttctcaatatcccaaatcgtacacgtcgtatcaatactacaagttccgagacgtttcggctctacatcgttccaatcgaaggaagtcaacggcgcacaaaactcgctcgttttgctgttgttgagaaccgagattggctcgacggttgatgaatcttcgttaatttcccaaagacggaggaaatcgccggaggaagcgaggagatctccggaggaaggacgacggagagaaggaggactgaacattagctttgttggaggataaggatgctcgaaggagagattcgggagaggcttaacggtcattgaatcggaatcgaaagagagaatgtcgatgcggttgttgtaatcttcgaggaagcttccgacggcgattctgtgaccggaggatgagcggagagaagagaaagccatggcgtagagtggatatggtgagtcgtatgtgacggcggtttccgatctggataacgaatctggagctgaattatccatggaaatgtgtggtgctgattcgattcgagatttggcttcttcacgacgaaagtgagaggagagttttgaggtcagtgtcagtcggatttttcaagagacggagaaataatcaatggagacggcgtagatat

SEQ ID NO: 805 - DNA, 2305 bp, Arabidopsis thaliana
  Clone ID: ARATH-23APR03-CLUSTER3308_1
gaagagtccaccatgaaactcacaaacgctctcttcttcttcttccttatctgtctcctctctttatcgtcagcttcatcgaacaagcctcagctttcaaatggctcgaccatcttattcacgacgatagggagacccactttcgaattcgacatctttactctccccacgagccaccgtccaccgtcacccgccgatgagcaccgtctcaccgatggcaaatctattaacttcaacggctatttcgcttctccttctacggcgttaatctcacttctacccaaaagaactcagattcaaccacaagacgtgcatctcatctacgtcactgagagagccggaactcctagcttaaactacgacgtcgttcacagcgataacgttggatctagaattcaggttccgttattttccggcgaggaacaacagagtggtatgaatgtaaattccatgaaagacacgcctgttttaacaaacggctatcttgtccacgtgtcgacacatgagaatccgggtaagcccatggcgagttgggccgctgtttactcgactgagttacgaactaagtcgactcggcggcttacaccactgggtatcgctgacttttctccggctgtgtctccgtctgggaagtggactgccgtggcttcgtttggagagaaaggctggacttggagcatggtagagaaagagattagttcagacgtctacgttttcctgactcaggatggaactcagcgagtcaaggtggtcgagcaaggcgggtggccgagatgggtcgatgactcgactctgtatttccaccggaaaagcgacgacggttggatcagcgtgtaccgagcgattttacccaaaaccggaccggttaccaccaaatcggttacgattcaaagagtcacaccaccgggtcttcacgctttcacacccgccacgtcaccaaacaataacaacttcatcgcggtggctacaaggaggcctggatcagaaatccgccacgtggagcttttcgatttaaagaagaacgagttcgtcgagttgactcgtttagtctcgccgaagagtcatcactttaacccgtttctttcccctgactcgtcccgagtcggataccatagctgcagaggtgacgcaactggacgtaaaactcctcggaatctcctccaaagcctcaaaacaacttcaaacgacctctctctcttcagattcgacggtgcgttcccgtctatctcgccggaaggtgacagattcgcgttcgtctctttcacaggcgttttcgtggtgaacccagatggttcaggtctacgtcaattgcttccacaaatgggatttggaacagtttgggatcctattcgacatggaatcgtctacacaagctcaggtccagctttagctccaggaaagtctcaaatcgatattctcgccataaacgtcgatgcacctagtccagcaaccgccgttaaaaaactaacgactaccggtgaaaacaacgcttttccgtggccatcacctgacggtaaacggatcgtgttccgttctgcgcggtccggtactaaaaacctttacataatggacgcagagaaaggtgaatccggtggtttgttccggttaacgaacggaaactggaacgatacgatagctacttggtcacctgatggtaattggattgtgtttgcatccaaccgggaatttcccggtacgttgttgatgaatatatatgtggttcatccggatgggaccggtttaaggaagctggcgcaaaacttgaccggtttggtatcgatgcatccgatgtttagtcccgacagtaagagaatcgtgtttactaccatttatgctggaatctcggcggagcagatcggtaatccgcattttaacgtcccgagtagtgagatttttaccgtgaacttggacggctctggtttgacgaggctaacgcataactcggtggaagatggaccacccatgtggttccctaagatcaaagctactggtgatgtggcttggcctaagaggtttggccctagttgctctatccaagatttcaagacgcaaaatactaccgtgaaaatgaaaatgaataagcccgcaacaatgtcatcaatgtgtgttgttccttcacaatgatttgttatgtaacttattcttctaataaaaaactccgctagttcatatcttgttaagtatttggttagcctaagaaattatatagcttgaggtttcacattttcaatattttttaaaaataatttgggtcaatattgatgttggaaatgaaatcaacggttgaacaaaaaaaaaaaaaaaa

SEQ ID NO: 806 - DNA, 4716 bp, Arabidopsis thaliana
  Clone ID: ARATH-23APR03-CLUSTER3313_1
ggggagtaacaaaaaattctagctggtgtgggtaattaatccatttgttattatgtctgctgtctgctgaattcactttttcttcttgttaaaaaccatttgatgatcgtttatagttaaaataaatgggccggagtaaaaaaggcccattaatgaccccttcaaataaatagaaattgtgataccctcccccttcgaccttccgtcgtagttccccgacaagctaactactgttgagccccgccgcatccgaagccgacttttcaaatcgtcgagcttcaacaatgacgtctcttctccttccttcatctcaatttctccagactcgaacccaaaacaatggccaaccattgcttctccctcgaacaccactgttcgcaccactaccttctctccgtcagttgagaccgaaacacatctctatttccgccgcagcgccgaagaaacaatcggagactgtcacggcgccgacaccggcagcgaagaagaattcgagcgtggaggaggaaacagaagaggaagtagaggaagatatgccgtggattcaagagaaggcgttagacctagtcgagttcactggatcggtgagtcaggcgattcctggtcctcgagttggaagtagcaaattgccgtggatgctcgccgttcctttagcttacgccggcgtcactttcgtcactgctttcgtcaaaaccgttcagaagttctcttctcctaaagctcagcgcaagaaactggtgaatcagaatgctatgctttgcagatctatagatgagctattaaggaaagctggaacagtgcatagctctgagcttaaggcacttgaacaaaagacagagtttaacatggaggagatattgcggaaatacattcgttatgcgttgaatgagaaaccgtttaatcccgaccttgttgctgatctcattcatctaagaaaagcttctggtttgaatgattctcagattcctgagattttaaatgagatctctcgtcgtattgtcaaggaaaaaggtccggtagtgatgaaaatgcaaggctttaccgaaaaaggattcaagagaaaactcgccgtgcaagcgctttttggaaagatttactatctttctgagcttcctgacttctgctcaaaagacaactccttaatcgtcaaggaaatattcggcgttacagatgaagacgcagagaagctgcggatacacgctcttgctgaagctggagacatagaggcacttgagaaaatggtggaatttgagaaaactgcggagtcttcttcggataaagaagaagattcaaatgaagaagatgactctaacaccacttcctaagatgtttgttcaacgaccaactttcaacagtagattctttccaaagggggttttcttcttctgttctttgacttataccccaagttgtgttgtttacagcagaagacgtctgattccaacagaaattgtcttttgcaaaaaaccatgacacagctcgtaatacaaattaactgcatctatagtgcagcacagcaatacaagttggggcttatattcatagaaataatattgtctttgctaaatctaaactcatacagatataaagggaaaaataaaagactcgagatactttagcttatatttattataaggttttctacaaccacaagaggttacacttacattaagccaaagtactaaaactcttctgtgtctgaaaatggattccggaaggttttggtgctagcctaataatcctagggaaaatcttgtaatcctcgatgttgaaatcgatgagcctttgctggtacagcccgaaaggtgagcctgataacctgaggctaaagatttctgtgttgactttccagtttcccatcaataaacttttggtcaaactgcctccttaagattgaatgttctgacaatttccctggcgtggtcatgttcatggagctcgactagtattctctttaatctgcgggcgagaccagtggtttccgcatcgtccagtcctgagccaagccttttctcgagaattcttctaagtgtcagagtacaatccacaagaggttgcagcggacgactgtgggttcgtgtgacgcttggtcctgtccacactccagacaaagaagcaacgattctttcagttcttgtcacagcatcatggatatttgatgcaatgcttctgacatggggtagaacttttccaaacaaaaggtcactaagagccaagttctccaacactggaagcgccaggatgtctttccacatacatatatttctcataagacggactgatgtcccaaacctatatgcggcaacttgtggagtattaggtacagccttcaataccagaggatcccatgtcggaacactaatagctgcaatggcttcaacaaggcgagcacgaatagcagcaaatagttctgctaaggcctcactcgaagcagaaacataatttgtcaccaagcttgtagcagcaacagcatttcttgtctcccgggtgctaagtatatcccagcaacgaactatctgatggtgcaaaattggaattgcaaccttttctactagctcagggacaaggttggcatcagtatcatctggtgcaaaatcatccccatcttctggcttcccgtaatcaaaaagcaacccatgccatttcatgtcaaagaaatccacatcttgatgaagaggatcccatttcaaaagctccagtcttacataaggtgaaaagatggaaggaacggtcaaagacatgtaagcatcacgataagttgatgaatagtctcgcttccacctctcaaatctcgccttcacctttgaaagctgggagtactcctcagatgcatcactaaagaccttatcagcacactgaagtaagctatctcttgtctccttataagctgaagtctcagtgtcactctcatcagtgcttgattctccttctattttcagagaaggtccatcaacctccatagctgatgcacgcttattttcaaatcgagctcgccttttctgccgggctgcagccctctgttccacttccctgcgcttctgcagattttcgtctctgccaaattcatcaagcccacgcgtccgattcatctgctgccttatagaagtagaggcagccaacgcagcacctgtggcagcagcaatcactgaactactgcttccatgtttgtttagaactgtcattgctgctttcactgcggcccccaactctatcatttcatcattgttatctgcaattctcctttctagaatagataaagcatgtttttcgttaagttccttcatttgatcttcaatttcttcaattaatgaacccttattctgcatgaagtcacagataacagaaatgaagtctctgagtttttgcatgaacacatacttatctccagctgcagatagcgaactttcaagagctgtgatactcatcaacgacgcagtcagattctcatctgtcttggtaagggaggataacgtttttgcatgagattccttaagcttcttaacattgtctttcaatgccttcttggcaagctcggcttgttgtgacattggtaatgtatcaacactagtagctgggccaatggtaggagcgacagaaacattcggcattggtgtcccggcatgataagcatacatctgcggttgctgttgtggcagtgtctgctgtttagaatgcaaaggcacgccaatcccattactagttacagtcctatgcgacccttcgtccattcttttaccaatacccttcttaaattgctcctcctcccacaacttatcttcttcatcctcatcctcataaatactacttgtcgtggtttctttagcagtaggattttcatcaccgaaatcaaacacacctttcttatcatctttctgaggtctcggaccgacgaaaattccctgaaaatccgcatcctcgtcgctgactccttcaacagcagaatgatttacgataccaccatctagtgatatgtaatcaggcgccggagctgaacgtgactgcctcatcctctctttcttggctctaataatcgctgcctgatcagcaaacgcatcttcatgctgctcttcttccccttcctcatcgaagtccaaatccgaaacctgtttaactacatccttcagactctgctgctcatgatcctgcggaggtttgattaaacccttaagcactaccttcggctcggcattggcactagagcgagaataaggaagcgtccgtgtgttcttctggagctcgagcagcgcctctttcgaataagagccggcctgaggaagcacgttagaagaagcgggacgacgttccttggttgaagagtgtctgtgagaagatcccgaaacgccgagacgggaagaggatttgacacggtctctgccgttcttaggctttatcgtcacacggggagctccatcttcttcctcctcctcgtcgtcggcgaaacttaggagtttcttcttcggggccgaggctgagagtgttttaggtttcgaggaggaaagagtcgaagtcggttttgacgagggggtagcaactttaccgtcaatttcatcgccgccgtcgtcccctcgccgccggaaattcttaggacggttacttcccattctctctctctctctctctctctctctctcgaattagggattttacagttagggatccaaactttgaattagagaattgcaattgaactaatcctttgctttgcttttatgatcc

SEQ ID NO: 807 - DNA, 529 bp, Arabidopsis thaliana
  unsure (1)..(529): unsure at all n locations
  Clone ID: ARATH-23APR03-CLUSTER333782_1
ggccgttcctttagagaagaagaagaagataggagcgagcgagcgagcgagcgattagaagaagaaatgatggaggaaggaccaccagctccaaagatgcttcgaatggtctacttcgtcggcgccggatttctatgtacattcgcgatcaataagtggcgtgagatggagagaaactcgcttctgaaacaggagcaggagaagaatcaacaaggagatgttggtttattgcctagagattcggttcagaaagctatgaaatgatgatcactctcttcttcatcttttcttgtaattttgttttgatcttgtgattttagtatcgttgacctaaagtttgcatctttttttaatgaaccctagaaatctgatactcgtactcattggtttctggctttgtgcttaatttaaagattgctgctttctgaactcaatttgatcaaagggtttcaataagtcactgcttaaaaaaaaaaaaaaaaaaaaaggaaaaaaaaaaaaaaaaaaacctcgngggagggcccggtac

SEQ ID NO: 808 - DNA, 1182 bp, Arabidopsis thaliana
  Clone ID: ARATH-23APR03-CLUSTER33525_1
atctctttcaatttcagtttcaagatagaaagagcaagaaaggcgcagtctttgggggtttctcgggtcatggtgggtttaaacaacgccgtctcactcgacattgaagagatctgcaatggtggcaaggagcatcatgtcaaaacttgccatggttcagtttcagttgtagtatatggagatcaagagaaaccagcatttagtcacttatccagatgtagcactaaactttatgtcttgtttccaaggattgttttctttgccctgaagcagtgtccttactgctccataatttctgcatctaccatattagtcctccaggacatgagtttggagctgctccagtttgttccaatgatccctccccttctgttgaagacctcgcggaccagattcttgatttattgatcttctttagcctcgaggtatgaatgtgcatgggattcacagaaggtgtttattacaaggttgtgtcaaacttattgtactactatggcatgtctggactgttaaaagatattttccttcagaggtacttcagtaaggaagctcgtggtagctctgaagttccagagcgggatgtggtacatgaatgcagaagactgctaggtgaaagacacggtagtagtcttatgcggtttctagaagcagttaacaggagacatgacttaactgatggattgaagagtttgaaatgccgtacactcatctttgttggcgaccaatctcctttccactctgaaactcttcacatggtgacagcattggacagaaagtacagcgccttggttgaggtgcaagcttgtggatcaatggtgacagaagagcaaccacatgcaatgttgataccaatggagttctttttcatggggtttggattgtatcggcctggtcgggttagcgatagcccccggagtccactaagtccgtcatgtatttcgccagagcttctatcaccagagagtcttggtttgaagttaaagccaataaaaactcgggttcccacgaaatgttaaagccaccacacacgttgattcattgtattcttcctctcatatttggtttatcaattcaaatattcttttattaaattcgtgtttgtactttgtaatcgattaactcaaaaactctttatttataagagatagttttagcgaaaaaaaaaaaaaaaagggcggccgc

SEQ ID NO: 809 - DNA, 1303 bp, Arabidopsis thaliana
  Clone ID: ARATH-23APR03-CLUSTER33599_1
gcaccaggagagctcactagtccccccccccccccccccgggggggagatggctgtgactctgagattaacgaattctttagcattttccagtcatcctctaacgtcgtccgtactgttccgaggaagcaaatcgatcggtactattactaagatagcatcaacaatcaggacggtaaaaatggcggcttttgctgggtctgactcagaaacaacgtcgtctacctcgagagttatcgattctcatctccacatttgggcttctcctcaagaggccgagacatatccttattttcctggccaagaacctactttgactggtgatgtcaatttcttgcttaagaacatggaagaggcaagagtagatggagctctcattgtgcaacccatcaatcacaagtttgaccattctttagtaacaagtgttctgaagagatacccatcaaagtttgtcggttgttgccttgctaatcctgcagaagatggcagtggaattacgcaccttgagaatcttgttttagagagtaactatcgtgctgttcggcttagcccctccttgtggccttcgggcctctcgttgccgagtgctcttggttctgccttggtcgcgtaagcatcgggccgttcggtgcctgcccgcctcgtggccatcggggcactagtgcctcacgctgctggtattgccgtgctctccgcagaatttccaaatgacaactgttttactagatcgcgctggattctgcaaagtaccagaaaatggtgaggcaaagcttgcttattctcaactcatgaagctgtctagatttccacaggtatatgtgaaattcagtgctctattcaggatctcaagaaccggcttcccgtatcaggacctatcgcctctcctatctcaacttgtgtcccattttggggcaaatcgtgtcatgtggggcagtgacttcccatttgttgttcttgaatgtggatataaagaagctaaagaagctgtgactatcattgcaaaagaagcatccttgtcaagttctgagatggactggattctgggaaagactctgatgcagctcttccctggacaatgggttcttccttgagaggcttgtcagaagtaataggttgcatgcggatgagataatgaagcaagcaatggaagttgtatcattaaagatacttaactctagcctatatattaccaaacactagatgtataccaatttagtaaatcaacaaaaatcttatgtgttgatacaaaaaataaaaaaaaaaaaaaaaaaaaaaagggcggccgctcagaggatcgagctgcg

SEQ ID NO: 810 - DNA, 2454 bp, Arabidopsis thaliana
  Clone ID: ARATH-23APR03-CLUSTER3366_1
tatagaccaacgaagaagaagacgaagaagcagcctctcatctctctctctctctctctctttcacttgcagtgtgtcgctttgctgccttcattctcatttcacacgaagattaaaaaaagttggtctctttcctaatttagaagagtgataaaccaatcccagatccgagtctctctccccatctccttctttatgagggggagatcagaaggagggaagaaaaagccggtgattgtgttactctgcgttgcatcagtagtgcttgtttttgtatatctcttctttggttcctctaaccataaagctattaagtatgggaggaaaagtcgttacttaggtgatgatgatgatagtactaagaaagatgacacttctagctctttttatgtagaagatgtagtagggaatggtttcactcccagaagctttcctgtgtgtgatgatcgacactcggagcttattccttgcttagataggaatcttatataccaaatgagattgaagcttgatttgtctttgatggagcattatgaacgtcactgtcctcctcctgaaaggaggtttaattgcttgattcctcctcgtccagggtataagattccaatcaagtggccgaaaagcagagacgaagtttggaaagtgaacattcctcatactcacttagcgcatgagaagtctgaccaaaactggagggttgttaaaggagagaaaatcaatttccctggtggaggcacacattttcattatggtgctgataagtatattgcatcaatggcaaatatgcttaattttccgaacaatgttttgaacaatgggggaaggctgaggacatttcttgatgttggctgtggtgttgctagctttggaggttatcttcttgcatcagaaattatgacgatgtctttggcacctaatgatgttcatcagaaccaaatccaatttgctcttgagagagggattcctgcatacctcggcgttctagggaccaagaggctcccatacccaagcagatcctttgaacttgctcactgttcacgttgtcgtatcgattggcttcaaagagatggtattcttcttctcgagctagacagggtgctaagacctggtggctattttgcatattcatctccagaagcatatgcacaagatgaagaggacctcagaatatggagagaaatgagtgctcttgtgggccgtatgtgttggacgatagctgcaaaaaggaatcaaactgtaatttggcaaaaacctttgacaaatgattgttatttgggaagagaacctggaacccagcctcctctttgcaattctgacagtgaccctgatgctgtgtatggtgtaaacatggaagcatgcattactcaatacagtgaccatgaccacaaaaccaagggaagtggattggctccatggccagctcgattaacctctcctcctcctcggctagctgactttggctattccactgacatttttgagaaggatacagaaacttggaggcagagagtagatacttattgggatctcttgagtcctaaaattcaatcagacactgtaaggaacataatggacatgaaagcaagcatgggttcctttgctgctgctctgaaagaaaaagatgtttgggttatgaatgttgttcctgaagacggaccaaacacgcttaaactaatatacgacagaggcctgatgggtgctgttcatagctggtgtgaagcgttctcgacttacccgaggacttacgatttactccatgcctgggacatcatatctgatatcaagaagagaggttgcagcgcagaagatttgctgttggagatggatcgtatacttcgtccaagcggtttcatactcataagggacaaacaatccgtagtcgaccttgtgaagaagtatctcaaggctttgcattgggaagcagttgaaaccaagacagcctcggaatcagaccaagactcggacaatgtgatactcattgtccagaagaaactgtggttgacaagtgaaagcctcagagatttggagtgattacgatgatgatgatgatgaggccaaaaactgcctccaacatgaaaaaacaaaacaacattcacaagagatttctttcttgggagaatctaatcgaaaacatacaacgaagaaaattcgttttatagcggcaatttaacgttcttttctcttaaatctttctttctttacatattcatataatgtttgtatggttcgttagagaggactaaagtttcttatcaatttaaactctttttgttgcaatttatgtattaaatcattgtttaatagattgatgattattcattacttttttaatttttctaattattgtatctttcttacattcttataagtgatgttgtttgtatgattttggtagagaagagaagacacgtataagtaaagaacgatagattcttttgaaaaaaaaaaaaaaaa

SEQ ID NO: 811 - DNA, 2740 bp, Arabidopsis thaliana
  Clone ID: ARATH-23APR03-CLUSTER3379_1
accaagaagcagagaaaagaaacattaaagcagagaaaaaacataagacaaataattgcgttacttaccctccatttgctttcttctccatcttcttctaattttcttcaagttttatcaatggctggtgttactggaatcttaaagcttgaagcttggagcatcttgtgaagaagattaactagtttcttgtatttttcttttctggggttttgagtttttttttctcttccttattaccggaagtaatggcatgtcggagtatgatcgcttttagtttagatcctgaaagaaaacaaagtggaggacttaggacaaaacaagctggaagaggatcttgccgtggaagttagtctttgttcaaatccattttcctcttaaagaattttgaaattgcactgttgcaagtgaaaaagtttgttcttgttggagcttaaagaagagagaagagaaagagaaaagctatgggagttttactaagagaagctttaaggtctatgtgtgttaataatcaatggtcttatgctgttttctggaaaattggctgtcaaaattctagcttgttgatttgggaggaatgttacaatgaaaccgaatcgagctcgaatcctagaagactttgtggacttggtgttgatacacaagggaatgagaaagttcagttgcttacaaaccgaatgatgttgaacaatcgaatcattttggtaggtgaaggtctagttggccgagctgcatttactggacatcatcaatggattctagctaacagttttaaccgcgatgttcatccacccgaggttattaatgagatgcttctccaattctctgctggtattcagactgttgcagtttttccggttgttcctcacggtgttgttcagctcggttcctctctgcctattatggagaacttggggtttgtgaatgacgtgaagggtcttatcctgcagctcggatgtgttccgggggctctcttatctgaaaactacagaacatatgaacctgctgctgattttattggagtgccagtgtctcggataataccttctcaaggacataagatcctccaatcttcggctttcgtagctgaaactagcaaacaacatttcaactccactggatcatcagatcatcaaatggttgaagaatctccctgtaatcttgtggatgaacatgaaggaggatggcaaagcacaacaggatttctaacagctggagaagttgcagtaccttcaaatccagatgcgtggctgaatcaaaacttctcttgtatgtctaatgtggatgcagcagagcagcaacaaatcccatgtgaagacatcagttcgaaacgctcgcttggaagcgacgacttgtttgatatgttgggtttggatgataagaacaaaggttgtgacaacagttggggagtttcacagatgagaacagaagtactcactagagagttatccgactttcggatcattcaagaaatggaccctgagttcggttcttcggggtatgaactttcaggaacagatcatctgttagatgccgtggtctcgggtgcttgctcctccacaaagcagatctcagacgaaacttccgagtcctgcaaaaccaccttgactaaagttagtaattcttcggttaccacgccgtctcacagtagccctcaaggtagccagttatttgagaagaaacatgggcaaccattggggccatcatcggtctacgggtctcagataagttcttgggttgaacaagcgcacagcttgaagcgtgagggcagtccaaggatggtgaacaagaatgaaactgcaaaaccggctaataaccggaaaaggcttaaaccaggagagaacccaagaccaaggcctaaagatcgccaaatgatccaagatcgtgtcaaagagctgcgtgaaataataccaaacggtgcaaaatgtagcattgatgcactccttgaacgtacaatcaagcacatgctcttcttgcaaaatgtctccaagcattctgataagctgaagcaaaccggggaatccaagattatgaaagaggacggtggaggagcaacatgggctttcgaagtagggtcaaagtctatggtgtgtccaattgtcgtagaagatataaacccgcctcgcattttccaagtcgagatgttatgcgagcaacgaggattctttctagaaatcgcagattggatcagaagcttagggttaacgatcttgaagggagtcatcgaaactcgagtagacaagatttgggctcgcttcactgttgaggcgagtcgcgacgtgacgaggatggaaatattcatgcaactagtgaatattttggagcagacaatgaaatgtggaggaaactctaagactattttggatggtatcaaagctacaatgcctttaccggttactggtggctgttcaatgtaatgacacaaattattgaccgtaccggattgctccggtttaataaaccgggctggttaaaagcttgattcatatagaggttacgagcggaccgctctcaaggattttaggctcgctatgactaactaaaaagtcagtctaaaccagagatgatgatttttaagtgtgtttttttttctcaactttatgttttgtacattagttgcgaattttcatttgtgtggaattttttaattttaattcagttttggagttgtaaaaaatttaattaaattgtttaaaattcgaaaaaaaaaaaaaaagggcggccgctcgagaggatccaa

SEQ ID NO: 812 - DNA, 1402 bp, Arabidopsis thaliana
  Clone ID: ARATH-23APR03-CLUSTER3383_1
agaagaagtagacgatgttggaagaacaatagaggaagagactgtgtttgagacagagaggtagagagaggaacgatggctgctgtagaagaagtagacgatgttggaagaacaatagaggaagagactgtgtgtgaaaaaagagaaagaggagaggaagctgaaacattgactccatgggagcaacactccagcatcataagcatccctcgattcgactacaaagctccctcttctctgcttcatcattctcattccggattcctcgtcacctgcaacatcaaaagggagaaaagcgctactaaagaggtcatgtccatccttggaaaatatattgggtccatgcatgaggagaaacctgaagttctaaactctactgcatccaaaaaacaaaaagtttgtgcacaagagacagaggaaggcggagagaagactgtacctcttgagaatgatgccttgcaggaaacaggtgaaaatccaaatgttgaggatcttaaattagcaaatgaagaacacaattctctcatgtcattggttaagctaacaaagagtggcttgcttctctttactttccctgttgaaaactctcccaatacaacgaatatcgtatcacgagtcttccagtctatggaatctggagctttgaaggcaccaatctggtgccatcggatattcccagttcaagctacttgtggtttgacagagaaagaacttcgggaaacagtatcaaagcttgttcagcggtttgtcaatgataaagacaatacactatcaaaacctgtgaagtttgcagctgggtatcaacgtagaggtgcggaggagacgaaaggaaagattcggaaagacgcttcagatgttctagttcaatgtccgttgctggaccgcattaaatgctttgaaactgtggcagctggagtgaaagacattgtaccagattcagttgtggatctcaaatctccagagttatgtgttctggtggaactgttaccgctctctagaatatcaagtggctcctttgtagctgctgtttcagtgcttccacatagactcgttagcacaaagccgaaactctgcatcaagcctctagtccctgaatccaaacacaaaaagggaccaaactgacaggtgcaaaggctgatcgctgcattcgattttcgagagccaaagatatcaatagaagttgtaatctctctgtttttgtttagatatgtcttttgctttcagtatctctaatggagttaacaacaatgtctgacctatgttattcaagagaacaaagataaaccctaaaaaaaaaaaaaaactctgtttttgtttagatatgtcttttgctttcagtatctctaatggagttaacaacaatgtctgacctatgttattcaagagaacaaagataaaccct

SEQ ID NO: 813 - DNA, 1699 bp, Arabidopsis thaliana
  Clone ID: ARATH-23APR03-CLUSTER3388_1
attttctcagtttttcccctctttttaccttttctggaaaaaagttagataaaatcggaattgtttggattagggcttcgattttttgatgttgttgtatacttttttcaatagagatttgattgtgaaacttttgtcgtcgtagctttaagcaaacaaaaaaaaaagatgaccggcgttggcgagaatcagcttatctccattcaacctgatgaactcaaatttctctttgaacttgagaaggcaaagctactgtgatcttaaagttgccaataaaacagagaactatgttgctttcaaggtgaaaacaacatctccaaagaagtattttgtaagacctaacactggtgtcattcagccatgggactcttgcatcattagagttactctacaagcgcaacgagagtatcctccagatatgcagtgcaatgacacgtgtcacatttttccctctcttctctctctttcgctctttcttcttccccgcagttcccggagacgacgccggaggaaaatcgtacggaaactttgcttcgacttcacgtggccgctccacgaagcgcctttgggtttcgtcttccccgtttctctttctctctcttcttttgcctttgttaccacgaatagaacgagaggagagagataggaggagagttttgggatattggtggagagcgattatcgggagagccagagaaaaaaataagcagcttcttcctccctcatcgttgggaccgtgacttttgttttcttcagctttaagcaaacaaaaaaaaaagatgaccggcgttggcgagaatcagcttatctccattcaacctgatgaactcaaatttctctttgaacttgagaagcaaagctactgtgatcttaaagttgccaataaaacagagaactatgttgctttcaaggtgaaaacaacatctccaaagaagtattttgtaagacctaacactggtgtcattcagccatgggactcttgcatcattagagttactctacaagcgcaacgagagtatcctccagatatgcagtgcaaagacaaatttctcctgcaaagtaccattgtacctccacacactgatgtggatgaacttcctcaagacactttcaccaaggacagtggaaagacattaacagaatgtaagctcaaagtctcttatattaccccgtctacaacccaaagatcctctgaatccggagcaacaaatggtgatggacaaagctcggaaaccatctctactatacagcggctgaaggaagagcgagatgcagccgttaagcaaacacaacagctgcaacatgaattggaaacggtaaggaggcggagaaaccagaggaacagcggaaatgggctatccttgaagttggcagctatggttggactcatcggactcatcatcggtttcatcctaaaacttaccttagcttctcccacataacaactcttgagcttcaacacatcgcctatcatctcaatatatgtaacagccgaatcaaaacagattcacatattttcgggtattttaaatcttctaaatttgggttatttatatccctctctttctttctcctaatgttccacacgtttcttccatcaaattttcttctttttttcagttataaattatgtacatttttgacccaagagaccctttcatcattggttttacttgtccaccaaaaaaaaaaaaaaaaa

SEQ ID NO: 814 - DNA, 2645 bp, Arabidopsis thaliana
  Clone ID: ARATH-23APR03-CLUSTER33899_1
gtctttctcctccgtgttccgtcgtcttctctctctgcgttccttcttgaagccggaggaagcccaaaacccttggaataaaaaacaacggcctctctgctactgattgatagaaaacaaaaatctcaaacctagagaagaaagcgacgtactgtatattctcaagactaactggatctctcgttgatcttcaataaaccctttttgcaatcagtctcataagagtctacaactcgtgggcttctatttttcttgttggggtttcaacgttttcctctgtgaagaaagagattgactttcatggagatgaacctctgctggaatttgtagattcaattagggtgttttctgggttttgtggtgcttcgataggggtttttggtgcgttggtggtgggtgatgggtagtagtgatgagcgaaactgtaaggcgattgatgcgtcggtaggaggtttggtttgggtccgacgtcgtaacggggcttggtggccgggtcggattatggctcatcacgaggttcctgacggtactattgtttctcctaaatctggtactcctattaagcttctaggtcgtgacgatgctagcgtggattggtataatcttgaaaagtccaagagagtgaaggcgtttcgttgtggggagtatgatgcttgtattgcgacggcaaaggctactgcatcgactactggtaagaaggctgtccagtatgccccgtagagaagatgctattgctcatgctcctgagattgagaatgcacaccttgccaaagatcaccctccgtgtattgagaaggctagtacatctggtgaagtttccagaaagggtattgaggactcgggtgatgtggcagagactgaagttgcattgcaatctactatgtctttgaaaaaaaccaagaacggcaaagcttctaaggtgcagcctttgtcagaaaagagaagaagaacaccaaatgactcggaagatgatgggactcaaacaaacaaacgaatgagaggacttgaggatattggaatgggtactggatcgaaagggaaagtacaggtcggtgcactgctcgaggatacgcaggaaaatggttttaaaagtgatacaaacaacatcaatgattctgtgtcaaatgggagtctttccaatggcagtagcagggattgctctccgtcaatgaaaagaaaaaggtcgcctgtcgtcattgcgaatgactactctaaaaggaaaaaccgacgacggacactgacaaaagtgttagagagtacagctacggtgtctatccctggtacctgtgacaaacttgtcaattctgattgtttgtctcttccaggggtttctgaaagcgataataactcggacagcaatgaggttttctctgagaatgtttctgaaaatattgttgaagtgatcaatgacaaggggaaagagagtgaagtctcgaacatatcagttttggcaaaggatgactcatccaatggattatttgatgttccactaaatggagatgaaaaatacccttcaggtatttcgacggtgcctttcacatcttcttcacccaggaaggctcttgtttctggaccgacgagacggtttggtcagagtagccatgatgcggccgcgaaaagcgaaggaagtaatggatctcctagtacaagtccagcagctacacttttcaatgggattaagaagagcacttctaaatggcagctaaaagggaaaaggaattcaaggcagatgagtaaaaaacaagtagaaagaagaaatgcgtacgccgaagaagccaacaacaatgctttacctcattggtctgtctctgatcaaaagccacgcagtcttttcagcgttggcactcaagctatgggaagaaattctgaactgtatgacgtgaagatcgaggtaaaagctaactataaaccccgtaatgttccgctgatttcccttaggagtaaactgaatggtgaagctattgtcgggcatccttcagtggttgaagtgcttgaagatggatcatgtggccacattgtgagtagtcatagaattgatgatgcgaagccaaaaccatcatcaaaaaagaaatccaagaaaaagaaaccacattttcctccacaggcatcaaagtcgaagaaatcttcatctctagcaataaagacaaggtgtctctccgctctaagtggccagaagctgacactaagtagcaagaaaaaggtaatgatagagtcgacgaaagaacgaattgtagcttgcatccctctgaaagtagtcttcagtaggataaacgaaccagtgaagggctcagcgagacaagtgcacagatcattaccatctgcaggtaatacaggatgagatgagtttggtctctgttctatgtcctaccatttgtttcctacgttcatttacctcggttttaagcattcaccgagattaaattagcccggtttttgagggtgatggatggtttccgtacaatacagagagatatataggccttgtgacaaagaacaagagagaagaatatggaagtgaacttgtatctgtaaatattagcaatagcaattagtggtgggacgtgtaatttttaaaaaggaaaaaaaaaactcagagttgcatttctaaacttgtcaaactcaaaaggagaagaaactttttagct

SEQ ID NO: 815 - DNA, 1870 bp, Arabidopsis thaliana
  Clone ID: ARATH-23APR03-CLUSTER3391_1
ttttttttcacgtttttttgttgttgtgagcttcttgttgggtttaagactgttttcgtcagcaactaaaccctggtatccatttcttccaattatccaagcttcccctcaaaggtttcactttttcgccattgcttcaaccaaatttattcgtgttaaacggaatcgatgctgttgtgtggtgatttaagttggtagagttctacagttgtttcttctgtttcagcacgattatcacagaatgtctttagatacttctttaggtcttaagctcaagaaaaggctgaagctttcatcgtttagctccaattcttcttataaaggaaagagtagatccattactcaacgcagtgatgatgacactaactctcggaagactacggtttcgtctatgaagaagaagagggtctaccccaataaggctaagcataataaccatgtgaatgaaatccctcgcacgatgtgggttgcttcaaagagaaaccaagggtctacttctagttttaagaccgctaatgatgctgcaactagtgtgtttaaaacaaagtcacggagtggggttgatgttactcgaaagagctacaggaagagagatgaattggatagtaatgtagatgtgagtcccagggaaagttctgatgtgccgtcttttaaggctagaaaacaggtgttttcagagaagagagttgtgggagatggttcagatgttcaggaggataaaccaaggaagagaaagaggatacgacttgatccttatgatacctcaaataaaagaattgttgatgatgtccttcttgatgatggccttagagtaaagaacataaaagatgcagttaaaagtgtagaaatgtcgaaaaatgcacagtttcgtgcaattcagcctagtcattcgatcctctcctatgtggaagaaaatctgttggggcgtagacgtttaattgagctaaagagggccggctataacacagagcttcctgctccattagataatattcctcagtcaaccagcacagagagagaacgtatagaagaaagtgtatttaggaataaattggaattctttgctgctgcaaatgtttcatcttcatttccacctcctgatgtacctgagattgcgtttgcaggaaggtcaaatgttggcaaatcgtctctgctaaatgctcttaccagacagtggggtgttgtaagaacatctgacaaaccaggactgacccagaccatcaatttctttggtcttggtccgaaggttcgccttgttgatttgccaggctacggctttgcctttgcaaaagatgaagttaaggaagcatgggaagatcttgtaaaggaatatgtctcgacaagaaccagtcttaaacgggtatgcctccttgttgacaccaaatggggtatgaagccaagagaccaggaactgattaatctgatggagagatcgaatacaaagtatcagatagtcttaaccaagacggatgtggttttcccaattgatgtggcacgtcgagcaatgcaaatcgaagagaagttgaaggcaaacagatcaattgtccagcctctgtggttaacgttaaatgattgcagatgatggtgagctcaagatcaggagcaggtataggaagtttaagaactgcccttgctaaaattgctaggtttgcaaagttttaggttctcaaagcaatcctcaaaaccaaggataaggaagaagtcaaaatgttgagataaagaagaatggtgtgacgatgatgatccgactaagttagtgaaaactgtcaacaatcacttatgtttttgtttgtttattatctttttatttgtcaaagccatcacttgagcaaatgagcataaaatgtttttcccaaaaaaaaaaaaaaaa

SEQ ID NO: 816 - DNA, 2356 bp, Arabidopsis thaliana
  Clone ID: ARATH-23APR03-CLUSTER33984_1
ggaaaactctcgtcgcgcctgcggatcatcatcatcgtcatctgcgtgtaaaacacactcacgccatcgttgacgtctcagatcttcacataaaagctatctattatcaaactctcttcctcacggtaaccctaactatctgtaatttatctctctacactttcttcatctcttaatcaccttaatcatcttaagctttgtatttctagatccttctcccaaaacaacgattcgtgatctccgttctcatagatcagtttcggatttggatatttcttagggatttgtgtgagatatttttagaattgtttcgatttagggatttgtgtgaagaagatggattttccagagaatttgccttcagatataggaagattagagcagattgtttctcatttcttcccaaaagcattacacatagttcttaattccagaatcccttcgttgcaatctcgtggtcgtactcgtgagcgtttatcaggtcttaacgttagaaaaagtgacaaatggtttaatcttgtgatgggagatcgtcctgctgcgttggagaaattgcattcttggcataggaatattctggattctatgattattgatatcattcttgtccatccgatttcaaacgataatttggatgatgatgatgatcatagtgattctgttgttagatcagctgagactgtgattgagcgttgggtggttcaatatgagaatcctttgattatgtcctcctcagagttctgactcctgcaacgcgttaccagaaggtttacaagaaatctatcatttctgttgcggtctctttatgcacagactcggcttcttcctgcctatcgtgtctctaggcagctgagttcttctcttgcttcttctggttatgatttgatttacaaggtttcatctttcagtgacatattctctggtcctgtgacggaaacaatgaaagagtttcgttttgctcctgttgaagtgcctcctggtcgtctttgtgcatcggttacttaccgttctgacttatctgattttaatctcggtgctcatatcacattgcctccgaggattataactgattatgtgggaagtcctgcaacagatcctatgaggtttttcccttctccagggagaagtgttgaaggccattcctttactggtagagctggtcggcctccattgactggttcatctgcagcgcccgcgcatagctggactagcggctttcacagacctccagctcaattcgcaacaccgaaccaatctttttcgccagctcagtctcatcagttgtcacctgggttacacgatttccactggtcacgtacagatgcttttggtgacaatcaccagctttcacctcccttttcaccatcgggttctccatctactccaagatacatatctgggggtaacagtccgcgcattaatgtgagaccagggactgctccagtgaccattccttcttcagccacgttaaatagatacgtttcatctaacttctctgagccaggtaggaatccacttcctcctttttcccccaaaagcacaagacgctccccttcatcgcaggaccctttgcctgggattgcgttgtacaggagttctagaagcggagagtctccttctggattaatgaaccagtaccctactcaaaagctgtcaaaggacagcaaatacgattcaggccgcttctcaggagttctgtcttcgagtgactcaccaagattcgcgttttctaggagccccagtagattatcttcccaagacgacttggatgaccctgattgttcatgcccttttgatttcgatgatgttgatgagtcaggacttcagtacagccatagtcttgaccggaggaaaacttcaagctctatatcgcagtcgctacctctagggagaagatcatcacaggacgcagcggttggtgttctggttcacatgctgaagacagcaccaccattacgacaagactcaagcacttatatggcgtcaatgtctggggttcagagagaaggttcagtgtcaggtacagaatctgaattttcgatggctcgtagcacatcagatgcactagaggaactgagaaactacaaacagctcaaagacttgcttctctccaaatccaaaagtgggtctggaccaactcgcgtccactgagccaaatcaaagagcgatcaagatatgagttatccgatggttgtttgtagatatgaattttatgacgaatacttaactctgttgtatattgccaaagagcaatcacgttttggtttctgtaaaagaacttgcctttgaatatgcacataaaataaactaatcaaacttgaatcttttcattatgaagtagtgaaatttattgaaa

SEQ ID NO: 817 - DNA, 1655 bp, Arabidopsis thaliana
  Clone ID: ARATH-23APR03-CLUSTER34073_1
acacaaaaaaaaaaaagtgaatcaagaaagaaaaaaatggaacaagaagatttctatttccctgacaccgatcttgatctcagcttcacatccaccactaccgaccgtacattcgcctcctcgagcgctcgcacaagtctaacattaagcttcaacgacagactctctacttcctctgcagtcacaacctcatccacctcctcctcctccgtcaaccaccgtcgtcatgatcctcactggtcagcaatcaaatcagcaaaacttctctcctccgacggaaacatccacctccgccacctgaaacttatacgccacctcggcaccggaaacctaggccgagtgttcctctgtaacctccgtgactcttccgcaagattcgctttaaaggtcatcgaccgtaactgtctcacgacggagaagaagctctctcaggtcgagacggaggcagagatcctctccttgctggaccacccttttcttcctacgctctatgctcgtatcgacgagtctcactacacgtgtctcctcattgattatgctcccaatggagacttacattccttgttacgcaagcaacctggtaaccgtttaccgattcagccggttagattctttgccgccgaagttctcgttgcattagagtaccttcacgcaatgggaatcgtataccgcgatcttaaacctgaaaacgttttgcttcgtgaagacggacacgtcatgttgtcggattttgatctttgtttcaaatccgacgttgtccctacttttaaatctcgtcgctaccggagatcttcttcatctccgtcgcttcgtcgtagaagaagcggttgcttctccgttgctgcggagaaaaagtacgagagagaggagattgtttcagagtttgcggcagagcctgtaacggcgttttcaagatcttgtgtcggaacacatgagtatcttgcgccggagctagtttccggcaacggacacggaagcggagtagactggtgggcgttcggaatattcctttacgagttattgtacggtacgacgccgtttaagggagagagtaaagagcaaacactgcggaatatagtatcgaccactaagaccgcgagtttccatatggacggtgatttagatgaagctagggacttgattgagaagcttttggttaaggacccaaggaaaaggctaggatgcgccaggggtgcgcaagatatcaaacgtcatccgttttttgatggaatcaagtggccgttgattaggcattataagccaccggaagaagttagaggtcttgtgattaagaagtcaacgagaccacatgctagtcacgtgattgccgtttcaccgcgacggagaaaatcgtttttgtggagggcgttgtcatatttactgcgcggtaaaagctctagtggtgggagtaaaaatcagagcaatagtaattattatcactatgtgggcaaaagctacgcgagtcgcaaacgcgtttaaggctgtctcacgctttttttttcttatacgattttagggttaaaacaacaacaaaatatagagggcgtgtatatgatctgtgttagagtatgtatacgatagaatattcaacgattttgtatatggaagtgatactagtatatattgatctatttttccaaaaaaaaaaaaaaaaa

SEQ ID NO: 818 - DNA, 2526 bp, Arabidopsis thaliana
  unsure (1)..(2526): unsure at all n locations
  Clone ID: ARATH-23APR03-CLUSTER34098_1
gtgtttatttttaattattttttnntttntntaattttctnattcnnncantattanatgttanatnttgnatangnnntnnnnnnctttttctnntttttttntttncttnttntgnnnnnnngtgntttttggttngctctgtttttnttaatgtttgttttncttcctntnnttttttttccnncctcngngntnnnttannagggncggngccnngnannntggnnagcnangnnnngncgtaggggnggagcgcgggttatcgggggtcgcccaaggaggggtatcccatctagctcatcttttgtgccgggtttggctgccccccccgcgcccccttagaactacagaataaacaaaattaagaattcaaaataccaatataagtcttgttctctctaggaagttctaaactctcacagtattacgcaccaccaaaaaaattgcataaacggagagcgccctcacaaagtcagacatcttttaaacgtacatacaccagaatcccaattcgtctatccgggaaataaaagaagaaactccggagaagggatcatgacgagccctcatactgctcctttacggctcttgctgccgcattgtaccatcccgctgctgccattgcacctggatctggaaccgttgcaagattctctgcagatacatagcttgatctcccagcctgtgcttgcatctgtatggttgattccgctccggcagttgccgcttcgcctgatagaatgaaagcagatattggatcctctccagcgctcagtttctcctcaagaacttgtgaagctgggatgagcgcatctagcatcgttctgtagcccgcagttgctccaccatatttgctgactgaagcgattgatgacttgagtgcttcagaccaatttttgggagtgacttctgactgagcgttagcttttagctccgcgtatgctgccttgcagaggagatggtaaattattccgcttgtgccccccatggctcttttgattgatagaccaatctcattcactgtttccgcagcatcattgagtggataatagtttttcatgtcctccagaatagctgttgcacctctgtacattgttgacccacaatcaccatcgcctacttttccatcccattcattcaaactatccttaaggctgatgatcacagttgctgctgcttgaatagctgcctcaagaacttgaccttctttactcagctctagaggtcggctttgagactccatgctttttattgatcgagaaggaggaacaggaacaggaatcttcgctggtggccggttgccatcagtgccaactggccaatttggagccttggttggagcatccaatcggtctaaaatcgaatggtcagccttcatgattgaaatcgagaatcctgccatatcaagagaagtcataaaaaagcctgtatacaccctatcaacggcaagtccaaattccaactgcagtttagggactgcttttccagcagcaatcataagttccattaaaggtgtgcctcccaaaccattgaccatgagaaccactctgttaccacgagtaattggaacataattggtctcaggactaagtatttgctgaagaacatgggacaccaccacatccacaggttcaacgtcaaccacagcagcaccaggttctccatgaattccaagcccgagttccatcttctgtgcgccaagacgatccgccgcccccggtccccgaactgtccattcgaacagttccactaacttcctccaagccatctatcactcactttttgcttaagaaacaaatttagcttgtgtgtcgccaccgcccgctgctgcccgccgaaccttatggacaagaactgttcctgctaaccctctgcgtccagcgatgccacgtggggggggtaaagcgcaatcctctccaacaattacagtctcaactttgtaaccttcagattttgcttgttcagcagccaaaccaaagttcaagcggatcacccgtataattcttgacaatcaatagacatccctcagtaccagttacagctcgaattccagcaaggatagaatcaactggtggggaggcaaagacatctccacaaatagcagctgttagcattccttctccaacgtatccagcatgtgctggctcatgcccactgcctccacctgagataacggcaaccttgtcatattttgcagccgagacatcagctcgtagcaccaccttaacctcaggaaaaccatccaaatactggagtccaggataagtttctaccagaccctctatgaactcagttacaacatcgttggggttgttgatgaatttcttggctgcgaaatccataattgcgagtattaagccgctatcaaaacctgagaatcggagaagctcgcatgtaagaggagaagattgtagcggaaggtttaaggaaacccagagagaaataagagtcaacaacagcaacgcgtgagagagaagagaaaggagcaagaagaagagagacgcaaatgggagtttttggagt

SEQ ID NO: 819 - DNA, 2582 bp, Arabidopsis thaliana
  unsure (1)..(2582): unsure at all n locations
  Clone ID: ARATH-23APR03-CLUSTER34470_1
acctgattctccctccccacaaaccacaacactaccaacactctctcttgcttcctctcctctctgttttttctagctttctctctcacaaaatcaaaactttttttctgtgttcattatcatctccttaaattcataacaatacactctcataattcttctctgcgtaggagagacattgcagaaataaaagagtttttaatagacgcaagaaaaagagaaaaaagcattcatttttttcttgctttgttgctttgcttttgcttttctgtttctcttcttttgtgggcacaacaaaacatcaacaaagtaatgattttgtgttcttccttctccttctggtaatctaatctaaagcttttcatggtggtgatgaagttaataacaatgaagatattctctgttctgttactactatgtttcttcgttacttgttctctctcttctgaacccagaaaccctgaagtggaggcgttgataaacataaagaacgagttacatgatccacatggtgttttcaaaaactgggatgagttttctgttgatccttgtagctggactatgatctcttgttcttcagacaacctcgtaattggcttaggagctccaagtcagtctctttcaggaactttatctgggtctattggaaatctcactaatcttcgacaagtgtcattacagaacaataacatctccggtaaaatcccaccggagatttgttctcttcccaaattacagactctggatttatccaataaccggttctccggtgaaatccccggttctgttaaccagctgagtaatctccaatatctgaggttgaacaacaactcattatctgggccctttcctgcttctctgtctcaaatccctcacctctctttcttagacttgtcttataacaatctcagaggtcctgttcctaaatttcctgcaaggacattcaatgttgctgggaaccctttgatttgtaaaaacagcctaccggagatttgttcaggatcaatcagtgcaagccctctttctgtctctttacgttcttcatcaggacgtagaaccaacatattagcagttgcacttggtgtaagccttggctttgctgttagtgtaatcctctctctcgggttcatttggtatcgaaagaaacaaagacggttaacgatgcttcgcattagtgacaagcaagaggaagggttactagggttgggaaatctaagaagcttcacattcagggaacttcatgtagctacggatggttttagttccaagagtattcttggtgctggtgggtttggtaatgtctacagaggaaaattcggggatgggacagtggttgcagtgaaacgattgaaagatgtgaatggaacctccgggaactcacagtttcgtactgagcttgagatgatcagcttagctgttcataggaatttgcttcggttaatcggttattgtgcgagttctagcgaaagacttcttgtttacccttacatgtccaatggcagcgtcgcctctaggctcaaagctaagccagcgttggactggaacacaaggaagaagatagcaattggagctgcaagagggttgttttatctacacgagcaatgcgatcccaagattattcaccgagatgtcaaggcagcaaacattctcctagatgagtattttgaagcagttgttggggattttggactagcaaagctactcaaccacgaggattcacatgtcacaaccgcggttagaggaactgttggtcacattgcacctgagtatctctccaccggtcagtcatctgagaaaaccgatgtctttgggttcggtatacttttgctagagctcatcacaggaatgagagctctcgagtttggcaagtctgttagccagaaaggagctatgctagaatgggtgaggaagctacacaaggaaatgaaagtagaggagctagtagaccgagaactggggacaacctacgatagaatagaagttggagagatgctacaagtggcactgctctgcactcagtttcttccagctcacagacccaaaatgtctgaagtagttcagatgcttgaaggagatggattagctgagagatgggctgcttcacatgaccattcacatttctaccatgccaacatgtcttacaggactattacctctactgatggcaacaaccaaaccaaacatctgtttggctcctcaggatttgaagatgaagatgataatcaagcgttagattcattcgccatggaactatctggtccaaggtagtaaatcttggacacagaaagaaacagatataatatccccatgacttcaatttttgtttttgagatgatatagacatgtaaatggttatcaaacctttgaaaaaattgagattctgggtctaatggttaatattttggatgtatatattaaggtttttttaaatgtgttggttttggtctgttatccaaatttgtaaaatttgaggtcctgtgaaagcaatttttggtcaaactctgagattcatgtcttattatcaaaaaatttaccgaccaacaacttaatgatatgttgacctgtaaaaaaaaaaanaaaaa

SEQ ID NO: 820 - DNA, 3238 bp, Arabidopsis thaliana
  unsure (1)..(3238): unsure at all n locations
  Clone ID: ARATH-23APR03-CLUSTER34542_1
atgagagctggtttaagtacgattcaacagactctgacgccggaggctgccaccgttttaaaccaatcaatcgccgaagccgcgcgtcgtaatcacggccaaaccactcctctccacgttgcagccactcttctagcttctcctgctgggtttctccgacgagcttgtatccgatctcaccccaattcttctcatcctttacagtgtcgagccctcgagctctgcttcagcgtcgccttagagcgtctcccaacagctacaaccactccggggaatgatccaccgatctcaaacgcgcttatggcggcgcttaaacgagctcaagctcatcaacgccgtggttgtccggagcaacaacagcaaccgttgttggccgttaaagttgagcttgaacagctcattatctcgattttggatgatccgagtgttagtcgggttatgagagaagctagcttttcaagtcccgccgttaaagctacaattgaacagtcgttgaataattcggttactccgacgccgattcctagtgtttcttcagtcgggttgaattttagacccggtggtggaggtccgatgacccggaattcgtatcttaatccacggttacaacagaacgcttcgtcggtacaatcaggggtgagtaagaacgatgatgtggagcgggttatggatatattgggtcgggcgaagaagaaaaacccggttttggttggtgattcggagccgggtcgggttattcgtgagatccttaagaaaattgaagtcggtgaagttgggaatttagcggtgaagaactcaaaggtggtttctttagaggagattagttccgataaggctttaagaattaaggaattagatgggttgcttcagacccgattaaagaattcggatcctattggtggcggcggagtgatacttgatcttggtgacttgaaatggctagtggagcaaccgagttcaacgcaaccgccggctacggttgcggtggagattgggaggacggcggtggtggagttacggaggcttttggagaagtttgaaggaagactctggtttatagggacggcgacgtgtgagacttatttaagatgtcaagtttatcatccatcagtggagactgattgggatcttcaagctgtgtcggtggcagctaaagctccagcgtctggcgttttcccgaggcttgcgaacaatttggaatcattcacgccattgaagagctttgtgcctgcgaataggacattgaaatgttgtccacagtgtttacagagttacgagcgagaacttgctgagattgattcagtgtcttctccagaggttaaatctgaagtagctcagcctaaacagttgccacagtggctgttgaaagctaaaccggttgatcgtttaccgcaagcaaagattgaagaagtgcagaagaaatggaatgatgcatgcgtgcgtcttcatcctagctttcataacaagaacgagaggattgttccgatcccggttcctatatccccgggtcgacccacgcgtccgcctaacatgcttcttcgtcagccgttgcagcctaagttacagcctaatagagagttgcgtgagagggtacacttgaagcctatgagtcctttggtggctgagcaggccaagaagaagagtcctcccgggagcccggttcagaccgatcttgttcttggacgagcagaggattcggagaaagcaggagatgtgcaagtaagagactttctcggctgcatatcgtctgaatcagtgcagaacaataataacatcagtgttttgcaaaaggagaatcttgggaattcgttagacattgatttgtttaagaagctgttgaagggaatgaccgagaaagtttggtggcagaatgatgcagccgctgcggtggctgcaactgttagtcagtgcaagctcgggaatgggaaacgacgcggtgttttatcaaagggagatgtctggttacttttttcaggaccggatagagtggggaagagaaaaatggtgtcagctctgtcttctcttgtgtatgggacgaatccaataatgattcagctcgggtcgagacaagatgctggagatggaaattctagtttccgtggtaaaaccgcgttggataagattgcggaaactgttaagaggagtccgttctctgttatcttgcttgaagatattgacgaagctgatatgttggtgcgtggaagcataaaacaggcaatggatagaggcagaatccgtgactcgcatggccgtgagatcagtttaggtaacgtgatctttgttatgacagcgagctggcatttcgcagggacgaaaacatcgttcctagacaatgaagcaaaactacgagatttggctagcgaaagctggcgtttgaggttgtgcatgcgggagaaatttgggaaacgacgagcaagttggctgtgtagcgacgaggagaggctgacgaaaccgaagaaagaacatggatcgggtttatctttcgatctgaaccaagccgctgatacggatgatggttctcataatacgagcgatctaacaacagataatgatcaagacgagcaaggttttagtggaaagctgtcactacaatgcgttccatttgcattccacgatatggttagccgtgtagatgatgcggtagcgtttcgagcagttgatttcgcagctgtgagacggagaatcacagaaacattatctgagagattcgaaacgatcataggcgaatcactatcagtagaagtcgaggaagaggcacttcagagaatcttgagtggagtgtggttaggccaaacagagttagaggaatggattgagaaagcgattgttccggtgttgagccaacttaaggctcgagtttcgtcttctggtacttacggtgactgtacggttgctcggctcgagctagatgaagattccggtgaacgaaacgccggtgatttactgccgacaactattactttggcagtatgagagttgtaaaacagagattggagttttgttgttacagtggactgtggaaaagggtagagatgtaaatatgtctcaactggttttggcggggggaaagggaaacagttaggggtaaaaatagtaaaaaaaaaggtgtttatagttctttacttctttttgttttaaaaaaaaaaaaaaaaaaaaaaaaaagggcgggcgcggtaacgggaggggtgatttatgtagcgattatagatatctccttcggatcccncccnggtgnncg

SEQ ID NO: 821 - DNA, 1283 bp, Arabidopsis thaliana
  Clone ID: ARATH-23APR03-CLUSTER34778_1
gtttttaagttacatacaacaaatcaatcatacaagttacaaaacagagagatgtttggtgtggtttatttattcaaaaaaagaccaaccaaaccatgaaagaagtgaagtatcaactatatacgatttaacaagtaagattttggtattggtatgaaacacagcttcaataatggcccccaagggtctaagatatactttcaacctctttacaccggcaagtctctctaacaaactctgctataagtttagtgacagcagccggcttttcgacatggggaagatgtccacagttagatatttgtttgacacgtgcattcgataattctccgtgcagtctccaagcgagcttgttgctaatgatttggtcatcctctccccatagtatcaatgtcttctgtgaaaccttttttataagagaagttacgttgtatcctccgctagtcataaaactaacagttgcatcttcccaccaaggatatagacaatgcaagcgaccaatctttgtccagtcccaactagtttccaatgagataccattgaaacatatgaagttaacgtataaccgtaatggaatactctttagaagatacaccccagcataagctgctgctttaggtaacgttgccaagtttccagtaccttctgcgtaaacgcttgcgtccattaaaaccaaggactcaaccgcttctggatggttgaccgcaatgtcaattgcgacagcagcaccgaggctcggaccaaccaaaaccacaggccttttaatatgagacttccaaaacttgtaaaagtgctctcttttcgacgctacatcacaaggtggaagtttgtctaaatcagaaaaaccccaaccaaggatatcaaatgcccatgtttctaaaccggcttcttcaagcaacggataagtgtatctccactctaaacaagaactatcaaatccgtgaagaagcacaacaggagttgtctcgttccgcatcagcggtgtcacgcaactgctcataatactatcttccctgaagctcacagatacaggaagcctctctattctggcggcgagctttagagcaaacgtgtctttaattttctcgacatcggtcggcagaaacgtcggaaacttctccgccgtcactttaaacgtccttttgattgtacattccaccttcagaatcggtcgagaaaccgccgtcgccgtcaccgttgagagcatcgttgaagacgacgcgtctctgttactctgtttcacttgcggtttgtactcgatagagaagatgtgacacgtggcc

SEQ ID NO: 822 - DNA, 2869 bp, Arabidopsis thaliana
  Clone ID: ARATH-23APR03-CLUSTER34879_1
atggaccataaagcatggccttggaagaagaaatcaatggagaaaaccgttgttgaaagcaatggagaggttgtggctgacaagatagagctggaacatcgcgtgaaaagtctaaatgataagcttaactctgtggaggctgagagcaataagcatgagactgaggcgcaagaagcaattgttggctgggagaagacaaaagctgaagtagcatctctcaaaaagaaacttgatgaagctttgaatgaaaaacacaggagtgaggaaaggtcgagtcacacggatgctggtctaaaagaatgtgtgcagcagcttcgttttgttcgtgaggagcaggagcgaaggatgcatgatgctttgacaaaagcatcacaggagtacgaacggcgattgattgttataaagacggaattggcaggtagtggtaagaggcttgctgaagcagaaggcgagaatgctcaactctcaaaggctttgttagcaaagaacaaaactgttgaagatttaaacagagagagggaccgtatagaggttgatttcaattctttggtgagtagtttagagtcgaaagagagcgaaaacgtttcattgagatatgaagttcgagtgctggagaaagagctcgagcttcggaatgaagagagagagtttagccgtcgaactgctgaagcatcgcataaactgcacttagagaatgtgaagaaagttgcaaagttagaatcagagtgtcaaaggttacgggttctggtcaggaaacggttaccaggacccgctgctctttctaaaatgagcaatgaagtagagatgttgggaaggagaagggtcaatggaagccctcatagtccgatgattgattccgaaaaaatcaataaccttactgaacaattatgcttactggaagaagagaacaaaactctaagggaagccttaaacaagaaagtcagtgagcttcagttctcgagaaatatgtattctcgaacagcgtctagactactagaattcgagtctcatcttgaagaatcttctagaggtacaaacattgagccaagcaggagtagcaatgtgtcacatgaagtctctcttgcatccgtaacagagtttgacaatgatgataaagttagctgtgccgattcctgggcttctgctttactttcagagttggacaatttcaagaacaagaaggaaatgggcacgagtttggttggaacccctaaagctgcagagatgaaactaatggatgattttgctgaaatggagaagcttgcaatggttgctagtacaatcgataaccgacctggaagttctcctatttgttcttctgattctatttcagctactggtccggtagagaacgaatctaatgagaattcatcagaagcaactaaaacttctggaacagtttattcattgaatcctgatgcatctcccaaagatgatatcaagtcagattcgttacctcaatctcttcatatagtcttgaaagcggtaatggagcataagcatatcacgcagagaaacactgatgaagtacttgaagatatcagaaaagctctgtcaagtgtaaaccattcaagcttttctacaaaccatcaggagactaagactcttactgtggaggatagactggatatggagtgtaatatcagcaaatcaattcacagaatcattgacgttatcgagggagtcagtcttaaagatgagaggcatgtgtccaacagagaatcagaaaggctttcaggttacactgctcgcgtcttgcaatggaaaactacagagctaagtagtgtattgcagcgatttcttcaagcttgttacgatctattagacagaaaagcagacatgaagaagtttgctcaagagctaagctctgtgttggaatggatggtgaaccactgtttttctcttcaagatgtttcaaccatgagagatgagattaagaagcagttcgagtgggatgaatcacggagcggaagcgaagttgatattggaatatttcgtcaggtttcagaagcagagaagcttagaacggaagatgtttcctttttggcttgcaaagatcagttgattgaagacaaacctggtaatcaaaacttgtcgcgcaaaacggttgaagaagaggcaaatgacaaaacagcgagtgcttcagagaacgagctcaagctggaggaaaaacaaaacatgcgaaccgaattggaaatcgctgctgcttcagaaaagttggccgagtgtcaagagacgattctaaacctgggaaagcagctcaaggcattgactaactcaaaggaaacagctttactttcagaaacactcatgtacgacgttacagacaaatcgaacaacctacctgatgcacaaccttcacatgagactactaaaccagagaagagattgaccagccagagatcatctcttttggatcagatgaaggcagaagatcacaacaccggggaatccaaggatcagaaaccgcaagcagcagataaaaacggaaagggaggaaacagctctgtttacaatgaaaccattgaggcactagaacagattcttctctcagacaaaagcaaaggctccgactcaaactgctttgccattgttcctcagaaaaagaccggcggagttaagagcctctggagaaagctgttggggagaaataagaaaggtaagagcaagaaggtccctaatccatttgccaactaagaagatggtggcatctgtcatctagactataatctaataccttaatcctgtttctttatatggtcccaaagacccaaactatgcaaactaaactgtcattttctagatttttttggcagtatatatataatctccacgtagagtattactctataagatgatcattctgctt

SEQ ID NO: 823 - DNA, 2408 bp, Arabidopsis thaliana
  unsure (1)..(2408): unsure at all n locations
  Clone ID: ARATH-23APR03-CLUSTER34900_1
gctgtttctcattcgacaaaaaaacctctaatctcatgtctatgtcttgtctttagatactatcttactctctcttcgagaacttatgtctttagaacggtcggagttcgtcgacggtgttgcggcacggagtctcagtgagatctcagaagttgacgccgtgagaattggaggtgatattatatcttcagcgagacgtctcatcgcacttttaaggtccgtaggagattgtcaatggcttcatcatccacccgttattgctgaagctattagaaggtatgatgagctatggatgccgttgatttctgatctaacggttggtttaaagccaccgatgattttgcctcctcttgatgttgaatgggtttggttttgtcactgtttgaatccagtgagttatagtgattactgggaaaggagattctcaaaacttatagggaagcctgcgnatttccgccgaagagaacgagggttacccgggtttccaatgcgaaaagatctgggggttccgataccctttagggggttttgggaacggggccccgcctccctcactcgggcctgtgtctttagttaatgcaggtattaaaagtctagtgaagaagcagatgtttctttgggagaagttttcagctccttacatgtctgaaaccgtttacttgatcgctgctcggttacgttacaaagggtttttgttgatactacacaagtttaaggatgaggtttctagtcttattccagcttctgatatacttcttatgtggcttacgcatcagagctacccgacagtatataaagatgatgttgatgaaatgttggaggagatgacgagaaaggtggtacaagttggagaaaaggtagagaaaacagaagtggaaacaacaaaagaactgtgggatagatacttcaatcaaccatatgagaaagcaggcggtgagttgtcgataatagcgaatgagtctggtttaagtaacaacacaatgttttattggcctgtctctgatatggatgttaacactgcgtataagtccattcgacctagatttgtcttggaattatgtatatttttaaggttgaatccaaaggcagagcagaatgagtcgatagatcggagttttctacggttgagagttgctagatgtcataggaagctgcagctggataagaaaatgactgatttgtctagcgaagcgtcgtggcaaaaagcgtggcatctttactgtgagtttggaacactagggtttattcgggaatcacattgtgaccgttctcgtggaatttgttttaaaagcggaaaaccagaagggatgatagagtttccgtggaatgatctgttaagagcgcattctctagcgtctggtaggtttcttggtaagcaagtgagtgtgtttgcttcagttacacctccagttcaagcgccctacttgctgagatttgtaccggatcgagttaccgatgattcaggtgctatgatatctgattcagttcaaagaacaaacaacttccgacctcaagaaggaagatggcttactcggaccgtgcttgatcacgctggacgggaatgcttcgttatccgtattcgagttgggaagggagtgtttaaacgtggaggtgaagttccatccccggtgaaatcagaggagcggatcacagaggttcgagtaggttcttggtcttatgtcgagggttcaatcggtaaagctccagcgaaggtggttggaaccgtgacgcctaaggaaccaatggaggattgggaggcagcatgggaattttctactggtgatgaattgtgcatccgttgggactcattaggaactatctcagaacttcgtttatattcaagaaaccccggttcgctggttcggctattaactggacggagaatgcaatataaaggagaagatgaagaagacgacgagggttttttaacagttgttagatcaacagaagaagatccaactgaaaaagcaactgctctgatcgactggaagcatcaagccgtggaatttcttcctgaggaagacgcggttttcgtcttgttattgtcggtatcgattctaaggagtgttacacataaaagaagagaagatgttggtaaattgttggtgcggaagaggataacagaagctaccggtgaacgggattggggatcggttattgtcgatgcttcgtcaacaaatgtatcttcttcttccagtccatacgtagaaccgtggtatcgaaactccggtaaggttatggcaatggaggagaaagcacaagttgcacgatatccatatcctgttatgagctattctaacgttgatggtggtgataatttgtacaaacatgtaatattcgggtgaaacttcaaaaagattgcataattattagtcagatggatggtgtaaccaaaaaaaaaaaaaaaa

SEQ ID NO: 824 - DNA, 2584 bp, Arabidopsis thaliana
  Clone ID: ARATH-23APR03-CLUSTER34904_1
ccacccagacgcttggcacggccgagggcatcccattaccttcacccgttcgcgggccccgttccaagcgccttctccctcggccatccccttcctttccggtcttgttgtggttgcgggatgccccgcctcgcctgtccgccaatggtacctgctcgtcggaataaccccccttcctccatgcttcaccggaacctctcccatctctccggcaagggcccccacccttccacgccgaactcgcaggcgggctttgtgaccctcctccagactgcgcatacaagtgttcccccggccagcttcattcggagaacccggcgcctctccctttcgccccgcccgacaaccccagcctgtgctgatcactaccacccctgttcggccgagttcggccgacgcccgcgccagcgtctgctttggtgtttccgttctggcagcgcaattctgctctcagttcttatcttctctctgcggcgtgccagtctcttttagcccattttctattctttggtttccagctaaatcttgtattttacgatctttatatttaaatgcttgaatgatgatgcttgcggcctcgtcgatttaaaattctatgtagcgtatcttgcccttgacaatcgggtaacagcgaaaaaggagcagttagtgaaggaggagctggaaaaggtgacattttgggataaaacattaattactgggggttttcgaaaatcctaacactaaacttgaatgtgttttctctgatatttgcaggtgaaataagcaggtacacatacaaccgacatctgggtcttaccaccggattacgtcaaaaattatacagaccggattgagaattttgaggaagtgactgctcccttgctgaagaagcttctggagaatcgaaaaagtccacaagcagaggaagtggtaaaatgaggatataaggcaagttcatgtgaaattcatgttgtaccacgaaggattgcaccgggtatggtcaacccttctcagcctgagggccggggaggcgtccgtccgggcaacgacctcctctctctttagctttactcgacagcttcagtttaactagatcgctacggtcaacggaggggatagagtctgaagttgaattgaaggacaaagaaaaggaataaacgatcaagactattccgattgaagcgagaagccagtcactcttagaccatgttccggattgagaattttgaggaagtgactgctcccttgctgaagaagcttctggagaatcgaaaaagtccacaagcagaggaagtggtaaaatgaggatataaggcaagttcatgtgaaattcatgttgtaacaagaaggattgcacgggtatggacaatcgattagcttcaccggttttcttattttcgattcttggtgaggtcagggagtgccatgtcacggacatgactgtctggcaatgagcatagcaggaatctatgaacatcccaccatctttgttctgatgaaattccccaattgcagtcatcatagaactgcgaaaaccgtgtagaactttaatctgttcggcatcacattccttaatattgagtctgcactttgcccaacttttatctggatccgcagaagttggtaccaagacatgttgaatctgccaaaaatcgtaggctggattgacaagaaataccggagttcttatgtttttcaggaattcttgaggaaacatacacttagatggctccgttttggctacacatttctgatccaagctcttctctacgccctgcaaattaacaacatcatgatagaaagacctcattgttgggtttccaaggacatcaggcacgttgagaaagtagcctccatcagaaacacatttgacagctgcatcttttggaagatgatctcgaaagtagtcacaatgtataagacttgccaagccaccggcagaacatcctgtaagtatggcctgtttggcatctgacatgcccattgacaaaagttcatcaataatagcctcccaaataagctggccccggaagaaaagccgtgtgccattcttgaattcagcttcagggcgtccagaaaaagaagcaccatcacagtaccttatcgcaaccttgttccagttaaagaattcaggattttgagatgggtcactacttaaaacaccttgaaaggccacttcttgttcaaagtagttggaagaacctaatttagtcaatgctcgagcagaacatgacgcaactgtgttgcaccagcctccaccctccaaatgaacaagccagctttgggagccagatccagaaccctcatgaaagtggtacccaggcaagcttccatccaaacaaagagctcctctctctttagctacactcgacaacttcagcttgaccagatcgctaggagatatgattggccgagatcggtcaacggaggggacagagtctgaagtgggatcgaagaagaaagagaggaaaaaaacgatcaatacgcatcctatagaagcgacaagccagtcacttttagcccattttctacaccgtaacagagagctaaaccttggaatcgccattgaagaagattagaagaagaatcaaaggaagagatc

SEQ ID NO: 825 - DNA, 5503 bp, Arabidopsis thaliana
  Clone ID: ARATH-23APR03-CLUSTER34929_1
atggcttctacggaagtcgattcccgcttaggtcgagttgttatccctgctttggacaaggtcattaagaacgcctcctggcgtaagcactccaagctcgcccacgagtgcaaatccgtcatcgaacgccttagatcccctgaaaattcctctcctgttgccgactctgaatctggatcctccattcctggaccacttcacgacggaggagccgccgaatactctctcgccgagtccgagatcatcctcagccctctcatcaacgcctcctccaccggcgttctcaagattgtcgatcccgccgttgattgcatccagaagcttattgctcatggctacgttcgcggtgaggctgatcccaccggcggacctgaggcgctactcctttccaagctcattgaaaccatctgcaaatgtcacgagctagacgacgaagggctcgagttgctcgtgctgaagacgctcttgactgcggtaacttcaatttccctgaggatccatggagattctttgctacagatcgtcaggacttgttatggtatctacttgggaagcagaaacgtggttaatcaggcgactgctaaagcctcgctcgtgcagatgtctgttatcgtgttcagaagaatggaggcagattcatccaccgtccccattcagcccatcgtcgtggccgagctgatggagcccatggacaaatccgaatcagacccatctacgacgcagtctgttcaaggtttcattaccaagattatgcaggacattgacggagtcttcaattcagctaacgccaagggcacattcggcggccatgacggggccttcgagacttcattgcctggcactgccaatcctactgatttgttggattctactgataaggatatgttggatgccaagtactgggagatcagtatgtataagtcggccctcgagggaagaaaaggagagctggccgatggagaagtggagaaagacgatgattctgaagttcagattgggaataagctgagaagagacgccttcttggttttcagggcactttgcaagctgtccatgaagacgcctcccaaggaagatccagagttgatgagagggaagattgtggctctcgagttattgaagattctgcttgagaatgccggtgctgtctttagaaccagcgataggttcttaggcgccatcaagcagtatctgtgtctctccttgctgaagaacagtgcttcaaatcttatgatcattttccagctttcctgctcgattttacttagcttggtttcgaggtttcgtgctgggctgaaggcagagattggggtgttcttccctatgattgttctaagagtattagagaatgttgctcaacctgatttccaacagaagatgatagtgcttcggttcttggacaagctctgcgttgattcacagattttggtagatatcttcatcaactatgattgcgatgtcaactcatccaatatatttgagaggatggtcaatggtctccttaagactgctcaaggagtgcctcctggtacagttactaccttgttgccacctcaggaagcagccatgaagcttgaagccatgaaatgcttagttgctgttttaaggtctatgggagactgggtgaataagcagttgcgtcttccagatccttattcggcaaaaatgctggaaattgttgatagaaatcttgaagaaggaagtcatccagtagaaaatggtaagggggatggaggccatggtggttttgaaagatcagactctcagtctgaattgtccagtgggaattctgatgccttagcaatagagcagcgccgagcttacaagcttgaacttcaggaaggtatttctattttcaaccagaaacctaagaaaggtattgaatttttaatcaaggcaaacaaggtgggggactcgccagaggaaatagcagcttttctcaaagatgcatcagggttgaacaagactttgataggggattatctgggggaaagagaagacttatctctgaaagtgatgcatgcatatgtggattctttcgaatttcaaggcatggaatttgatgaggcaattcgagcctttctccggggctttaggctgccaggagaagcacaaaaaatcgatcgtataatggaaaaatttgcagagcgattctgtaaatgcaacccaaaggatttttctagcgctgatacggcatatgtcctcgcttactcagtcattttgctcaacacagatgcacataaccctatggtgaagagcaagatgacagctgatggttttattagaaacaatcgtggtatagatgatgggaaagatttgcctgaggaatatctacgtgcattatatgaaaggatatctagaaatgagataaagatgaaggatgatggtttgggtccgcagcagaagcagcctacaaactcaagtagattacttggcttagatactatcttaaatattgttgttcctaggcgtggtgacgatatgaacatggagaccagtgatgatcttatcaggcatatgcaagagagatttaaagaaaaggctcgcaaatctgagtcagtttattatgcagcctcggatgtgattatactcagatttatggttgaggtttgttgggctcctatgttggcagctttcagtgttccacttgaccagagtgatgatgcagtaataacaacattatgtctggagggtttccatcatgccatccatgtcacttctgtaatgtccttaaaaacgcacagagatgcctttgtgacttcactagcaaaatttacttccctccactctcctgctgatatcaagcaaaaaaacattgaagcaataaaggcaatagtaaaccgggcggaggatgaaggaaactatctacaagatgcttgggagcatatactgacttgtgtttcacggtttgagcatcttcatctcttgggggaaggagcgcctcctgatgccactttctttgcatttcctcaaacggagtcaggaaactctccactggctaagccaaattccgtacctgcaattaaagaaagagcacctggaaaacttcagtatgctgcatctgctatgataaggggttcctacgatggttctggtgttgctggaaaggcttctaatacagtgacatctgaacagatgaacaacttgatatctaatctaaacttgctagaacaagttggtgacatgagtcggatatttactcgtagtcaaagattgaatagtgaagccataattgactttgttaaagccctctgcaaagtttccatggatgagttacgatctccatctgatccacgggtcttcagcctaacaaagattgtggaaatagcgcactataacatgaaccgcataagacttgtctggtcgagcatctggcatgtgctctctgatttctttgtgactattggctgttctgataacctctccagtgcaatttttgcaatggattctttgcgccagctgtctatgaagttcttagagcgggaagagttggcgaattataacttccaaaatgaatttatgaagccttttgttgttgtcatgcgcaaaagtggtgctgttgagatcagggaattgattatacgatgtgtctcacagatggttttatcccgtgttgacaatgtcaagtcgggatggaagagtatgttcatgattttcacgacagcagcacatgatgcacataaaaatattgtgttcctgtcttttgaaatggttgagaagattatccgagactacttcccacacatcacggagacagagacaaccaccttcacagactgtgtgaattgccttgttgcgttcaccaattgtaaatttgagaaagatattagtctccaagccattgctttccttcagtattgcgcaagaaaacttgctgaaggctatgttggttcgtcactgaggaggaacccaccattatctcctcagggtggaaaaattggaaaacaagatagtgggaagtttctagaaagtgatgaacatttgtattcttggtttccactgttagccggtttatctgaacttagtttcgacccaagagcagaaattaggaaggttgcattgaaagtcctgtttgatactctgaggaaccatggtgaccatttcagtctggcgttatgggaacgggtttttgagtctgttttatttcgaatattcgactatgtgcgtcaggacgttgacccatctgaggatgattcaacagatcagagaggttacaatggtgaagtcgaccaagagtcttggctttatgagacatgctcgttggctctacagctggttgtagacctctttgtaaatttttacaagacggttaaccctctccttaagaaggtactgatgttatttgtaagcttgataaaacgtcctcaccaaagtcttgctggtgcgggtattgctgcgcttgtccgtctgatgagagatgtcggtcatcaattctctaacgaacaatggctcgaggttgtgtcatgtatcaaagaagcagcagatgctacatcccctgacttctcatacgttaccagtgaagatttgatggaggatgtaagcaatgaggacgaaacaaacgataattccaacgacgcactgagaagaaggaacaggcagcttcatgctgtcgtcacagatgccaaatctaaagcttcaattcagatttttgtgattcaggcggtaacagatatctacgacatgtaccgtatgtctctcacagccaatcacatgttgatgctcttcgacgctatgcacggcattggatccaacgctcacaaaatcaacgctgatctactcttacgttccaagctccaggagctcgggtcgtcccttgaatcccaagaagctcctctgctgcgcctggagaacgaatctttccaaacatgtatgaccttcttagacaacctcatctcagatcagcctgtgggttacaacgaggctgaaatagaatcccacctcataagcctctgcagagaggtgttagagttctacataaatatttcatgttcaaaggagcagtcttcaaggtgggcggttccctcggggtcaggaaaaaagaaagagctaacagcgcgggctccgctagtggtggctgcaattcagacattgggaaacatgggagagtcactgttcaagaagaacttgccggagttgtttccattgatagcgacgttgataagctgtgaacatgggtcaggagaggtacaagtagctcttagtgatatgcttcagacatcaatgggacctgttctcctccgctcttgctgctaaatatctatctatctctctgtaagatttcttcatttactccctcgattttcatcataattctgtttgggtcttctttgagtttttatcacaaattacttacattgtttggtagccatgggaagagattagtgttcacgagggattttttttttaactttcttatatgtaaattgtaaaatattagacagtctgtgtttttgacacgttgttgcataataagtcttagcaatctttctttgtttacccaaaa

SEQ ID NO: 826 - DNA, 2146 bp, Arabidopsis thaliana
  Clone ID: ARATH-23APR03-CLUSTER35015_1
ctctgtctttgcgccaaaccaaaacccacacaaaagccctcttttttgttatccccttctctctctgaaactagggtttctatttctctgagtgatgtgaaatgctcgtgtaaacggaaacgatgcagaagattctgtgcaaaagtaccacttcttcaacccctgttctctctacgccggtgaactctctcgccgccggttttatctctctagggtttaagacccccgttaaaaatctccctccttgttctactactaaacctctctccacttgtttcttctctacttccgctatgccgaccacaacggcttctgtttcttcaggcggtgttggtttctctgcttatctacagaggactgttcataaaccggcaccggcgtctgttcggttctcaacagctggttaccggacttgccggtgttcaaatgacggtacgaaccgggcttgggttggtcgaaccgggtcttggcgtgcgttgttttgttcagactctactggtggtttaaccccggttaatgctactgctggagcagtggttgaaagcgaggaagagtctgacggagaagatgaagacgaggagaaagatgagaagcctgtgaggatgaaccgtagaaaccggagctctagtggaagtggtgagtttgttggtaatccagatttgctgaagattcctggagttggtttaaggaatcagagaaagcttgttgataatgggattggtgatgttgcagagctcaagaagctttataaggataagttttggaaggctagtcagaagatggttgattatcttaggagctctgttgggattatacatagaaaccatgcggagagtataacaacgtttattaaagagagtgtggatgatgagcttaaggattctggccctgaacctaatctaaatgtgaagaaacgtttgacgttttgtgttgaagggaacatcagtgttggtaaatcaacttttcttcagaggatagcgaatgagactgttgagttacaagaccttgttgagattgttcctgagccagttgataagtggcaagatgttggacctgaccatttcaatatattggatgctttctactctgagcctcagaggtatgcttatactttccagaactatgtgtttgtcactcggctgatgcaggagaaagagtctgcttctggggttaaacctctcaggttgatggaaaggagtgtcttcagtgaccgaatggtgtttgtgcgtgcggttcatgaagcgaaatggatgaatgagatggagatcagcatttacgactcttggtttgatccggttgtctcttctttacctggacttgttcctgatgggtttatatacttaagggcgagtccagacacttgccacaagcgaatgatgctcaggaaacgagcagaagaagacggagtctctctgaaatacctccaagatttgcacgagaagcacgagagctggctgcttccctttgagagcggaaaccatggtgtattgtctgttagtagaccatctttacacatggacaactctctgcatcctgatataaaggaccgtgtcttttacttggaaggaaatcatatgcattctagtatccagaaggtccctgctctggttttggactgtgaacccaatatcgacttcagccgggatattgaagcaaagacacagtatgcacgccaggtcgctgagttctttgagtttgtgaagaagaagcaagaaacatctacagagaagagcaacagtcagtcgccggtactgctaccacatcagaatggaggtctctggatgggaccagcaggcaatcatgtcccgggattagatctcccgcctctagatctcaagtcactcctcactagaccgtctgcgtgactgtccattcactgactctgtttttgttggctccaagggagcgtgtcaggttatcgaatgtcaatagtttcgatcggcttttatatcgtttatttaggaaaaaaacgtttgctgccgcttttgttcatcttagatgtagaaacaaaacatggtcgtgccaccgtttagtttaacccttttgtataaaagtttggtctctggataatttgtttcttgaaatcttgttggtcgtctaaaatttcagttcagttcatgtttctgcacaaaaaaaaaaaaaaaaa

SEQ ID NO: 827 - DNA, 1693 bp, Arabidopsis thaliana
  Clone ID: ARATH-23APR03-CLUSTER3504_4
aagcaaagtaaaacctaaaaaaaaaaaaagaccgtaagtagttacaagggtggaagtataaaggagcagtcttttcttcttctttcaaccccacggcgcagatcctacgagtttggtctttgtctctatcttttcaatctttctctctcaatcgctcttcaatttgataacagcaaagtcatggcaggaatggcatctgatggaactcaatatgatcctcgtcagtttgatactaagatgaatgccattctcggcgaggaaggagaggaaacattctacactaactatgacgaagtttgcgacagctttgatgcaatggaattgcaaccagatcttctcaggggtatttatgcttacggtttcgagaagccttctgctattcagcaaagaggaattattccattctgcaagggtcttgatgtgatccagcaagctcaatctggaactggaaagaccgctaccttttgctctggtgttttacagcagctcgatattagtttggttcaatgccaagctcttgttttggcacctacccgagaacttgcccagcaaattgaaaaggttatgagggcacttggtgactaccttggcgtcaaggctcaggcttgtgttggtggaacaagtgttcgtgaggatcaacgtgttcttcagtctggtgttcatgttgttgttggaacccctggtcgtgtctttgacttgttacgcagacaatccctccgtgctgatgcaatcaaaatgtttgttcttgatgaagctgatgaaatgctctctcgtggtttcaaggatcagatatacgacatcttccagcttcttccttccaaggttcaggttggtgttttctctgctacaatgcctcccgaagcccttgagatcacaaggaagttcatgaacaaaccagtcaggattctggtcaagcgagacgagctgactcttgaaggtatcaagcagttttatgtcaatgtagacaaggaagagtggaaactcgagacactatgcgatctctacgagacactggccatcactcaaagcgtcatctttgtgaacacaaggcgtaaggttgattggctaaccgacaaaatgagaagccgtgaccacactgtttcagctacacacggagacatggaccagaacacaagagacatcatcatgcgcgaattccgctctgggtcttcccgtgtcctcataaccactgacctccttgctcgtggtatcgatgttcagcaagtctctctggtcataaactttgacctcccaacccaaccggagaattaccttcatcgtattggaagaagtggaaggtttgggagaaagggagtagcaatcaatttcatgacatcggaggatgagagaatgatggctgatattcagaggttttacaatgtggtcgttgaggagttgccaagcaatgttgctgatcttctctgaagcctttcttttttctgttttttactgagaaagtgctgtgtttacccctttttttggcagcttctctatgctttgatttttgttttcaggctactacttagatttatagttcttggctaaaagcgaacataactcattacatgattttgcttttttggcaatcaagaatttcggcattatttatctttttgtgaacgtggcttacaaggaaggatactctatgagactaaagacttttctctaaaaaaaaaaaaaaaaaaaaaaaaaa

SEQ ID NO: 828 - DNA, 864 bp, Arabidopsis thaliana
  Clone ID: ARATH-23APR03-CLUSTER3517_1
ctctttcttgactctctctcctaaaaatgtctcgattgctctcaaaaaccctaattcccaacggaagattcctcctccgtcgtttcaacgagccggcgattacgacaccaccaaacgtcgtctgtttcagccgccgcttttcatccatcccacaagtcatcgagcttgaaatcgattctaaaaacgaagccgaagcagcaattctcaaaaagctaaacgaattcgtacgaaggatcatcgttcataattcgactccagattggcttccttttgcacctggctcttccttttgggtacctcctcatcagattacggctacaaagatcgccaatttggtcgataaggtgactaatccgttgacggaggaagagtctctttcgctttcgtctccttatggttggccttgttcctctttcttcattcctcctccagatggttcctcatctacacaagaggaagaagctagcgtggagttgaaaatcccggggaatgagatgttggaagtgaagctagcacattatccagatcctatttactcttttaaacctgaagatggtgaagagtgattcgataccttttccagcacgagagagcaggacaggattggaaaaaacagatgacgatcgaaactcaagcagtttgtacatacagttgaaaaccatgggagttatatgatctttgggtgactttatacaccttgtttactatgttttataattgacttaatataattagcttgggggcttcttccacttgccagagtttatggtgatgctcgggtaacttgacaatttcatttataatgacaattcttccctttgacacttgacctaagtgcatataaataatgtcttggcataaaaa

SEQ ID NO: 829 - DNA, 3828 bp, Arabidopsis thaliana
  Clone ID: ARATH-23APR03-CLUSTER35181_1
gtcgagtatcctcggcagcgtctccgccggggcgtgcccgaggcggcctcttgcgctggtcgcgactcccctcccccaccacgaacctgcctcatcagagctcctccctgtgaaccccccactgccacccccacttccacgccgtcgcggcctggcccgcccccaaccccctcgaagactaggatcagaaaccacagttgaagctggaagcgacgcgaagataacgtacatgctgttagagatgattgttctaacgaccactatatcacatcaatctcccggctcacggttaaccagtgcgaggagagagcgatatgccagtatcgagctcccacaggaaagacccaggcaccgttttctacggtggaggtccgtagatggaaatctcatgagctttatcccccttatcttaggacagcaatagcgctagagcaccagggcgagtcagggccacggactaatgctctttggcgtctatctccccaaccgcctccgccgaagaaagatcactaggaggggaaagtgcaaaagaggtgcatcttcggttgtgtgcctcccctcaatgttcattggatttgccttgtggttattcgttcatttaccacttctcgagttgccgcattcgttacaccaacggcccagtgcccttataggcggcacatatgtggtacataacaaaaagcttccagttacatgtgttatacatgcactttttctgtttgtaagcggtgcattaaagatgctgactatgtctttcccagcgggttcgtgggtctttgtggcacatgtattaagcctataatgctgatggtgaatactgctcaaggagagaatgaagcggttatggcgcatttcggtcacaagccgatgtagcagttgctggtcatgttttcttggacggtcctgttcgtgcacctatcccgaaccaagaatgtccttaccttgatttcccttctcctgcacctaggtccagccctcgaagacttggaagcgcaagcggcggagactatccagtctctgtcttcatgtgttctggtcaaagggccatctggcgtcacttgccgcaccgcgcccacacctccaaccgtggctcctcccaccccgtcccgtgccgtggtgacggggggactgctcccgctcctatggccacggattgctgacggttgatccgcaccgtctctgatgccagtggactagacgactgtccgctcccctacgccgccatcgatgttcaccaccccaacctgtcttgcttcagacgggaacggtcggagtctcttcctgcggatatcgtcgaagtggacgttgtggtggttggcgcaatttggagaatcgagggttctggccgcgaccgcatgctggatgttcacaggcttgttcaagttgtaggtacaagcaaggcaatagcatcctaccaacttggcgcaaagactacagatgttatgcttgaaatactgaatttagacaagagagaagtcatctcgattgatcaattatcagaccagaatatcacagaggatgagtgcaaacggctgcgccagagcataaaatgtggcctcaataaacgtttgactgtggttgacatcttgaagacggcagcaacactgcaagccatgagaatcaatgaggctctggaagctgagatattaaagctcaaccatctccgtgatcgggcaaaaaagctggagcttctaaaatcacctgaggaacgtcagcggcttctgcaggaagtcccagaagttcatacagatccaagcatggatccaagtcatgcattatcagaagatgcagggttgggtacaaggaaacaagataatcacgtaaaggcacaaagtaaaggtccacagaataaaggggttaacttgatcaacgtgggaaataatgtgcagaaaaaatatgatgcaccaattttgcgaagcagaaataacgtacatgctgataaagatgattgttctaaggtccacaataactcatcaaatatccaggaaactggtaaagatgacgaggagagtgaaatatggcattatcgagatccaacaggaaagacccagggaccgttttctatggtgcagctccgtagatggaaatctagtggccattttcccccttatcttaggatatggagagcgcatgagaaccaagacgagtctgtgcttctgactgatgctcttgctggacggtttgataaagcaactactttgccgagttcttcttcgcttccccaagaactaaaaccgtctccacacgattctggccgcactggcgcggatgtgaactgtcttcagaagaaccagatgccagttaacaccagtgcaaccttcttttcctccttactgtcactgcccattctaactatcctaaagagaaacaagttgtggctcttgtaggttgctctggaaaagttgaggatggtaattctgttcgtccccagcctcaagttagttgtccggcgtcgatctctgtggttcctggacacgttgttactcctgatgtaagagaaactccaggaactgatcaatacaatactgtgcgggcagatggtaaccataacacaactaagactctggaggatgaaacaaatggtggttctgtttccataaacggttctgttcatgcaccaaacctgaatcaagaaagtcatttccttgatttccctagtcctacacctaagtcgagccctgaagacttggaagctcaagcggcggagactatccagtctctgtcttcatgtgttctggtcaaagggccatctggtgtcacttggagcaccacaaccacaagtacaaccgatgctgctactaccacttcaagtgttgtggttactggaggacagcttcctcaagtaattcagcagaatactgttgttttagctgcaccgtctgtaaagccaattgagttggcagctgatcacgccacagctactcagacttcagacaacacccaagtggctcaagcatctgggtggccggccattgtggctgaccccgacgagtgtgatgaatcagtttcagatctattagctgaagttgaagcaatggagcagaacggtttaccctcttcacccacctcgacatttcactgtgatgatgacgatgatttgaaagggcccgaaaaagatttctttaaccctgtggcacgcatgtctctcacacctgaaacatgtagattggatgtctctcagacgagtatcctcgacaatgtctctgccgggaaaagctcaatgcttacagaagcaaaagacaatactcccttcagccactgcggaactgctggtccagagctcctgctttttgcaccgccaccgccaccgccaactgcaataagtcacgacctgactctaacgacaacggctctcagactaggatcagaaaccacagttgaagctggaacggtcgagaggcttcctaaatctgttttgggagtaagttcggaaccaagccctagatcattatcatctcatgactcaagctcagcccgtggaagcaccgagcgaagtccacgagtgagccagccaaagagatccagcgggcacagcagagaccggcagtggttgaacaacggtcacaacagtagcttcaacaacagtcataataaccggcaatggccatacagcaatagccatgggtatgaccatggatcaggttcgtatgcagcccatccgcccaaagggctgaaaatatgtaaattctatgagagtggatactgcaaaagaggtgcatcttgtagtttttggcacccctgaagatgacgaggagagtgaaatatggcattatcgagatccaacaggaaagacccagggaccgttttctatggtgcagcttcgtagat

SEQ ID NO: 830 - DNA, 985 bp, Arabidopsis thaliana
  Clone ID: ARATH-23APR03-CLUSTER35211_1
tattataaggtttttagaaaaacatagtattttcgtccaactcgtgatgattttgacatttttttttttccagggcaaacaaatcattaaaaacaataagacattcccacgataaaatcgtaaaagaattaattgaaacaaattcatcggcttatacactcggctataaagccgagccgagattagtagacggctgaagctccgacagaatctttgatagagctgtcatggctcggacttgcatttccaaagccgctatgtaatctgctgtctcgtccaaaagctccggtaacgccgttctccggcaacccggcaccaacccacccaaaacccggacccgatttcccaccgccgataacttcctcctcctcccacttccaccacttcccctgatcgccgcagctaatgccgacgccggtttggtattcctacgccgcctcagactcgttccgaatcgactaaccaaaatggctcggctccaccgagttgcaccacgagcggtcgtcgcaaggactttgtcggccgtgtcccggactgttgcgctccgccgcgatcgttgaagagcgtcgtagagctttagggaatataccttctgcgccgttgtggctctccatctacgactaagatgccttaccggagcttcttcagagcttacccttgatcgacgtagagcctccatcagctttggagcgaaaactctttgtcctctttgcaatctccggcgaaaggggattgttttagtcccttctacctccggtgacgtggaaggattcgatccatttccttgttcagaagacattcacaagaaatctatagaaccacacttaaacaacgttttgtttttgtttcttgttctcttggaaaatttccaagaacagttatttatagagtcagagaacaatgttgagctctttcttattttgataataattttgagtaattggaggggatatctaattctctatatataaaccccacgcgtccg

SEQ ID NO: 831 - DNA, 2354 bp, Arabidopsis thaliana
  Clone ID: ARATH-23APR03-CLUSTER352_1
ataagatgtgtcgttacctgactctctgatcttttttcccccaaaaatggcgcgtgacatccaactcccctgcgacggcgacggcgtatgcatgcgatgcaaatccaaccctccgcctgaagaatctctcacttgcggcacgtgcgttacaccgtggcacgtgtcctgtctctcttcacctcccaaaaccctagcttccactctacagtggcattgtcctgattgctccggcgaaatcgatcctcttcctgtttccggcggtgctactggtttcgaatctgctgggtcagatcttgtagctgcgattcgtgcgattgaggctgatgagtcgttgagtactgaagagaaagctaagatgaggcaacggttactgagtggtaaaggtgttgaggaggatgatgaagaagagaagaggaagaagaaggggaaagggaagaatccgaatctggatgtgttatctgctcttggagataacttgatgtgttctttctgtatgcagttgcctgagagacctgtgacgaaaccatgtgggcacaacgcttgcttaaaatgttttgagaaatggatggggcagggaaagagaacttgtggtaaatgccgcagcataattcctgaaaaaatggctaagaatccccgtatcaactcgtctcttgttgctgccattcgattagcaaaagtctctaaaagtgctgctgcgaccacttcaaaggtctttcatttcatcagcaaccaagaccgaccagataaagcatttacaaccgagcgtgcaaagaaaactggcaaggcaaacgctgctagtggaaagatttatgttacaataccaccagatcattttggtcctattccagctgaaaatgaccctgtcaggaaccaaggtcttttggttggagaatcctgggaggacagactcgagtgtaggcagtggggtgctcatttcccacatgttgctggcattgctggacaatctacttatggcgctcaatctgtagcactctctggaggttataaggatgatgaggatcatggagaatggtttctatacacaggaagtgggggtagagatctcagtggcaacaaaaggactaacaaggagcagtcttttgaccaaaagtttgagaagtctaatgcagcattaaaactcagctgcaaattggggtatcctgttcgagttgtcaggtctcacaaggagaagcgttctgcatacgcccctgaggaaggagtgagatatgatggggtttacaggattgagaagtgctggcgcaaagttggagtacagggttcttttaaggtctgtcgttacctgttcgttagatgtgacaatgagccagctccatggaccagtgatgagaatggagatcgtccaagacctatccctaatattccagagcttaatatggccaccgacctgtttgagagaaaagaaactccatcatgggattttgatgaaggtgagggttgttggaaatggatgaagccgccacctgcaagtaaaaagtcagtgaatgttttggctcctgaggagaggaaaaatttgaggaaagccataaaggcggcacactcgaataccatgagggcaagacttctgaaagaatttaagtgccagatctgtcagcaagtgttgactcttcctgtgacaacaccctgtgctcataacttctgcaaggcttgcttagaagcgaaatttgctgggaaaactcttgtgagagagagaagcacaggtggacggacactacgctcaaggaagaatgtcctgaactgcccttgttgcccaacagacatatctgattttctgcagaaccctcaggtcaacagagaagtagcggaggtgatagagaagctaaagacccaggaagaggacaccgcagagcttgaagatgaagatgaaggtgaatgctcaggcaccacccctgaagaagattctgagcaaccgaagaaaaggatcaagttggacactgacgcaacagtttctgcgaccatcaggtgaagttggtaccaaagaactctttagtaaaaaaaaactctagtgccttattttgtacgcaatatttgtggaacgtacctattgcgatgtgttattttggatcttacaacaactaagttattaatatggaacgtaaactatggttctcaggttttcaatttttctcttattttgggaaaaaaaaaaaaaaaaaaaactcgagggggggcccggtacccaatcgcctggtttgggagaaagtgagagtccatcatgggggttcggatgaaactgaggggccgttgaaagtggatgaagtcttccacctgttagcaggaatggctttgggatacttggaggagaggaagaagaattagaaaaccaaaaaaaggga

SEQ ID NO: 832 - DNA, 2680 bp, Arabidopsis thaliana
  unsure (1)..(2680): unsure at all n locations
  Clone ID: ARATH-23APR03-CLUSTER35329_1
gagagagagagagaganancncnctatncccccccccccccccgagggttattgtcgattgagcagagtaatttattccttcttcttcttcttcttcttcaaatcgtgtttctccatttcaaaatccagaaactttgtgattccacggtagttagttccaatctcaatgtctacggcggcagcggctcgtccggtggctggaactggcttacgggagaagacggcagcgtcactggtcaattccttccgattagcgtcggtgactcaacgtttacgttaccacattcaagacggagctaaggttgatcctaaggagtttcaaatctgttgcatctctttcgctaaaggcattgattttgctatagcgaataatgatattcctaagaaggttgaggagtttccgtggttactcaaacagttgtgcagacatggaactgatgtgtacactaagacggcgcttatggtgctgatgatctctgttaagcatgcttgtcatttgggatggttttcggatagcgagagtcaagaacttatcgctctagctgatgagataaggacttgttttgggagttctggaagcactagccctggtatcaaaagtcctggcagtacattttcgcagatcatggagaggttctatccatttgtaaagcttgggcatgttcttgtttcttttgaagtgaaggctggctatacaatgctggcgcatgatttttatatctcaaagaatatgccacattcactccaagagaaaattcggttatttgttgcccagacagacaacatagacacgtctgcctgtatttcaaatcctccagaagtcagcttcttgctaaatggaaagggggttgagaagagagtcaatatcgcaatggatacagggcctcaactccctacaaatgttactgcacagctgaaatatggaactaatcttctccaagtgatggggaattttaaaggaaattacatcatcataattgcttttacgggactggtagtgccacctgaaaaaccggttcttaaagattaccttcagtccggagtcattgaagcaagtccagattcagacatcattgaggggccatcacgagtatctctcagttgccctataagtcgcaagcggatcaagctaccagtcaagggccagttatgtaaacatcttcagtgttttgatttctcaaactacgttcacataaatatgaggaacccaacctggcgctgcccgcattgcaatcaacctgtttgctaccctgacattcgtttagatcaaaacatggccaagatattaaaagatgtggaacacaatgctgctgatgtaatcatcgatgctggtggtacatggaaggttacaaaaaatactggcgagaccccggaacctgtgcgtgagatcattcatgatctagaagacccgatgagcttattaaactctggtcctgttgttttcgatcttacgggggatgatgatgctgaactggaagtttttggtgacaacaaggttgaggaccggaagccctgtatgtctgatgctcagggtcaatctaataataacaacacaaataaacatccttcaaacgatgattactcttcgatatttgatatctctgatgtgatcgcacttgacccggagattttatctgctttgggaaacactgcgccacaaccgcatcaagcttcgaatactggaactggtcaacaatattcaaacttatcccaaataccaatgtccatagatccaatgccggtacctgtaccattctcgcagacaccatctccaagagatagaccagcaactacttccactgtcttcaccataccgaatccctctccacaatactctcaggttcatgcttcacctgttacacccaccggaacatatcttggtagaaccactagtccgagatggaaccagacttatcaatctcaagcgccaccaatgacaactccatatacgagccggaaggtctcagttccagtaacgagccagtcgccagcgaatgtatcctcttttgttcagtctcagcatgtccctagagtactcagccagcctaataattatggcgtcagaggtttaaccagtagccatgcaagcacttcaaggcagcacccaagtggtcccactgttcaatctgtttctcgattaagtgacctagtggatgtagacttgacggttcctgatacatccaactggcgcccgaggatgcgaggaagtcttgtgcccggttctcattccactgctcttgaccacatgatcatccgacctagccaacagtctcaaacttccactaggctgaatagttcacagccggttcagacaccatcggttcaaacgtctcaagctcagtcaccttttacaacggctgcctatagaaccgagacagttttaggaaaccgaaaccatccggtgcccgctcctcctggcattgttaggcctactggaccgacatcttgatggagaacttgagaggctagaacaaggggaagttggtacttaggagttaggacacaacacttaacataataaattagtaactttatcactttcccacgccatgaacagagtttaggattccggtgcgcaagtcgtattctgtttatgagggattagtttgtatttagcttgctgttaacttgtaatgacgatcaaactataagtgttatcaattactcttgtacccaaaaa

SEQ ID NO: 833 - DNA, 1094 bp, Arabidopsis thaliana
  Clone ID: ARATH-23APR03-CLUSTER3560_1
attttttcgtgctcggaaaaagcagagtaaagctttaaaaaatggtgattttatcggcgagctccactgtgagagctgccttagatacacaacctagacttccctacaaccctaatgcgccgcgaaaagttaagaaaatccctaacggtaattcattcttaccgccgccgtcacctgcaccgtctccaggaatcagcatctccgtcgccgatttgctcaagcgtccttcaagtaaagagataactgttgaccttgatgatacttatatgggatatgagacatggtctccaagtccaccaaagttggagaaaccaagatcagtcttcaatgctgcttctttagcctttataggcgattccatttatgagctatatgctcgtaggcattttcttttccctccgcttagtattgaagattataacgatcgtgttagagctgtggtgcgctgtgaagctcagtatgctttgctgaagaaacttgttgatgatgactttctaacaaaggaagagagggatattcttaggtggggaaagaatctaggttctgctagaacacgtacaagaaggcgtgcaggtaatgcggtttataacaaggcatcatcattggaaacactaattggttatctgtatctgacaaacgggaaaagattagaaaaaataatggagaagctaggattctcaagtgattcttcaactgagatcgtgattgaagaaaccaaccctaaaccatcagaatcatccaacctgccaaacttcatactcaacgagcaagtggtgtcattttagttgtaggaaaaggtctttactcggatcatggaaaagctgaagaatcaaagttgtcttaaatggccggtgtagcaagcataacagtgctcacttaacgggagaagacgttttttcgtatatgtacatacgtatgtatgaatgtccaactcctactggatatcaaatcaaaatgcccatttttgtcttctgaccatgatagttgtcctcatgggttgattcttaagcaagtctattagtgttgtactaaacatatgatatttaaacaaaaaataatcaaaagaaatgtaatagcaaaaaaaaaaaaaaaaa

SEQ ID NO: 834 - DNA, 747 bp, Arabidopsis thaliana
  Clone ID: ARATH-23APR03-CLUSTER35634_1
aaaaacatcattattacatcaagacaaaaaatgggaaagagaggacaaaaacagaacaggttcttgagaatcgtcaccatgcctcttaaagttctatgcaaagctcgtgatctctacatgagaagcatcacaggttgtgcagctcgaactcactactcttcagccgtcgacgccgcatccgttccatttccgagaagccggagtacttcctccgccttctcttcctctgcctcttctcggagaagatcttcggatttcactttcgacgatgattatagcgagctgcttagagctgcttccgttaggagtttaggtcataagaatgagattgacatgatcatacaacaacagcaacagcagcagcagcaacggcaggagaatcgcgttgcgatgggagcggttacggttaaaggcggtttgcctaagagctcgagtgttgggatgacaatggctaggattgatgaagaagatgaagaagaaggatctgtaaagaatcaaaagaagggatctgatttcttatatcctcgtagcagatcacatgctgttactattagaggatccaagttttaatatatactactaattaattgtcagttttatttttcttttgatttaatttaaaagaatgttcctaattatacatgtttatggaattattttgatgtaaagttactgtcatggatttatacaaaaaaaaagttactgtcaaatttatttcaataaaaattcctatatagattaagacag

SEQ ID NO: 835 - DNA, 3257 bp, Arabidopsis thaliana
  unsure (1)..(3257): unsure at all n locations
  Clone ID: ARATH-23APR03-CLUSTER3564_1
attattatcttcctctctatcatcaatggctccaatcgtaccacttcaccgtagtactccaaaatctccacttctcacgaaacaatgctattaaacatttcttcttctccaatctctcatcgaaaccctcacttcctctccaatttcaacaaccccatctcttatttccctcgacgatccaaaacccatctctcaaaatctcattttttccccaagttcactcctttatccaaccaaagtctcaaaaacagagtcttgttcggaaacaagaggtacccagatggagaaaggtttgattttagatcaagagctatctccgggattgatttgggaagctttgaatctgttcttgaagctattgctgttctcacaacgatcatcgtcgtccatgaatcaggtcatttccttgcggcttctctccaagggatccatgtgagtaaattcgcaattgggtttggtccgattctagctaagttcgattacaacaatgttgagtattcgcttagggcttttcctttaggtgggtttgttggtttccctgataatgatccagatagtgagattcctattgacgatgagaatcttcttaagaacagaccaactctagatagatcaattgttgtttcagctggaattatcgccaatgtgatctttgcttatgctataatctttgttcaagtgttatctgttggtttacctgtacaagaagcgtttcctggtgttcttgttcctgaagttaagaccttttctgctgcttctcgtgatgggttgctttctggtgatgtaattctcgctgtggacggtactgagctgtctaaaaccgggcctgacgctgtttcgaagattgttgacattgttaaaagaaacccgaagagtaatgtggtgtttagaatcgaaagagggggtgaagatttcgatattcgggttacaccggataagaactttgatgggacggggaagatcggtgttcagttgtctccaaatgttagaatcactaaggtgagaccgaggaacattccggaaacgtttagatttgtgggaagggagtttatggggctatcttctaatgttttggacggtttaaaacaaacattctttaacttctctcagacagcaagtaaagtagcaggtcctgtggcaattattgcagtgggagcagaagtggcaagatcaaatatcgacgggctttaccaattcgcagcgttgctgaatatcaaccttgcggtgatcaatctcttgccgttaccggctcttgacggtggaacattggcattgatattgttggaagctgttagaggagggaagaagcttcctgtagaggtagaacaagggataatgtcttcagggatcatgcttgtgatattccttggattgtttctcatcgttaaggacacacttagccttgatttcatcaaagaaatgttgtagttatctctttgaggaggaagagagaaactttagtgtgaagaggttgagagtttagaacaaatttggctatccaacacaaagatggtgatgaatttatggtacatacatattcatgtaatagttctactcttgttatcccttataaaagatgtgtttgtcaaggaaatcgtcgaaattgttgtttatcagcaaaacaaggcatgaacagaagggaaaaagctaatgaaaccatgaaaactcctcacaagaacctaatattctcaatgtaacctccaaaatcaatatctcatgagttcgcataccaatcccacaacgaaatctaatatcatcgtcgttacttccttggatctctgttttttttaaccccactttgttaaaatggtaaacgcaaacactaaacggtttatattttgacgattgtaaccgtggataaatccccataagcttgccggtatgaatctcttccttggcccttacgtacttcccaagtgaatcatcccacacatcacacgccatatgcgaaactctgagtttctcagcatcctctagaatccaaaatcttacctcttcattggaatgattctccatacggatcatatcgctagacaaatataaaagagtggaatagtatggtggcgcgatatgtgatacttcgtgtgcttgaatgaattccatcttctcagacctaacatcgaatttaactattattgactgtgaaaccccatagtatatagcaccatctatgcatatccctccatagaccatgtgataagtttctccagtggtgttttcaatctttctccactctttttgttgagaacttagcgtgaaaacgaaatattcctgatctgtatctgttctatagccgtcgaacatcatcacaaccaacaacactttgtattgatcttccactggatcgtatccgagacgtacgtgcatgtaattttcgttggtaacaacatcgggcagttttactatttgtctcgtggttggattacaaaccgcgatcgatgaaccacgtgtgcaacaaacgaatccgttgacagggggagatctgatgtagttgacgaaattcgagatcgtcatgtcgtgtctggctatgcccggagaggattttccgttgtcgtgatcaggagctgagtagatgaaaagcttgtcggaatccaagtgtttgaaagtgaaaaggagacgcggccgtgtctttgacctagtcaggaacgagtcaacgaattctttactgcggatgattgagaaccagagctttgatacggattggaatcggatatggatttggtcggaaggatcgatagtatctcgaaggtgagatcaaaagagatggtttttgtggagtttccggagtgatctaggttacgtgggggagaagattttgattttttcacaacggaagatctaantagaagaaaagcttctttcaaacaattttctttatataggaaaactcttgaacagtctaaactctaaagattcgacttcagttgaacagttgtgtagatcactcaattactcaccaataaccataaagcttctccgctatctagatcttgaatctcatcaatagctcctaaacctaggattaagctaaagtatatattataagctagtgaaattctccttgaggagatagctttgcattgcactcaatatatacacggtttagcaacgatctttcctagattctaggtacatgagatattaacaaagtcttatctaaacttgtaacaaacatatcgagacgaaatattgaatggaatattctatctcctaatatatataggtaccataaaggtaaggtcaacacaatgggctga

SEQ ID NO: 836 - DNA, 1120 bp, Arabidopsis thaliana
  Clone ID: ARATH-23APR03-CLUSTER35672_1
aaagatctacaaacaaagcttcttcttcttcttggtgtcatcaagattttccaaaaatgtctcaacaccaaaaaatctatccggtccaagatccagaagccgcaacagcgcgtccaacagctcctttggttcctcgtggttcctctagatcagaacatggagacccatccaaagtccctttgaaccaaaggccacaacggttcgtgccgttggctcctccaaagaagagaagaagttgttgttgcagatgcttttgctacacgttctgctttcttttgcttcttgtcgttgcagtaggcgcatccattggtatactataccttgtctttaaaccgaagctaccggattactctattgaccggttacagctcacccggtttgcactgaaccaagactcgagtttgactacggcttttaacgtgactataaccgctaagaatccgaacgagaagattggaatttattatgaagatgggagcaagattactgtgtggtacatggaacatcaactaagcaatgggtcgttgccaaaattttaccaaggacatgaaaatacgacagtgatatacgtagaaatgactggccaaacacaaaatgcatcgggtttaaggacgacattagaagagcaacaacaaagaaccgggaatataccattgagaattagagtaaaccaaccggttcgggtcaaatttgggaagttgaagctcttcgaagtaagattcttggtcagatgtggtgtatttgttgatagcttggctaccaataatgttattaagattcaaagtagtagttgcaaatttcgtcttaggttatagatccgtttttttttatataattaatatcgagatatacagagggaattttgtcagatatagtcacatactcatatatagttctcctctaaagtacattattgtgtctcagacctttgttgtataataaactgttggtttaaattaatatattaaagtatacaatactatgtacataggtggaattcaaagtatagtagttgtaagtttttaaaaaaaaaaaaaaaaaaaaaaacataaccaacaaaaacaaaaaaacaactctcaacaataaaccaatcaacaaaatccattaaaaaaaagggggg

SEQ ID NO: 837 - DNA, 776 bp, Arabidopsis thaliana
  Clone ID: ARATH-23APR03-CLUSTER35760_1
aagaagtgatgaagatggtgaagtgtaagaaggttaggcaccgcggtcgcaaaggacaaaaggagaaacccaagtttcgagaaactcgtatgcaaagaaacctcgggatccttcgcaggattgtaccaggctgtgaagagatcgaagacgaggaagccttgtttctcaagtcaattcagcatctcttgcttctcaaatctcaggttaatttacttaaaaagctagctgatgtatgtggagtctaattaaaagaacgtaagttctcaagttgtttatgcattacattataagatcaagcgagagagacataagaaaacagaggaggggataaagtaaaattacacagagaaaaacgatgaacaaggcgatgaatttttttagtttttgttgtagaaagtgagagcgtaatttgtacttaaggaggaagaagagagagtgagcatgtgttggatcgttgtgacccatgtcttgtaacgattgtaatcgtcggccatgtctaacttgatagctcctctgttcgtcctcaggacaatgagataacaagtgtcctcaaatggtggagccttgcgaacccagaattcgtgcagggttcctgcagcatcccgcgcgaccccctcgttcttagcccgccgcagccgggggggcgtccctttatgtggcccccttccggcggggtttttcccccctggggccgccctggccttgcaagcccccccgggggtctcggcgacccgccctgttcccttagcaagaacagatgtgttcttatcgaattc

SEQ ID NO: 838 - DNA, 1960 bp, Arabidopsis thaliana
  Clone ID: ARATH-23APR03-CLUSTER3576_1
tagtatatcctcaggttagcgataactcggtccgagtcgactcggtccgacaagcgattttcgtgactccgtcgtcaccacgcctatgttaagtgagtaaatccgactcttctccgtagagatttctcctactttcaggctctcttgtgaatttggaagacatgagctttgttttccggggaagtagaggagatttagaaagcggattctcgggtggttttctacccgaaagacgagctatgcgtgttcatggagctcgaccagttaattctaattccctcgcttttctggttacagttcttttgctgtttatgattctcaattcgcatcagatgcctcctaatttcctgctgtggcttgtgcttggggtgtttttgatggcaacgacgcttaggatgtatgctacttgccaacaacttcaagctcatgctcaggctcaggctgcagcagcaagtggcctctttagccatactgagctgaggttgcatgtgcctccttccattgctcttgctacgagagggcgtcttcagggacttaggctccagctggctcttcttgatcgggaatttgatgacttagattatgaaactttaagagcacttgattctgataatgtttccacaacttctatgagcgaggaagagataaatgcacttccagttcacaagtacaaggtgttggatcctgaaaatggttgctctttggcaaagcaagcgtcaacctcatcctcagctgagaagatgctagattctgccaatgaaagtaaaaaaggaacagaagatgagctcacatgtagtgtttgcctagaacaagttaccgtaggggaaatcgttcgcaccttaccttgtttgcatcagtttcatgcaggatgtatcgatccatggttgagacagcaaggaacatgtcctgtctgtaaatttagagctcattcaggatggcaagaacaagatgagattgatgatgatgcttccgacatggtttgaaaagtttggtttcgaacacttgtttatgttattaatgtgcgtgcgaattaaaccccaaacaaatcatgtaatggtcaataactcaatatgatgtaactgatgactctccctttccaaaagtttgatttagattcatcatgaaatagtagtgacaggtcttttgcattcgacttatttagctttgcctttgccttttcctttgcctggacctttcttagcgtctagcttagcttgaatcctagcagctgcagcagcttttgcttcttctctctttttcttatcatcctctttcgcagctgcagcaatctctctctgcttcttcagatcttctagcctggctctctcttcagaaacacttccaacactagcacctttcctcggtctacaagcaaccaattccacctcgaaaatcaaagttgcatcaggtgggatgtcgggaggagacccggctcttccgtaagcatattctggcttacatgtaatttttgcaacttctccaaccttcatggttttaagagcaatgtcccaagaacggataacactgcctgttcctaactcaaaggagaaaacaagattgtcttcgcgagtagtgtcgaaaaccttttcgtcttcagccaagataccctcataatgaacatcgacaacaggaagatcatcagagggtgaaatagcatcaggtttggcactccttacaatctttttcaagacgccaccatctccactcaaatcgattgcatcacccatagcttcaaaggttcaaagaaacccgattcgaagaaagatgaatagtattcgatccgatacgaaaacggaagaagcaaatgtgtagtgacgaagtgataaccggaaagagatcgccgtagagatcggtggccatagactgtccaaagagtatcggatttttcctagaatcggcttcttcttcttcttcttctttccccttctgtcgtcttctcgcccgtgcggacgcgtggctt

SEQ ID NO: 839 - DNA, 928 bp, Arabidopsis thaliana
  Clone ID: ARATH-23APR03-CLUSTER35788_1
tatggtattatgttttcaatgatacagactgagcaaaattgattatcctctgtctttcgtttgaaaaaagctttgctattatgatggatatctttgacacaatgtctactggcaaaagcaccagttactgcatattctgttgtatttggaaactaaacacttgttttcatgtatgtgttgtgttcaatcatcagggaatccgaggaacctgtcgataatgcgggcaactggagttccatcccctggagtatattgaaccagagactccaactccattttcgtcaaggtttgatgaagggtgtcaggacgagtgtagtacaagtgctttctctcttcaagtgcttcagctaattcacattgatgattatccatcagatcttcgttcactaccacaatcaatggtttccctagtttcagtgtctcaaatatacttccagaaccagcgtgactaataacaagagatgcatactgaatataatctgcgatacttgaggaaaatgtgaagtaatccacaactaatgatccatccgctccatcacacttagttgggaaaaagattcctcgacccatttgaataagaagatgagtaaatcctctcttctgcagttcgtctttaacattttgactaaccactgctttcacaagagcatcgaaactcgttgttcctacagttacaaacactactctctttgcattctctctatcctcctccatttttaaacttctcgattcccaattccaaatctcaaatcaacgaggatacaaaagcaccgatcgatcttaagaggcagatccaagaatcttgctttgggatgaatcgagagagagaacaacaagtgttttccgatctacagaaacctccaattcctctttagcttcggcgatgctccaaaatcgctccgatctatggcgtaatttctctgcttac

SEQ ID NO: 840 - DNA, 1346 bp, Arabidopsis thaliana
  Clone ID: ARATH-23APR03-CLUSTER3583_1
atgtccaccatccgttcacttggccgcgttcatataaaccaaaaaccgaacaacaacaaaaattcgaaaattctccggcgacaccaacaatgggaaggtctctaatattctctggaaacatgtcattgagaatctctcacttacccagatcatctcttccgctgcaaaacccattttcaggccggacagtgaacagaactttccgatatcggtgtacgaggattttgtctaatagcttcaagtccacaacgagacttcaaaccaaagctgttctgtctgaggtttctgatcagacgcgatatcccagaatcggcgctaaaaccaccggaactatatctccggcacacctccttgaagtcgttgaactcgccgctaaaaccggcgctgaggtggttatggaagctgtaaataagccaaggaatattacttataaaggtctcagtgacttagtaactgatactgataaagcaagcgaggctgctattttggaagtagtgaagaagaattttagtgatcatcttattcttggtgaagaaggaggtatcatcggcgattcgtcttctgattacctctggtgcattgatcctctagatggaactacaaattttgctcatggatatcccagttttgctgtttccgtcggtgttctgtatcgtggaaatcccgccgctgcttctgtggtagagtttgtcggtggtccgatgtgctggaacactcgaaccttttctgcaactgcaggtggtggagcattgtgtaacgggcaaaaaattcatgtcagtaagaccgatgctgtggagagagcacttcttatcacagggtttggttatgaacatgatgatgcatggagcactaacatggaactgttcaaagagtttactgatgtgagtcggggagtgcgaagactcggtgctgctgcagttgacatgtgtcatgttgcacttgggattgcggaatcatattgggagtaccgtttaaagccatgggacatggctgctggtgttcttatagttgaggaagctggaggagctgtgactcggatggacggagggaagttttctgtgtttgataggtctgttttggtctccaacggcgttcttcaccccaagcttctggaaagaattgcacccgcaactgagaatttgaagtcgaaaggaatcgatttctcgttatggttcaaaccggaagattatcatacagagctttaagacttgttcaagaaaggtatataagattacattgttatgatctaaagctcttatatttgaactgaaacgaggtataagatttgcgttcggattatgaaaatcaataatgatcatattcccccttaaaaaaaaaaaaaaaaa

SEQ ID NO: 841 - DNA, 4352 bp, Arabidopsis thaliana
  Clone ID: ARATH-23APR03-CLUSTER3588_1
gaatatccaaaagccaaaaaaaaatcaaatcttgaaatgccctgaaaacatgaacactcttcccgtcgtctctctcacagcttcttcttccttcaaattcttccattttccttctctgcaccgttctctctctcattccccaaacttctccttcaccaaatcccttatcctcaatccaaaccacctctccttcaaatccaccttaaattctctttcaccgtctcagtctcagctctacgaggaagaagacgacgaagaagaagaagaagaagacgaagatgatgatgacgaagctgctgacgaatacgacaatatctccgatgaaattcggaatagcgatgacgacgacgacgatgaagaaaccgaattctccgtggatttgccgacggaatcagctcgggaacgagtggagttccggtggcagagagtggagaagcttcgtagtcttgttagagattttggtgttgagatgattgatatcgatgaactcatttcaatctacgattttcgaatcgacaagtttcagagattggctattgaagcttttcttagaggttcttctgttgtggtttctgctccgactagtagtggcaagactttgattgctgaagctgctgctgtttccacggtggctaaaggtcgccggttgttctacactacacctcttaaagcactctctaatcagaagtttcgtgagtttagggagacatttggggatgataatgttggtttactcacaggtgactctgatattaacaaagatgctcagattgtgattatgactacagagattctccgtaacatgttgtatcaaagtgttggaatggcttcttcaggaactggactttttcatgttgatgccattgttttggatgaggttcactatttaagtgatatatctaggggaactgtgtgggaagagatagtcatttattgtccaaaggaggttcaacttatatgcctatcagctacagttgcaaatccggatgaattagctggttggattggtgagatacatggtaaaactgagttggtaacatcgacaagacgcccagttccattaacttggtacttttcaacaaaacattctttattacctctgcttgatgagaaagggataaacgtgaataggaagctttctctcaattatttgcaactgtctgcctcagaagctagattccgtgatgatgatgacgggtataggaaaaggaggtcaaagaaacgaggaggtgataccagctacaacaaccttgtgaacgtaactgattatcctctttcaaagaatgagataaacaagattcgtcgatcacaggtacctcaaattagcgacacattatggcatctccaggggaaaaatatgttaccagcgatatggttcatttttaaccgtagaggatgtgatgcagctgtacagtatgttgaaaattttcagcttttagatgattgcgagaagagtgaggttgagttggccttgaagaagtttcgcgttctttatccagatgcagtgagagagagtgcagagaaaggactgcttaggggaattgctgctcatcatgcaggttgtctacctctttggaaatctttcattgaggaactttttcagcgaggacttgttaaggttgtctttgctactgagacacttgctgctggaataaacatgccggctagaacggctgttatctcgtctctttcaaaaaaggctggtaatgaacgaatagagttgggtcctaacgaattgtaccagatggctgggcgtgctggacgcagaggcatcgatgaaaagggctacactgtgctggttcagactgcttttgaaggcgctgaagagtgctgcaaacttgtctttgctggagttaaacctctcgtgtcacaatttactgcttcatatggcatggtactgaatctggtagctggttcaaaagttactcgtaaatcaagtggaactgaggccgggaaagtcttacaagcagggagaagtctggaagaagccaagaaattagttgagaagagttttggaaactatgtgagcagcaatgtgacggttgctgcgaagcaggaacttgctgaaatcgacaataagatcgagattctgtcatctgaaataagtgatgaagcaatagataagaagagtaggaaacttctttcagcgagggattacaaggagatcactgtacttaaagaagagctacgggaagagaaacgcaagcgtgctgaacaacgaagaagaatggaactcgaaaggttcttagctctaaaaccgctcttaaaagggatggaagaggggaacttaccatttatttgtttggagttcaaggattctgaagggagggagcagtcagtccctgctgtttacttggggcatattgattcatttcagggttccaaacttcagaagatgatgtctttggatgagtcttttgcgttaaacttaatcgaggatgagctggcggctgatgaacctggaaagcctaatgttaaaccgtcttactatgtggcccttggctctgataactcatggtatctctttactgagaagtgggttaggactgtctacagaactggtttccctaacattgctctagcgcttggagatgctttgcctcgagaaatcatgaagaatctcctggataaagcagatatgcagtgggataaactagctgaatctgaacttggaagtttgtggagattggaaggatctctagagacatggtcctggagtttaaacgtacctgtcctaagcagcctttctgacgaagatgaggtgttacatatgtccgaagagtatgataacgcggcgcaaaaatacaaggaacaaaggagcaaaatttcgcgtttgaagaagaagatgtcccggtcagaagggttcagagaatataagaaaattctagagaatgctaacttgacggttgagaagatgaaacggctcaaggcgagatcgagacgccttataaaccgtttagagcagattgaaccgtctggttggaaagatttcatgcgcataagcaacgtgattcacgaaagcagagcattgcccattaatacccacttgatatttcctctgggagaaacagctgctgcaatccgaggagaaaacgagctttggccttgcaatggtgttgcggaacaaagccctggtggatctcaagcctcctcaactagctggtgtatgtgcaagtttagtttcagaaggcataaaagttcgaccttggagagacaacaactatatttacgagccatctgatacagtagtagacatggtcaatttcttagaagaccaaagaagctctcttataaagcttcaagagaagcacgaggttatgattccatgttgtctggacgttcagttctctggtatggttgaagcttgggcttctggattaagttggaaagaaatgatgatggaatgtgcaatggacgaaggcgatcttgctcgcctgttacgacgcacaattgatctcttagctcagattcctaagttgcctgatattgacccagtcctgcaacgtagtgcagcagctgcagcagatatcatggaccgtccaccaattagtgagcttgccggttaaagtgaaccccacattagctctgtctttagtgagacccattggcaaaaaaaacacaagagcctgggatgtgcaagaagtgcatatgtaagaattggggatacaagaacaaatttttcattcagatgattaatgttggaaagaataggagcaacaaagaagaaattttaattaatgttacaacatacaaaatgcttatatacacaatgggaaacaagacttcaaggcttgggcagttaatccgtttagtattccttcgattttccccctccctccctttttattttctgtgagaatacaacagggaccagaggcagtaacagaagtaagagccatcttacatttcttctcttctgacaaagctcaatgctgagtatggcaaccttttatctctcaaaaagtgcgaagttgctctattcccgagcgttttctggtagtaagtgacagatgtcattgaccggtgagaagtttttgatatctttgggttctcctttgcctaattaaagaaccactgcaaacagaatcatgtgcgaggggtaaaccgctttggtttaaaagtttcctcctcttagcacgatgcaacacatcctcggtgtctaatacataggagacctttgaagaactgcaggttatcttacattccaaaccattaataatcttaacttcatccgtggtgcagagttcatcgtcaccaccatttttacgcttattccgtttcaaatagattcgaggattctctttcgcattaggttgataagaaaggaatacattgtgggaggtaagctgcaa

SEQ ID NO: 842 - DNA, 1462 bp, Arabidopsis thaliana
  Clone ID: ARATH-23APR03-CLUSTER36007_1
gcaccaggtccccccccccccccccgaagtaggcgagctttttactaaaaacgctcctcgtcacggaaatcgagacactctcaccattcatgccttctgacgccggtggagcttccgttcgccagcgtctggatctatcaactctattcagcctctctttgttctgtataagcttggtctcgtttgattcttcttccatgatttcaattctctccaaacatccaaattccctttcccatgtgttcttcttccctgagggttttctttggctccgatctgtctcagaccttggatccatctctgtccctgaaaccaaaatcagaagatccacaacagttcagcggctctttacctcaaacatcagagagtatctcttggaccatcagatgtgcattttccggtgagaacgtcgacggcacacgacgagctcaaaagctgggctggtggtctccctctacgcctcaccgccgaccatcactccaatctttcagaactccaaccccttagggtttggccggggggcgccccctccgccgctccggcccccttcgcccccttcggcccgttccccggcccgttgggtttgggctggatgggcctcatcttttgcttgcggcccactaagtcatctatgggccggccgcagcttagtcgctctctgcaattttgcttctcaatagtggatggtcgtggactccatccaactgtaggaacaaattcgttagaggagacttgcttattcatttatcgaaacctgatggatagtgttgattgtttttcaccggatgcaactctaattgtgaagcttagtggattagtatttttctcaaaccttatttgttgtgatgcgatctttgcacctgttcctatttgtgtttgtatcttgaggatctatattcccactagcaagcctaaccatgtcaccccaagcctaatgggcgaagcatcccaaccttctcaaactttttggataaaaccgcctcaaagaaaactccatccgagctccgctgcattctttgtgtattggacttgtgaattcccttggcgaatccagcaaacttactcctctatggagataccatctttggaaccttactttggcagcgaggaaaagcctccgcccgcaacctcctccatggaacaccttttcgaaagctctttggcgttaatcgtacgagcttattatgatcacaagctgatccgagatttcgtgaagctagtcttcaaatttgaatccttgaaggctccaacagatcttccaacctttgctatcttcttgaagctttgcatcttggaaaactcatggaacctctacccttatctttcatgtagtgttttaaatttcagttgtatgaactcacctcttacgaggttttagttgaatgaaagttttcctttgccaaaaaaaaaaaaaagaaactcgagaaaaaaaaaactcgagggggggcccggtacccaatcg

SEQ ID NO: 843 - DNA, 2537 bp, Arabidopsis thaliana
  Clone ID: ARATH-23APR03-CLUSTER3605_1
gaaatcgtacattctccgatttagggttccgaacgaaatggccgatgttaatcttcctccgtctgattccgtcgataaccgtctccctgagaaatcaacctcttcctcaccacctcctccaccgccttcttcttctctgccgcagcaggaacaggaacaagaccagcagcagcttccgctacgccgtgagagagattcacgagagcgtcgtgacgagagagacatcgaacgtcctccgcctaatcgccgtgaacgtgaccgttcgcctctcccaccgcctcgtagggattacaagagacgtcctagcttgagtcctccgccaccgtatagagataggcgacactctcctcctcagcgtcgctcgcctcctcaaaagcgttatcggagggatgataatggctatgatggtcgccgtggtagtcctcgtggtggctatggaccacccgatagaagatttgggtatgaccatggtggaggatatgaccgtgaaatgggtgggaggcctggttatggtgatgaaaggcctcatggtcgctttatgggtcgctatcaggactgggagggaggacgtggaggttatggtgatgcttccaacagtggaaatcctcaaagggatggattgatgtcatacaaacaatttatccaggagttggaagatgatatattgccatctgaagctgaacgcagatatcaagaatacaagtcagagtatatcacaacacaaaaacgtgccttttttaacacccacaaagaggaagactggttgaaaaataagtatcatccaacaaacttactatctgtcatagaaaggaggaatgaccttgcacagaaggtggcaaaggatttcttacttgatttacaaagcgggacactagatttaggccctgcagtgacagcattgaataaatccggccggaccagtgagcctaattctgaggatgaagccgctggtgttggtaaaagaaaaaggcatggtatgggtggagctaaagagaatgaacttctttcagccgcaccgaaagcacccagtttcacctctgatccaaagagaatcctgactgacgttgaacaaacacaagcccttgtgcgtaagctagactctgagaaaaaaattgaggaaaatgttttacaaggttcagaaactgaaaaatcaggtagagaaaagttacacagtggttctactggtccagttgtaatcataagggggttgacatctgtgaaaggccttgagggtgttgaattacttgacacgcttgttacatatctatggcgtgttcatggtctggactattacggaaaggttgaaacaaatgaagctaagggtttgcggcatgtgagagctgaaggaaaagtttctgatgcaaaaggagatgagaatgaaagtaaattcgactctcattggcaagagaggttgaaaggtcaagatcccttggaagtgatggctgccaaagagaagatagatgctgccgctactgaagctttagatccacatgtccgaaagattagagatgagaagtatggttggaaatatggttgtggagccaagggctgcacgaagctgtttcatgctgctgaatttgtgtacaagcatctcaagctgaaacacactgagcttgtcacagagctgactaccaaagttcgggaagaactgtattttcagaactatatgaatgatcctaatgctccaggaggacaaccagccacgcagcaatctggcccgagagatagacctataagacgtaaacccagcatggagaacagactgagggatgatagaggtggacgcagagagcgtgatggacgtgctaatggaaatgacagaaatgatcggtcagaagatcaacagagaggggataatgatggtggaaatcctggggaagttgggtatgatgcatttggtggacaaggtggtgttcatgttcctcccttcttatcggatataaacccaccaccaatgctgatgcctgttcctggtgctgggccactgggaccatttgtaccagcaccacctgaagttgctatgcagatgttcagggacccaagtggacccaaccctccttttgaaggtagcgggagaggtggacctgccccttttctgttgtctccggcctttagacaagatcctagacggctgcgcagctaccaagacctagatgctccagaggaagaagtgaccgttattgattacaggagcttgtagacaagacagggctagagagatcccgagtttactggttcgggttgggttaaagggcatcagtattagaaggcaaagctagcagattgtggcattttcttacccttttgatgtattatgtcttgttcctcccaattttcactcactaaagcgtaaaatacgcactccatacatttccttattgtttttcaaaatttttcatgtgctttcttactaattctgttcgacgatgattacataaatagcatgagaatttcttgtattgaataatgcgttttatccacattgtttgttatcaatacttaagtctccatggcagtcttaaatctccatggccatt

SEQ ID NO: 844 - DNA, 1778 bp, Arabidopsis thaliana
  Clone ID: ARATH-23APR03-CLUSTER3611_1
gattactctctctctctctctctgcagcttttaaaatcgctttctcaattctcgtcgttgtacccatttcagtttctctcaacgtaactgcttcacggcggcgagtgagtgagttcgacgtgaaatttcaactgatgggagcgtattgcgacgaaaacctaagtagtttaccggtgttctcctccggcgctccggcgaacgagctccggttcagcaagcatgtctacgataacgttcatggaaacatctatctcgatcctctttgtttaaaattcattgacactgagcagtttcagaggcttcgtgaactaaagcaacttggagtgacaaacatggtatatccaggagctgtacattcgagatttgagcactctctaggcgtgtattggcttgcaggcgaaactgctcagaggctaaaaaatttccagggaatggagcttggtattgacaattatgatcttcagactgtgagacttgctggacttctccatgatattggccatgggcctttcagtcatatgtttgagcgtgaattccttccaaaggtcataagtgactgtcagtggtctcatgagttaatgtctgtaaacatgattgaccatatggttgatacacatcacatcgatattgatgctcaaatgctgaaaagagtgaaggacatgatactagctagtactgaattttcacagctgaaaggcaatgcagagaagcgtttcttgtatgatattgttgctaatggtcgaaatgggattgatgtggacaagtttgactaccttgtccgtgattctcgagcttgtggactgggatccaattttcaattccaaagactgacagagacgatgagagtcctggacaatgaaatctgcttccgcgccaaggagtatcttagtgtccacaagttatttgcaactcgagctgatctttatcgaaccgtctacacgcattcgaaagtaaaggcgatagagctgatgatagtagatgccatggtcaaagccaacaatcatttggaaatttcttctatgattaatgacccatctgaatactggaagttagacgacacaatcctcaaaactatcgaaatagctccagatccagaacttgcagaagcgaaagagctgatactccgtgttcgcagaaggcagttgtaccaattctgtaacgaatatgcggttccaaaggacaaaatcgatcatttcaaagctgtcactcctcaagatatcatctgttctcagaagcacacaagcttgacactaaaagaagaagatatagctgttacaaacgtcaagattgacttggctcgtgggagagaaaatccgcttgaatgcatcaacttctataaggattatgatagtgcagagaagtttgtgatacctgaggacagagtcagtcacttgttaccaacaacatatcaagacatgatagtgagagtatatgccaaaaaaccagaattggtagaagcagtttctgaggcatttgaaaacttccaaatgagaacgtatggaatcaaagctcaagtacacgcaacacctgagaaaaagaaaaggcgtgtgatgtaattacacgtggccttaattcatttcatttcaaacggttttattttggtttttaaggtcttgaaactttagatatggatgcgtgtacatatagcatgccttagtcttacgatatcgaagccttggattcagacagcgtgtttatacgtaagaaaaggaaaagcaaggcaccatttcttaagaaaaaaaatttcgtacggttaaatcttaagtctttttttaagc

SEQ ID NO: 845 - DNA, 2104 bp, Arabidopsis thaliana
  Clone ID: ARATH-23APR03-CLUSTER3614_1
ccgaattcccgggtcggtgcagttgagaaaataaaaggactttctctctcttctctctctagatcttttagagagaggaagtttctgatgctcaaacttggctccgacaatagccagcttttttagtggtgttggttggcttccttctggcgtcgttagctcctttagcaacgtcggctagcttttctccgacatcggtggtttctttagcaccgttggtcggcttcgttcttcaaatttagtttttgcctttcaaccttgttcgattctattttgcttcggttttaattggttttgatttctctttctcttcatttcgatctaaatttgtaatttttcgatcctcccttctttaaggggcttaatttgttcttcaagcttattgagttttcattttaaaagatcaaatttttagttacggattgaagtttaatttagtgtcttttgtttgattttgatgaaattagagctgttgtttgtctttcttgttgccgatgcttgttgaatcgtttgggtttatgttgtttttcctttaaatggcagaagtcgaagtcgatagtttgtgagctatttctttcttgaaggttttaaattttacagtcattgtcacagaagatttgtcaattgtctcatcggatttgtagctgcttccgatttggcgtttacagcaattccggtgaacttaagttttttgtggttatgattctccacctgcgacattctgcaactcatcatcttctgtttccacgtgtcctctttaccgtgtctctagtgccatgtgggctttgacttattagcacattagctttctcttcttcagaaggtggtctttgggcttttgtccgtttatggcctgttatatggctttgtaaaatatggcttgttaaaaggctttgtaatataaataataaaacagttgtgacaaaaaaaaaaaaaaaaaagggcggccgctgattggtgaacttcttttttttccaagattgcagtaaacgtcgtctttagctccaaaaacaacctttgtcttgttcagctaatggcgatttttgaatggcggcacagaagacggccattcgacggcggaggaactcgtcgccgtcgtttcttcagcccattgtattcgagaaatttcaagagaacgattctcttcgctgtgattttcttagctatcttccctcctctctacttccatttcaagctccgacgaattcgtcagattgtcgcgcaaaagtgcgattggcttcaccatcctccacttgtctgtgctcacggcggcgattccaccctcgctttcccaaacactatggacgcttacagtttcgctatacgttctcgagttgattgcattgaagtcgatgtttctcgttcctccgatggtgttttattcgctcttcacaacagtcagggatctgcagcgtattgctcgtaactcttctgttcaagttggagatctgagtatgaaacagatcaaggaactcgatgtctcggagattgttaaaggaaccttgggaagtagtaggattcctactcttgaagaggctttagcgttgatatcgaattcagtccggaaagtgatccttgatgccaaagttggaccgccaatgtatgaaaaggggttagcacaagacatcctttctattattgagagagcgcagtgcaataattgcatcgtatgggccaaaagcgacactttggctagggacataattagacgagcaccagatactatggtgggatacattgtgatggtagatcctttgactggggcgagaaacagcctgctgagaatgaagggagctagggttgtgggagtttatcatcccttgatcgatgaagaattagttagagttgtccgtcggagaaacaaagaggtgtatgcatggactgtggatgatgctgatcccatgaaaaggatgcttcacttaggtgtggatgctgttgtgacgagcgatccatctatgtttcagggtctcatggaagatcttagaactgagtgtcttgaagaaggtttttcaatacggacgtgagaatttctttttcgagcattcttaatgactgtaataccaactcagaagtttttggcaaagatctttctttatgttaaaaa

SEQ ID NO: 846 - DNA, 1279 bp, Arabidopsis thaliana
  Clone ID: ARATH-23APR03-CLUSTER36517_1
aactccgtctctccgttactttctcccccccctcgggggtccccgtctccccggtattttattccttcctctggtgtctcatttattctaaggatctactccattcaagtgttgacagttctgagagaagatataagttgaatcgcgtgaccggagacatggagactcaaaacaaattgatgaatgaaactaaaagacatgttaaatccagattgtgcagagtttctggttcgatgacggagatgatggaaattcaagctgagaatcccacattccatgtattgtttattccgggaaatccaggagttgtgtcattttacaaggactttttggaatctttatacgagtttcttggtggaaatgcttctgtaattgctattgggcaaatatctcacacgagcaaggactgggagtctgggaggctattttcatttcaagaacaaattgatcataagattgattttatcagacaggagttggagagtgtgaaagttccaataatattggttgggcattctattgggtcttatatatcccttgagttattgaagaaattctcggacaaggtggtatattgcattggcctatatccatttttgactttgaaccaacaatcaacaaagcaatcattaattggcaaacttgcagcgtcttctgttctgtcggctacagcaagttttctgattgcatcgctgagacttttacctatgtcagctgcacggctgcttgtatctaaatccattggagcttcatggtctgatactgctgttcaagctacctgcactcacttgaggcagtatcacaccatgcgcaatgttctcttcatggcaaagtcagagtttagagagcttgcagcagagccagattgggatttcatgagagaaaaccagagcaagcttgcatttttatttggcattgatgatcattggggtccactgcaactctttgaagagatttcaaagcaagctccgcatacttccttatctatcgagagggaaggtcacacgcacggattctgctgcacggtggctggctcggcatgggttgcgcagcacgtagccactctaatcaagaaccggttttcacagctccagtaaagtacattcccctgtctcttccttccaacaaaataagtgtcaaccatcaaaatgtttgttttaaacagattagtttaatagtaattgtcagagagatggtttatgtaaaaaatgtttggttatctagttacaaagaaattttaggagagtgcaagttggccaaaaaaaaaaaaaaaaaaaaa

SEQ ID NO: 847 - DNA, 3256 bp, Arabidopsis thaliana
  Clone ID: ARATH-23APR03-CLUSTER3657_1
tcaaatgtgtaatggcacatttgtttcatcctcccgcgatgctatcccggtttggtcgattgttcatcctatcccgggagtcctttttgattataggggggagttgtttcgagcgtttaaaaaagagctaccctccccctgcattatttgtcgccggctgggggcagggcctcgtccggggcgggtatgagagaacgaagactttctcctcccaactcgtcccgccccaacttcaatggcagagtcaattcgaactttttcgcttcaatggcggatactgtcactgatcatcgctttacttgtgtactttccgattgtgtcgggaaattactttaaaccgttcaatgtgagctacgaccaccgggctttaatcatcgccggcaagaggcgcatgcttgtctcagctggaattcactaccctcgagccactcctgagatgtggtctgatctcatcgcaaagagtaaagaaggtggagctgatgtgattcaaacttatgtgttttggaatgggcacgagcctgtaaagggtcagtataactttgaaggaagatatgaccttgtcaaatttgtgaagcttattggttcaagtggtctttatctccatctacgcataggtccttatgtttgtgctgagtggaactttggggggttcccagtgtggctgcgggatattcctggcattgagtttcgaacagataatgaaccttttaagaaagagatgcaaaagtttgtaacaaagattgtggatttgatgcgagaagcaaagctcttctgttggcaaggaggtcccataatcatgctgcagatcgagaatgaatatggggatgttgaaaaatcttacgggcagaagggaaaggattacgtcaaatgggcagctagcatggctctagggcttggtgctggagttccgtgggttatgtgcaaacaaacggacgctccagagaatattattgatgcatgcaatggatactattgtgatggttttaaaccaaattcgcggacgaagccaatactttggacagaggattgggatggatggtacacgaagtggggtggaagtttgcctcaccgacctgctgaagatcttgcatttgcagttgcacgattttatcagcgtggaggaagctttcaaaattattatatgtattttggtggaacaaactttggtcgaacttctggtggtcctttctatatcacaagctatgattatgatgctcctcttgatgaatatggtctgaggagcgagccaaaatgggggcatctaaaggatcttcatgctgccataaaactttgtgaacctgcccttgtcgcggcagatgcacctcagtatagaaaactgggatcaaatcaggaggcacatatttatcatggcgatggtgagactggaggaaaggtgtgcgctgcatttctcgcaaacattgatgagcataaatctgcacatgtgaagtttaatggccagtcatatactttaccaccttggtcagtgagtgtattgccagactgtcgacatgtggccttcaacactgccaaggtaggagcacaaacttctgttaaaacagtgaagtctgcaaggccatctttaggtagtatgtctatactgcaaaaagtcgtgaggcaagataatgtttcttatatctcaaaatcatggatggctctgaaagaacctattggcatatggggtgaaaacaatttcactttccaaggattattggagcatttgaatgttacaaaagaccggtctgattacctgtggcataagacaagaataagcgtatctgaagatgatatctcgttctggaagaaaaatggacctaacccaacagtgtcaattgatagcatgagggatgtgttgcgtgtgtttgttaacaaacaactctcaggcagtattgttggtcactgggtgaaggcagtgcagcctgtacgatttatacagggaaacaatgatttacttctgttgactcaaacagttggtttacagaattatggtgctttcttggagaaggatggagccggttttagaggcaaagctaagcttactggattcaagaatggagatttagacctgtcaaaatcgtcatggacgtatcaggtgggattgaagggcgaggctgataaaatatatactgttgaacacaatgaaaaagctgagtggagtactttggagaccgacgcttcaccttcgatctttatgtggtacaagacatactttgaccccccagccggaacagatcctgttgttcttgatctggaaagtatgggaaaggggcaagcttgggtcaatggacaccatattggaaggtattggaatatcatttcccaaaaggatggatgtgacagaacctgtgattatcgtggagcctacaattcagataagtgcacaacaaattgtggaaagcctacacaaaccaggtaccatataccgcgttcgtggttaaagccgtccagtaatctacttgtgctctttgaagagactgggggaaacccatttaagatatcggttaagacagttactgctgggattctgtgcggtcaagtcttggaatcgcattacccacctctgcggaaatggtccacaccagattacataaacggaacgactttgataaacagtgtggcaccagaagtgcatctgcattgtgaagatgggcatgtcatatcctccatagaatttgctagctatgggactccaagaggtagctgcgacgggttttctatcgggaaatgtcatgcatccaactcattatcaatcgtctctgaggcttgtaaaggacgcaacagctgcttcatcgaggtgtcaaatactgcttttatcagtgacccatgtagcggaactctaaagactttaacggttatggcacgatgttccccgtctcaaaacatgagtgacctcagtttttagacaccgggaagcggctcagaacgatgaacagctgtttctctaaaaaacaagagaccattgatattgattaaagaagaacatgtcccatcacaagctttctgtgacctttatatttcaaagtctgaactctgaacaattgtgtttgctcttgttcattggtgtatccaaactctacttggaaccaattaacagactcaaaaccatctctaaggtttctgcttgtacagtatgttgtttgaaatttgaatataagaaaatagtcgaagttgatgtaaaaaaaaaaaaaaaaaaaaaaaaaaaaaaaaaaaagaaaaaaaaaaaaaaaaaaaactcgagggggggcccggtacccaattg

SEQ ID NO: 848 - DNA, 733 bp, Arabidopsis thaliana
  Clone ID: ARATH-23APR03-CLUSTER36608_1
tttttttttttttttttcaagttgcagccgtaggcaaggaatttaatatggccccaaagggtaaaagtcttcgacaataaatttagggtttaaaccaaagatgcggcaacctaaatacgaacgaagtcaaacaaaaataatgaatcaaattaatttctcatcaacatccaataatccccagaaatttttggaatccagagatgattaaatagtatcacaaatcctctcaagaacatacaattttctcaataataattgaaaacacaaccaaacgctcatgaaatctctctccaacaccaaccaaaaaaattataataattctttgtgttcgtcaaataaattaaatcaaacaacagagaataacaagagatctctagcgtcatcatacacttgagaagatttgataccgcaaccaccagtagttccggttccggttcctaaaccaccaaccaaaccggtcgaattttgacctgacccaagaaccccaccacctccgattaaatctttgactccgccgtgatggtgatggttgtcggatggaggatggtaataaagacgagccgtctgaggacagtgtgaatgaaacctcgccgcgattctcacgccgacgtccaacatctccgtgtatttccccatttccttgaagaatctattgtatctaaattcttcttttctatatgttttttttctgctctttctcgtggatagagagagaggagacggagacgattac

SEQ ID NO: 849 - DNA, 1064 bp, Arabidopsis thaliana
  Clone ID: ARATH-23APR03-CLUSTER36668_1
gttcccggccccccctcgtgttgtgcttgtttttgttttggtcttctttagctatctttgaggttgtcacttgctacctacctgtgtttcgggccccccccccaacacgttaagacagctacgaagattattaaaaaaaacttaagatgattaaatttgaaacgtacgagtatttgaactccactgagctagacgttaagaaacaaaaagaaagagtcaagtgagaactaatgttgctttcgtcttcttgaaacaatctccgacgcccaagccttgcctatatcagtctggaacttccctgctgttgattggaaaaactcttctagatctttcccttgctcttgttcatattccaaagcttgtagtatcagctcaactttatcgaaatctttaacaactttggcttcaggtgaagagttctcttcgtattctctccaaagctcagcgatttcttttgctctttcgcctccacccaagagtttgcacatgtgctcaagtgcttcgctttctcttcggtttttctcttctttagatatcccacaagaaggtgtaatgtctcctacaatggcttctgcaatatcatgaacaatcgccattttcatgcatttgtctctgttaacaccggggatatctgaagaaattagagccataagacccatccgatacatgtgatccgctatagattctggatctttcacatctctcttaatccatccagctcttggagttgtcttgagacgagtacagagagagaggaaatcaatggcggaagaagcggacgaagaagaagaagaagaagagggaacagccgcgacattaggaggagaagagacggaaccatctccggattgaggggaatcggaagccatgcagtgaatagctcgattaggagaagaagcaccggcggcggagtaagtgaatcggagatgagaacgagtgaaagaaggaacgaggaagacgagagatagtgatttgcagaagaagactcgattcacattcttcatctttctttttttttctttgctttatctttcttccgggggggggggggacagggagctctc

SEQ ID NO: 850 - DNA, 968 bp, Arabidopsis thaliana
  Clone ID: ARATH-23APR03-CLUSTER36676_1
ttttttttttttttttttttttttttttttttggaagtaactttcaggcccaagaaatccaaatgagccaagatattaaaagcccataccgacacaataagattgctactgtgaagtgatgccgacacactggaactgtcacttttcaaaggtaacatgtttcttgttatgtgagaaacaaagtgaaatcacattttaaaccacttaggctttgtggtcttcttctctgtggatttacgctcgtgttcaacaggtacagcactagagtcaaccgtggctggctctgatgacgattcaaccggttccacggctttggtcatggcctctaaatctttcagtgacaaaatctcttcattaagataaggagttgaactaccaccatcatctttaggttgatcgtttgaaaagtagacaatggctccaggaacaaaccccgctgagtagaagtcttgtgagaaatcttttatctgtttcttgggaggagttgtatacaagtagaaaggaacatctgggtgggcaactactcttttgacaagatcaatcaagccttggatcttttctgatggatgaaatgttgcctccaatgtgtgattatcaggaaaacgaacccggattaccgccttagtgagctttgatcgacgagcagcttcttctgcttcccggatttttcttgtcttcaacgatttatcttctttcttagtagccaaaaggcggtaaaaatctgcaggtgtgaactcgtagaaatcatcagattcatcgtcagcactagaaacttgacttggtctctgtgagatactcgaagtctcgaaaacacgaacctctcgccctaatttctctcgcatatcagcaattttagcctgagctgaagaagaagcttccatggaatcggtgatctcgagtcgtctgcgtttcaaggtgtgtagagaagggtcatcaacaaacatcagacccggttcaagttattcttt

SEQ ID NO: 851 - DNA, 884 bp, Arabidopsis thaliana
  Clone ID: ARATH-23APR03-CLUSTER368_1
atgagctctaacaacaaaactgatgattccgacgaccgttctttctggcaaaactcgacttcttacgatgccagcagcaagattttcctcgtcaccaccgtttccttctctattattatcatcatcgtgttcgtttattatctctacgcaaaattcgttctccaccgtagatcagccttccaagacctctccttctctgtcgtttctcagccgccaaaacgtggcctcgattctctagtcatcgcttctctcccaacgttcgtggttggaatcaagaatgacgtggcgggtacggaatgtgcggtttgtctaagcttattggaggagaaagataatgcaaggatgttaccgaactgcaaacacgtgttccacgtgtcttgcgttgacacgtggctcaccacgcagtccacttgtcccgtttgtcgaactgaagccgagccaagtcatccaaggcttgagcctgagcctagggaagggccagttggcgactttgcaccgccgttagatttcgcgggggttgccacgcgtccgggcggatcatcggtttcgaggttagactcgttccggaggattttgacaagggaaagatcttcgaacaggcgggatcattctcgcgttgaccaagatcgtgaattggatattgaaagacagtgaattcagtatatagtatatacacacatacgccggttaaaaaaaaaaaagtataaacacacatgcatccataattaatccttaattcatgaaccataatacttcttcttccttttaactttttattcttgtactgaaatcttttgtatgtgtaaatatgaatggcacactttttgtatgttacagtaattacaaaaacattgttgcttaaaaaacgagggggggcccggtac

SEQ ID NO: 852 - DNA, 796 bp, Arabidopsis thaliana
  Clone ID: ARATH-23APR03-CLUSTER36908_1
atcgtattaatagtttagtcaaccgacgccgtgataaagtgtgttcacggtgatgctgcagaaacaggtctcgacgacgacgacgatgacgacacaggagctagcgatggaaggagagaagcaattggaagaaactattgaagcggcgtttcagataatttcagccatgaatgatgagctttgtaatccgtctttgtggtctacttcagctaccccgagttccgccgcgacgacgacgggttctaatggttcggctctcgtttccgccgatgcggctgcgattgatggaacatcgcatcattcggaatctgctggtggtggcgggggcggaggaagtggaaatagtgttttggatgaggcgagtcttcggtataagaactcagtgacttcgcttcgtgctgttcttgctgcgattccaaattcgcagaaggcaaaagcatctgaaatgcaaaatggtttaggatctcctgaaagtgaagacgagatcgaaaaattggaggagcaagccttaagtctcagaatggagattgcaaagaagaatgttcatgtcaaagaacttatagataaacttcgggaacttatagcagatatctctacatggcaaagcccttgttctgtttgagtttgatttttttgacaatagtgagatcagtttagacaaagattctaagccttgttcttgaattactccatgtattagttttagatatttgttattttgatatcatgaagccaaaatataatcaaaaatgacttttgtatataaaaatatttcaggcaaaaaaaaaaaaaaaaa

SEQ ID NO: 853 - DNA, 1715 bp, Arabidopsis thaliana
  Clone ID: ARATH-23APR03-CLUSTER37007_1
atggctgttgttgcttctgctcctgggaaagttttgatgactggaggctaccttgtactcgagaagccaaatgcagggcttgtgttgagtacaaatgcacggttttacgcgattgtgaagccaatcaacgaagaagtcaagcctgaaagttgggcatggaaatggacagatgtcaaattaacatcaccacagctctcgagagaaagcatgtataaactgtcactgaatcatttgactcttcagtctgtgtctgcaagtgattcaagaaacccctttgtagagcatgcgatacagtatgctatagctgctgctcatttggcaaccgagaaggacaaagaatcattgcacaaactcttattgcaaggtcttgatataacaatattaggctccaatgacttttactcatatcggaaccagatagaatcggctgggcttccattgacaccagaatcgctgggtacccttgcaccgtttgcatcaatcacattcaatgctgcggagtcaaatggtgctaattccaagcctgaagtagcaaaaactggcttaggttcttctgcagcaatgacaacagctgtggttgcagctctgttacattatcttggagtggttgacctatctgatccatgtaaagaaggaaagtttggctgttctgatctagatgttatccatatgatagcacaaacgtctcattgtcttgcacaagggaaggtcggaagtgggtttgatgtcagctgtgctgacgcgtggggtcagcgttatgttcgcttctctccagaagtcttgtcatttgctcaggttgcagtaacaggtctgccattaaatgaagttattggtacaattttgaagggaaaatgggacaataagagaactgagttctctttaccaccactgatgaatcttttccttggagaacctggaagtggtggatcctccacaccatcaatggtaggtgcagtaaagaagtggcaaatgtctgatccagagaaggcacgagaaaactggcagaatttgtcagatgcaaatttagaactggaaactaagctaaacgatctgagcaaattagctaaagaccactgggatgtttatctacgagtcattaagtcttgtagtgtgcttacttctgaaaagtgggtgttacatgctactgaaccaatcaacgaagccattattaaagaactcttagaggcaagagaagctatgttgaggatcagaattcttatgcgtcagatgggtgaggcggctagcgttccgatagagcctgaatctcaaactcaacttttggattctacaatgagtgctgaaggagttctacttgctggtgttcctggagctggtggatttgatgccatatttgcaatcactttaggggattccggcaccaaactgacccaggcatggagttcgcacaatgttttggccttgttggtgagagaagatccacatggcgtttgcctagaaagtggtgatccacgaaccacatgtattacttcaggcgtttcatcaattcaccttgagtaaacaacattgtttcagtgtccaattattaggtgcgtcaccaagttcggttgagtatactgttttgcatatagacttgggtgctaaatttcttggtgtaagcatttttatacccattgtaaggtctttaactcttggaaaacttgcgggaaaataaaataaagttgatttcaaatcaaagaaaaaaaaacaatataact

SEQ ID NO: 854 - DNA, 1765 bp, Arabidopsis thaliana
  Clone ID: ARATH-23APR03-CLUSTER37133_1
atggacgagttgcttcctgatagacacgatgattatcatatgatgttgaggttcttgaaagcgaggaaatttgatgttgagaaagctaaacaaatgtgggcgcatatgattcaatggaggaaagagtttggtactgacactattattcaggattttgatttcgaagagattaatgaagttttgaaacattacccacaatgttatcacggtgttgacaaagaaggtagacctatttacattgaaaggctagggaaagttgatcctaacagactcatgcaagttacaagcatggatcgatatgtaagatatcatgtaaaggagtttgagaggagctttatgatcaagtttccttcctgcactatttctgcaaagaggcatattgattcaagtacaactattcttgatgttcaaggagtgggattgaaaaactttaacaagtctgctcgagatcttatcacacgattacaaaagattgatggagacaattatcctgagactctccaccaaatgtttattatcaatgcagggcctggatttaggctactctggaacactgtcaagagctttcttgaccctaagacatctgctaaaattcatgtactcggatacaagtatctaagcaaattgcttgaagtcattgatgtcaacgagttgcctgagttcttgggaggtgcatgtacttgcgcagatcaaggcggttgcatgctttctgacaagggaccttggaaaaacccggaaattgtgaagatggtgcttcatggaggagcacatcgagcgaggcaggtggtgaaagtgttgaacagcgaagggaaagtcattgcttatgcaaaaccttcatatacatagataaagggaagtgacacatccactgcagagtcaggatctgacgctgaagatatcggttctccgaaggctataaagagtttctctcatctccgcttgacacctgttcgtgaggaggcaaagatagctggtgaaacaagcttggctggtagttttccgggttatgacgagtatgtacctatggtggacaaagccgttgacgccacctggaaggtgaaacccgccatccagagagttgcctcaagaggagctttaatgtctcccaccgttccaaaagatcatgaaggcatcaaggctcgagtcctagtaatgttcatggcattcttgatggcggttttcacattcttccgcactgtaacaaagaaacttccagcgactactacttcttccccagcagaaacccaaggaaacgcaatagaacttggttctaacggtgaaggagttaaagaggagtgtcgtcctccttctcctgtaccagacctcacggaaactgatctactaaactgtgtgacgaagaaactgacagagctggaaggtaaaatcggaacgctccaatcaaagccaaatgagatgccatacgagaaagaagaactgttaaacgcagccgtctgcagagtagacgcacttgaagcagagctcatagctactaaaaaggccctttacgaagctttgatgagacaggaagagttacttgcttacattgatcgtcaagaagaagctcagttccagaagatgaagaagaagaagaagaaacatctcttttgcttctgaagcaaagccaagaaaaaccagcaccaggcatcaaaatctccctctttcgtaattcgctgttcttaagtataaacaacaaaacaaaacaaaaactcttatatctgatttgatgttaaagctaatacagagagctctgtttccttctgtgatt

SEQ ID NO: 855 - DNA, 570 bp, Arabidopsis thaliana
  Clone ID: ARATH-23APR03-CLUSTER37282_1
ttttttttttttgcgacattagaaggtatatcttttccttttttaaatctagcaaatgaaaccccaaactcaaagagtgtacagatattcaaaagagattatacttgaaaccaaaacaattcaaattcaccaacaaaataaagaacataggtgttttacaacataaagattcatgatggtgaatggtcaagagtcacggccgcatcggtaatgcttagagcagcctctactataagggttagacggtggaggaagacattgagttgagtaagactcgcctcgtttaccaccatcgcaagcaggctgattcctcctcaaagctccatacgaaagcttatgtgcctgctcctccgtcaacctctggcttgaccaagactccattatcacactcatttcctctgtctccaccatgctgctgcactccgccacagatccattgcacagagatgatgatgatgccttggaggtgacgtgtgctagtagaaggcagagaaagaagatggtgatggtggagaatatcctagagggttttatctccattttgtaagtgtcttaaagagagaagaagag

SEQ ID NO: 856 - DNA, 1215 bp, Arabidopsis thaliana
  Clone ID: ARATH-23APR03-CLUSTER37337_1
tttttttttttttttttggttaagcatcattgaatttatgatttgtctatattcaaatataatacattctctttgattaaattcagagtaaaattttgaactctgaaaataaacaaaggatcgatctatattaaaaggttttaaataatacaaatcactcctaaaaccacattgtattctcgacatgatcatgaatgacaaatacactaactctgtgtccagcttgttttgttccctccagcctaacaccttcgatttcaactcttctaaagcttttttgcatcatgttatagtaataacaacacaatggcgtattcattaaaattacacatacgttgaacaacaaatatcaggaaacattacaggaaacattcttttatcttcttagtttcgtcttctaactcttgataaactacataattccctagctatattaatgcacacatttatcttacatttccctttaccaattgacgtaacaagacatgagttacaacatctcacacccaaatgggagtaaaacaaggttttaatttaccgggtttggtccaaaagagttcccataagtctggaagaacgaagctgccgcccagaacaaccgtatcagcagaatcaccgtaaacacagttcctcctagattgcatattacctcaagaaatgctcttgtaatggaaagtgaacctaataacaatatcccatctactgcaaaagacacgagtcgaggagacatggcagctggcaaaatccgtcgcgatgcttttttagctcgtttcgagactttcttgaacatgcttctcaagaatctgatcaaaagatcgacactgctttctctttcgtcttcttcatcatcatcgtcgctaaatccgtcgtcatcgggaacaacatcgtaattgtcaccaccgccgaagaatctatcgtctgattcgtatcgcctacgcgactaaggataaagagattgagtaaattcggattggcgtcgggattacacaattctatgagtaggagataatcagaacgtacgtgggagctagacgaagcgagtgagcgatttaggcggcggaatcggcggcggaggaatatagagttagaagagaagggagttacagagacaaatctgtgtgaggcattgatgagagattattatggtgttgttgaagatgatgataaggttgttgtagctgcggccatttgtgagcagagagagtaacaccagat

SEQ ID NO: 857 - DNA, 532 bp, Arabidopsis thaliana
  unsure (1)..(532): unsure at all n locations
  Clone ID: ARATH-23APR03-CLUSTER37339_1
ttnttttttgtttttttttcagtaacaagtcataccatttcatgatcaatcatcattttgattcatatttttattgaaaccaagtaatacaactgtgaacatgtgacaatttagactggttttgaagaacacgtctattgctttctgtctgctgcttcaaggcagagtataagctccacatttgtaaccgacgggacgattagcgatgttgcagcgtttaggaatagtcatcgagatctctggctttgctccggagctcctagctgtggaagaaagcatgacagcacaaaggcattttggattctgccccatctgtttcactcgagcacagcaaattgctgacactttagcagatgtgtcttgtgcagccattgcacaaggagccaactttatggcttctctgtctggaggatttctcccacattctccagccccataaaccatggttttaaggctgtagatgcagagaactaggaggaaaatgcgagataaaacatgggtttccattcttgagtgatgagttgatgcatat

SEQ ID NO: 858 - DNA, 1591 bp, Arabidopsis thaliana
  unsure (1)..(1591): unsure at all n locations
  Clone ID: ARATH-23APR03-CLUSTER37354_1
gggttttncanngaccccccccttttggttttttnntnaaggttnccantngncctngntaaaaannnttnnnaanntncngatttncnaaatnacnntcanttccntcccctnaggnggcacttgggaagngnnngnnggctttnctatncccactgnnaaangggnttncncaagcgataaattggtacncagggtttcccngtccnacnttnaaaacnccggccannnantgtaaacgccccctataggnnaattgggcccgggccccccncnaaggtnnnnnnnnnnnnnantccnnnnaaacgcgaaccaaaaaaaatcaccccccccccgatgagaaattttacctttagatttgatttggttaattgacagaagcaaaaagtgctgaaaagagttacaattcttgagatcaaaacatccaccctaaaatgatttctaacgaatacaactcatcacattcatggagttgaaccctttatcaagtgtggtcaactcaagacagttaaagacgctcaccttgctcacgagcaatagaagccgagaggattccaagatctcgattgagaacagttaatgcagcttcacagtcggatacgattctggttacagaggatggctctccagcaactgtccccgaggatccaatcgaaagtgctgcatgtgagtctcttaggttcttcaagttccctaggaactttaaaagcatattatatgcttctagtaaacggtttgcagcaggaccaaaaccatgaagctgaggcacttccatcatatgcgtccatggacgaatttcctttgtgtagattgtattgaatgccctagctgtttcaagaaacgattctaaacgagcccttagttgagattccacttcagtatattcttcatctgggttgtaagcatgctttgctgccaagtcatcgactttctgttgaagattagagagaatcttggcctgttctgaaagttttgtctccagttctgaaacatctggtaatggatatatcgactggatctgcacatcagcagggaacagtttgcattcctcagaaaatataagagactgtctctctgcaatagcatctatgagctgaatatctttggcaacttgctcatcaatactccattcttgattatctgagaagaggctcgcctccactaaatcaacaatattgcgaagcatttccatccgatcttcataggttccatgtccttgaatggcttcaatgtctacagttggtgtaatccccaaaaactttgcaatctctgccaaatattgaatacgaacagtttcttcatcacgaactccagcatctccttggagattttgctgtgagaaaggtgatttatcacctaataacttgaaaaagagccattcgagaagagcataacgttccatcccggcgaagaggagagactgagctggagcatttgccctagggtaacttagcagccctagcttcttctgtatctcttccatttgcttcgccgccattttcctatccaactgattctggcgacggcttcaacaccgattctaatctcgagatctgacactagtctcgtcttcttctctcaaaaacttttt

SEQ ID NO: 859 - DNA, 1378 bp, Arabidopsis thaliana
  unsure (1)..(1378): unsure at all n locations
  Clone ID: ARATH-23APR03-CLUSTER37438_2
aactcatttcccccctccagttccaactttattgtgtttaaacatttgtaccaataatctatcttctctttttcttcatgctgtctctgaagccgcgtggtttacatatattgaatctactttgtatctccttacacagcttcaggaccgtcttgcggtagaatgaattgacgcattggccttggcgacttggtacactcgtggcgtctgagagtgagtgggatcccttcttgctcaaacccattactatcttccaattgtttaggaaggcgaagagccaaatttcccaaggacgaagaaccatcaaccatatcctttgttttgtgaagcaaaaaggttcctgaaaggattgtcacaaacccacacaactccntcactatctgagttccgtcctgtcgatcccagtccttaaacatgatgacactagctaggatggtcaatgatgtgaacataacatagtatataggtgaaactacagccgtgttgaaagtgtcaagcgccttgtttagatagttcatttgggttatcacgcangtgagaactatcagcgtgaagacccatgtctgagggtaaattaactgattcattcctgaanacgtangctttaatgctatcccgagcgctttgacgctcatgaccgacnatgatccaacaagagaacaaacccccgattataccatgacatgtgacntgaccgtactgtggtacaactgaactatgagtatnatggctgctcctactactgctgcagcgtaagnaagaaaagcaggttctgtcgcangattccatacttgtacacagaaacaatctcttggttcttgangagcatggtagaaacatagtttcgaaccnacnacacatanaacacacccagaagcccgaaagtatgcaacttttcgtgtaggatgacatgagcaagagcagcactgataattatgctgagagcaccaagaggagttactaaaatggcaggcgcaaaggcataagcagcaaaattggcaatttcccctacaatcactttaaatatgaagggaactcactcgttatcatgcctacccaccagagaggctcaagcaggtaagaataacctccagaacctgctctgagaccagaagcaccagctctcttgagacctttcttcttaacaatgaaactagcaccaatgaataagcttgaagataaagccaatactaaaccctttatattatccgatgacattcctttatacgcatctctccaactcccactcaaactcgccatgcttttctacaatacacttaacccctaaatacccagaagaaaaaaaccgagctttaggcttgaatcaggcgattgggagagaaaagacaaaaactttttcagatcttgggtttgtcct

SEQ ID NO: 860 - DNA, 2105 bp, Arabidopsis thaliana
  Clone ID: ARATH-23APR03-CLUSTER37440_1
acggtgatctgcccatgctctcgtatcggaggctgaggctctcgtggtcagccccagtaccccggagggggtctagccgaccgtaccatcggctgagaccctcgtggttttttttttttttttcacaaaaaaggatttgtttgcactgatccaacgtggaatatcattgttacatatctacaggccaactaagaacacaatcgttttcctctctgcaatttctcacaaaacaaaattaatggctgagagagaagtgctcattacttcttctgagcttttcacttcgtacttgaaactagaagaaccctcttcccaaaaccagaagaaagaacacgaaaacttagtccatcaagaatgctccgctgcaatacctgttgctgaatcttccaacagcgtctgtggtatcaagaagagtgtcgctgcctttctccaaagccatgtaaagctctttgcctctggtcacacgggcgatcacccacacattgttcttagctctgatgcatatttccatgtctttctcctgtccttttgcacggcttttttctgaatccacttcttctctaagcttgtttagtgcaagtagagactcctttgcaagtgttgttacttttcctgaaggagaagatctggatactttcgtgtcattatcaactactaagtaacggtaacccttaatatggtaagcattctcaccgccccaccctcttgaaatattctcttcaattttcaaaattctcagtgatgcatcttcaataacttgctgtttcacggctgagatgcttaaatctccattgacaatggcatttgtaggcatcagaagaagtaaggtgagacttttatgctgataggcaaggagatacattctttcttgtgtctgctgaagccaaattgtagggatggcagaatcaggggagccgccagtctcaagaccccaaatatcggttattagaaacccatctttcccttttgtccacttatcattttgtagtggcctaataacatgatgcatgttattaccgtttcttgagtgtagggaatcaattgagccaacgggtgccagattagatctagaagagatttcagatgaaccaggccctttacgtagatatgaccaagaactcgtatcagaggagaaagcttttgaggtcaacctcattaccgcaaatgtaaacaagtcgacggtatcatcagctgagagggttgttgaaaccaaaagatcttgaaataagatcatagagtgacatcgtaagctcccagcacatgaatctagtacttgaacaagagactgaacttcaactgcagtgtcccttgctaaagtaagcatttgaacagttccacgctctctcaaagtttcacggaaagttggtagctgaagtttcttcccaacaaaaaattcacagcagcagtcttccgagagagaccatatttgaaatgtgcttaaataatctgtgatgaacgggtacaatagtgatcgggtaagccctcctgttggttctttttcgattaatgccctaattgacccgtgaaacatcacaaagagtgagtgcacttctttaagcaccctccttaatgcatcgatcctccatatcgctcctgtctccttatttttctccacaaccataaccatccagatatcaggttcagcctcatagaaaacatgggaatgtctttctgcttcgatcacttcacaagccgcctccggagagaaaagtctagtaaaagtaataagcccttcactgagcccgatcactgataactgcgtcgagaagtctaaatcggcaggataaaagaacaaaattttctctaactcttgtccttcagtttgacctctcctcaaatcaaacatgcaaagtcgaaggctttcatcaccagagctcatggacgccatttctggtagcttctacgagctcattaatacccttgaggacgaattcaaagagcaatgtcgaaggagtgatcaatctcctggtactgagagatagttcaccgatcggagatagattcaagaacagaagagtcaacttcaatttctaaacgcaaactcgaatttgagcgattgagctgaaatcagtagaagaattacgcgacattttgtgacaaggatc

SEQ ID NO: 861 - DNA, 1091 bp, Arabidopsis thaliana
  Clone ID: ARATH-23APR03-CLUSTER37481_1
ttttttttttttttttttgtgaactatatattatacatcataaaccattcacatttacattgtttacaaaaatatctacaaataacaaaccaccaggagatatcttacatcaaaacttcaccattgggacaatatgtacatctttttagactggtcattaccgaggatagatatctatatatatatctaggccaaaccaaaaaaatcctgaagaatattgattatatcacaaactggaattgatacttcacttcaatgcccttgttcattgattatgtagttcactgagtaatgtcctgagaagccaatctttcagaaacatctgctagtgacttgagattacatctgataagtgcttcaacaaagtagcaagtctcatcctttgtgttaccttgaggaacatcaactacaaacgattcaatcaccatcgttcctgctcttccctcgattatctccggatgaaccgtcaaaatcgacgagtaattcttaagtctgtgatcaccaccgatgattttgataccgaggatgtgttcttcatcatcaagaagttctaatctctcagtagatgttgttgcaggaagaccagatttaacattgacttctctaagactgccgatttcaggatcaccgattactgtacatctgctcacaaacggtttgtatttctgcggttgatcaaatctccgtacaagtgaccaaacgagatgaagaggagctttgatgtgtttgacaagagcagaggtacactggttttctctgcacagatgttgatgatgcgtccgtacgtattgcaccgtctcgagaccaccgtacatcgccgtgccgtcttcaacgccgtccatcatatctctctctctctctctctctttcgttcttcgttgttatctcccgcgggcgttcctctcgacttggtttagagcgacatggggggagagggagaggctgcgttaggccaaggcaagctttgtgtttggaacttgagtttatggagttgaaaatggaggcaagattgctggagaaaccaagagagaaagagagagagagagagagtagtaatgatttgtttggaatttaggttttatgggcaatgt

SEQ ID NO: 862 - DNA, 714 bp, Arabidopsis thaliana
  Clone ID: ARATH-23APR03-CLUSTER37495_1
tttttttttttttttgggaaggaagattcacattttattgaataagaccctgcaattatacatataagcttcaatgcttgaacaaggtttctaaaagcaaaagtagatacaaaaaaggatggttcatcacaattcaagaacttgttcatttctcaggaaagattgggtcaatgaaagagtgatacataggatcagatctccaaagaagagccatgtgaagatgagaaggagtgagtcgatgaatctcttcaacaagccagatagtagcttcagctttagtaggatgaatgatagaatccaacctctgttcttcagaatcagtaccgaatcgtgattgatcccatcgttgtaagagaacattcgtgaggtaatgtagaggctgaccataaagctgtttcattgaaatgcttaatccaacccagcttgtgaacggaatcaacgagccacgattcgtcgggattggtacttgcttcatgtagtcttgatacatctctgctcttctcagcaacgaaccttcatcagcgacgtctctgtgagaagtatcgagcggtgaaaagccatcgctgatctcagcatcgacgtcagatgaaccggaatcacctgatggtcgtagttccattgtcattgagctttgcatggtcactgtcgagcagttagattttgacggcgtagaaagcagaaaggtacgaagacgatgaccacacaaggttcctt

SEQ ID NO: 863 - DNA, 1984 bp, Arabidopsis thaliana
  Clone ID: ARATH-23APR03-CLUSTER37501_1
tttttttttttttttttaaacaaacaaatcaaaacaataccacattaaacgacttaattttaattaatgtattcaagaaaaattagcataataaagtaacgacaaaatacagaggcgtagatatagaaggcaaaagccatacaagagcatgaagtaagcttttgaataacaattttgcagattaagaatacaaaagcacaagacaatgctggagatttagcattttcgtcgcatctttactctaagtgagacttctctgtatgattggactttctctgcggcatgtctcgatggtcttcccacagatgatcttcttgtcatcccttcgttttcatcagctttaggcttatcctttgattctgtttcctgatcacactcttgaactatggtgttgaccaaagatgggtctgtcgctatttctttaatggcttcatcggtttgagatttaccctttgttgattgtcttctcgttgagaaactgcgtttccgggttatctcttttgtttcatgcctgctttcggatggttctacagattccgatcttgatccagcagattcttcgattactatgcttcttgcatcgtcagcattcgaggtttcagtcacatgcggttcttgtatatcaaaccttgcagacagtcttaaagagactcttctcctcttgattgtctccctgacttcgtctccctcatgtaagcttttacatggttcagcttcttcgtgccttaaccgagcagaccgtcttctcaaagagaagcttgcggtttctttactttctttggcaccatccatctcaagcaacttttccgtttgtttagtttcttgaacatcaaatctggtagattgccttcgtgtacattgcctcttgcgatgcacactctcttttaccgggtttgctgcatcaggaacaaacttcttgttgacaacattgtcaatatcttggtttacccctcgagagacaacccccttatcaatgtcatcttcagtctgacagatctcttcgggaataccagtagtatctattactccagaaactcttttacggttagctttactgttagaatcattcacaggtattggcttgacgtcggcacttactgaagattttatccttgttgttcgctttctcttggtatctttatgttttatgtcatgcacctgaaaggatttgcaatccccatcagaagcgcttgctgaaaccttgtctttcgattcatgatgtgtacgtggaagtacttgctcctcaagatgtttcttgactttaagtaaagcattcttgcagccaagttcatgctggagatccttgagtctgtctctatttgtattgagttccgctaacatctgactgtttgcctgagcaagctgcaaattcttttcctgcacactccgtaagttaatcctcagtttctgaatctcaataccgctcaactcgacgagtttatttcggtgtgctagagctttcatcagtgtcatgttttccttttgaagctttgcagcatattcctgggaagagaatagcatattttccttctgctgcgtctcttctttatccatttgttttacattatcctgcaagttgctatcgattagcaacagcggcagggaatgggaaagatttgttggttcatgtatgaatattgttcaccttttgggaacctaaaaccctattagagtagtcaaggctcatttcagttagcaccatcctttgattggggactcagtaaacacgatagtgagaatcgtactctctcctagcttcagaacctttcaaaattcggaagaaaatggaagtcaacaatgtatcaccgtcgtcaccggaatctcttcgattatctcttcaagcaaatcgaagccaatgaaatcaagctttcagatagactcacagcctttaatttcatacagatgtggtgctggggatccaacggaatcgactgctcatctcccaaaccctagattctcactctatcgaagaagacggaaagat

SEQ ID NO: 864 - DNA, 1899 bp, Arabidopsis thaliana
  Clone ID: ARATH-23APR03-CLUSTER37513_1
tttttttttttttttttggtttgactaaaccatcacttttaaaccgaaaaatatcaattacgttttaattaaaccgaaaataagataatcgatgggatcattcatccattggcattaggtgtttaaactcctaaccctaagccaggtgggacatttaaatcatgcggatgggtcactaagactatgaagagagtggtatagctaaaggtattcacagaatctattcacaccatctgaatttattgtcgtcctcgctcttcctccgtgtgttgttcttcaagaattgtcccactgcttctttgttaatcttgaacacaaaggttattcctctaatattgattgaactacacgatgtgagggttacaatctggcctctatcgagttttccgccatttacaaggatatgttgctttccaaggttctttagagagaatgatccgtagttctctagcttaaccaatgcctgacgccgagatatcttgctcccataattatatttacccaagtcaatgtcaacattcaggccaccagatgatctcccaataattacctcgcgttttctgacaaaatgctttgaatcaggacaatgcaggacggcaattgccccatgaaacataattgctctttgcattgaagttcttgtgcattgttccaatccaattaatgcatgtcttgggtgcttagacatgttccattcttccctgttgaagcatgaatctgaatcatctgggactagattcaatttgcggatcattgcatcaatgtcaatctcttcttcaccatccacttcttcctgatatagagttgatgggggttgagaaagttctgcgtccctatcctcagaggtagtagcatttgcatataattgttcatccaaagaagtacaagcacctgagctatcttccattagaggtaagtttctgagtgcagctatagagcaacaaactgaccatggccttctaggtctttcaagagtttttgttaaaggtattggagagatttcaagaccaatattatcctcatgaacgttgtattcatttatacatctgtcgatctgatgacgtgaacacgtttctagcaataagctttcgcagccattaggaggaacaatgctgatcggtattggttcatcgtctttattccacagtctatgatcatcattgatgcacattatctccatagacccctgcatgttgatttcatctccacatctaacttcaattgcagatgatttgtcgccatcattcttgaaaatatcagaattgcttgggacacctgaatcttctttagaccttacatcattcttctcgttatgagtttctgaagaccacttactaaccagagttccatcatcctcactggaccatatagacaaagatttcgatccggttatcaaatcattgtcttcaggaacatgctctgatataacatcaaactctgaagattcagatatgtctgtgtcactgccacttgcgtctacaattgaaccctcatccagaggatcataaggattatccataagatttttaaaccagaaatcactttcaggtctcagacaatttcgtatatcctcatcaccatcaccaatatctgcattattatctaaatccggaaacatatcatcatcaacagacttgtgcctagatgttctctttctcatgacagagaatagactttcaactttccttttgacattggaactctctgatgtatcttcttcaccagaaattttgacatcaccaccgaagagatccttattgacgaagagatgctcagatactcgaagaccttcttccattttcaacatttagttgaggaattgaacgacccaactcggttccaagcaacggtggtgactgtttctgcccaaaatttatcgaagagaagagctaagactgc

SEQ ID NO: 865 - DNA, 1273 bp, Arabidopsis thaliana
  Clone ID: ARATH-23APR03-CLUSTER3758_1
aaatccagtttcgctcctccttgctctagctctgttatctgattcgtaaccattgatgaaatgcgagttctcgacgaaattgcagagtcaccatttctgatttcaccgctaaaccctaattcgacagccaatggatatagatgggtcgataagtgccatggattcttacataacacggttctcgttgcggcttctctcttcttcgtcgcttacttagcttacgaagcgaagaagagtctgtctaaactctcgaatcggagatcttatatcatgattgcttattatggttgtctttggcttgttagcttgctcaatcttgcttggtgctgtctccagggttgggaatgtactcctgggaaagaagttgtttggaatctgttaactttgttcacaacatctggaatgttgtttctggaagtaagcttggtggcttttctcttccaaggaaactatgcaagcggtgcagaagcattaactagaacgttcctaatctcgggttttattgttgctcttgatttgcttctcaaggcaatttttctctttggatttggagtgccattgtttattgacaacaatgaaaatggaaaaacgttcaaatggggcttatggatcattcataagcttctactcactggcgtttatgggatggtgttcttgatgtacaactctaggtggagagaaaaattgcctgcaaggcctgcattctacaactacataatcatcatgttcgccttatacagcctttacctagttgcatctgcgtttaccgcaaacaacgcgcattttggtttctggttatatgggatcatgagtgtttgctaccacgcattataccttcctcttctttacataacgttcctcgcagactttttccaggaagaagatttgaacttggagaatgtatactactcagagatgaaggatgctggatttttcgactctgattgggaataggactagggtaacaaacatcttcctcattttctcaatctgtaaatacacgttgggtaggatctcctagaagtcatggctgctttttccggctttggcgggttacattttagggtctagtcttttgtatgtctgtactttttcctcatgtttctttctcttttataaatccaaaatgtcttgtgaatctctttgttccttaagctgataatctaaaagaaagttttgtagtaataaaaaaaaaaaaaaaaaaaaagactcgtatacatttggcatttcgatcttggaaagaaaataagaaacacttagtggcaataaaaaa

SEQ ID NO: 866 - DNA, 729 bp, Arabidopsis thaliana
  Clone ID: ARATH-23APR03-CLUSTER37603_1
tttttttttttttttttgttttaaaagcaataaacaacacttaaaaagaaaccatataatccatgaatttatgatattctcatagttcaagactccatcaaagatgtcgtaagatttagatgaaacaatgaatcaacagctttagggatcgagcaaaaactcagatgattcccacttttagaaaagcttataagacgagagacttagaaacatagatgtggactaacatcaagaaagtttggagtgtggttgttcaagggaattccactccaagagcatccacacaatcgatgtacctgcaaagaagcccacagttgagagattcgcgatggtcattgtttggtgaaagaggtattcagtcagaaaatggcctaacgcatagataaatgatagaaacgtagccaagtataatggtttgttttcgaggttgaatgcacaaagaaagcagagagtgcaggtcaagagtgtcaatactccgaatgtacgtccatgaacttcactcatggtggtgtgagagaagacagcgagacgaagagcccaaatgttgaagaaaccaaaccaaacagaagctagtctcagtgaaccaaccaccattaaccaataccccaacgccttcatctccctcttcttccttcgtttactccttcctcgttatccaacaataccctaacgcatatattttccgttttaaaaccagaaaactatgagactgacaccaaaaaaaaacgt

SEQ ID NO: 867 - DNA, 1672 bp, Arabidopsis thaliana
  Clone ID: ARATH-23APR03-CLUSTER3764_1
gttttcttcgccatgcggcgattcctctcaaagctccttctcttcctggaacgagagagtgttctcccttccttaaccggttcgtcactcatcaaccggttaatttcatccggaagtttcatccttccttagatgaagcatcgttctccagacggggacgaaccactgttgttcgcgttttggagacggagaagagtacgaaaatagagaagcctgagcctccggtgaaattgatttcctcaatctgtaaaggagaagataaacccactcaaatccacctctttggtagttgtaataatcctaagcttctcactactagcttcttcttctgaaatgaaagtggggttggaggattacaattttccagtggatccaactccgacgacaaaagcttcgataaaaccaggtcctattgagcatggaactcctctcaatccttatattcctaagcctccttctccttcttcgtctcctcctccacagcaatcccaagacggtggataacaccaaatcttttctctgatttatttgccccgtgaatgtgatctacgcactgtttgtagttataattcccacgttttttttcttctttctttatctctcttttgtactaacattgtcttgtcgtcgctacgttaattaatttcctttatctgccagctcgtgtgttagataagtccagtttgtgttatgccaattcctgtgttgcaaaacttgaggtccaaaggtttttcgacgcttagttgcatggttaaaaactgtggacctcagattttgaactgtcttttggatccgaattgtcgaaaagctcttcagtgtttgaaccaatgtagtcctgtggatcaggtgtgtagctacaggtgcattgcttcttatgagggtccttactttgaagcgttctctctttgtgtactacagaagcacaattgtttagaactggatgcaaagatccctgagaagccttatgtgcctcccatgacgagttttcgagggaaggagttgtgtcatgatacagcggaagacttgtttgttgggtggttaggggaattggaatggagctggcgtgtcgtggctggacaaaacccggcttatgatcagtttccatgtcagtaccagctattctacagagggaaagggaagtcgtcgttttggtatgagcccgtgtttcaggtcaggacgctcgaagagaagttggtgtggagaaggagaagatactcggttaagcgaggaaagatccctgcaacgtttcgtttcagtgttttggacaatggtgtggtgtcaaatgagttttggactattgtggatgtatctgatgatctaagttggggactgttccattaccatggagcagcacgtgtagcaggacagtcttacaccggagctgtgcttgtgacaccggatggttcttacccggcagagaaggacaaggagagattgcagtcagcattggagaaatgtgggattaaggaatgggaactctttgctgttgataattgttcttgtgaaaacccgccgctagggattccacagggttctagacttcattcgagaatcagtatcatagaggaaccagactcggaagaaaaattcaactaattttgcactgtggtagtcactgtttttctgtaaattcatgtttgtttaagaatatcattgaatccaatattgagtt

SEQ ID NO: 868 - DNA, 874 bp, Arabidopsis thaliana
  Clone ID: ARATH-23APR03-CLUSTER37656_1
attttttctcctgttgctagataaaagagatttatacacataatatatgagtcctaccacaataacttcatataagaaaaaaaataataggggttcaaaaaagagaattagtttgtctatttgaatatttgatgattattttccacttctactccatagaacaggaagctcccgtccaccttctccggcgaaactcacctgcttctcacgcgctttaatctccccacttccaagtttccggcggccgtcaccaccacctctaccgccgccaagctcgccagacctctccatgtagatacctaaaatcttctcagctatggccgaagcatcattattattctcttccataagcttcgtaatctgagaacgaggcaacctcaacctcacactcgtatgtccaggcccaagctcaggcccaaacccatctccaccgtcagatcttccgattgtgacgtcagaaaccgttctccgagacaacatcaacatatctaaccgctcctttgcgccaacgtggataccagacatcactctccggtacggtagcttattttctgtatccaccgccgtcgtctccggtggaagcttaggaagctcgacgagaaaataagtctttttcggcttcaaggtttggttcggttcaagcggcttagagcgaactccaaagtgtttaacggcttgagaatctaacaaaacgtaaccgggataatccgcggtgacttctctcgccgtcaccggagttttaattcggaaagtttcgccgtcgatcttcattactttagctctttttctcttcacagtaatgctgtttcccatttttttttcttcgctttgctttttttttttttttcccacgcgtccgtgataatgtgaaaat

SEQ ID NO: 869 - DNA, 844 bp, Arabidopsis thaliana
  unsure (1)..(844): unsure at all n locations
  Clone ID: ARATH-23APR03-CLUSTER37694_1
nnacgcngcntgttttcaccanatataaaggtgtacatttcncntntcncccataaagcgtgngcatatnnnttnaannggcgtacgnacgngnctntttcnncatattactcccanntggcgnaaangggaatnnagtcngcaaggcgcattaagttgggcaccacccagggtttttcncannnacagacggttntaaanaannggccagtnnatttgnnaananattcactatanggcnnattgggnaccngggcccccccctagaggatttttttgtttttttttggacgaggaaaagaaattaaattatccattgttaataaaatggaacaagattcatggccataccattggctctacatcagggaaatattcattataaagccattacgccgaatgaaaagtattcaagttttggagatacaaagatatttcagaatcagccacccctagcttctcttctagctgcgtcgtgaagcaaatcaacatcgactccatctttaggtaactgcacgtaccttaccacagatcctctgatgaaacagtttctcactgaaagcatgtgagggtacttgtcctggtcaacaaccctagtgttctcgagcttgatattcagatactgatcaactgagtgaagagttcctcttatggctaaatcattcttcagctcaaccgtcacttcttgtccaaccaaatccttgaagtaagaaaagaacaacatttttgtttcctgctgatttctacctctgctcgcaattcaacaaagaagctgaaaaagctttgcgggatttgaggactttagaacttctctctctcgagtaaagaatgtatgtcccctaat

SEQ ID NO: 870 - DNA, 1869 bp, Arabidopsis thaliana
  Clone ID: ARATH-23APR03-CLUSTER3773_1
gggggtcatacaataaaaattgtgtttcttttttgccctaaaccaaaaatttcatctctcttttccctcttcccgtctctatctctctgagaagcgttttttcggtggagagaaagagagatttgactctgtcaagttattagtacattgaggtcgggctgtcaaaacttgacagcccgagtttgaagcttccaggactctttttctattaatgagattggtatgctagatttggagtgtattggattagattgtggcgatcatgggttctttgtctgggatcattcaacggccacttgttgctgctgctgctgtgattacagcttctgtgtctgcagatgtctctgagaggttctcatctcttagatcactagttcgaggttctgaatcagagcagattgctccttcagtgtctgatttagttcaggaagaaaggtccttgtgggtttctcaagtctcggcctccaagcttgcagatttatcttttgtgtcgaggatttgtgttcctgtaccaaatgttgatctcctagcttctaatcctagctgtagtctcgctacttctgttacttctctgtccgctcttcgtagtgtttatcagtctgcagagttggctaaagcatcgaaaccggttgcattcacaatcggtgcctcacttgtggttcctgatatttcctacagatggcatttacctgagcctagggcagtcgatatgtctggttcttcgagttgtgtgtctgaaaagaatagaactgttgtggttttgcttggatggcttggatcaaagcagaagcatctgaagaaatatgctgattggtacacttcaaagggttaccatgtcattacatttactcttccgatgaatgagattatgagttatcaagttggagggaaagcagagaagaacatcgagtcgctggttaatcacttggctgattggttggatgaagagcaaaagaaaaatctcgtctttcacaccttcagcaacaccgggtggttaacatatggagccattttggaaaagtttcagaagcaagattcatcattgatgggaagagttaaaggttgcatagtggactcagctcctgttgctgctgcagatcctacggtatgggcatcaggtttctcagctgcgttcttgaagaaaagcagtgtagccactaaaggatctgcgagctcatcatatgagtcaaacggtataaacatctcccagcctaaacccgctgcaacagaaacagctttgcttttggttcttgaaaagttctttgcggtgattctaaatcttcccaaagtaaacaggagacttgccgatgttcttgacacattatcaacagcacaaccaagttgtccacagttatacatttacagctctgcagacagagttataccggtggaacaagttgaatcattcattgtagagcagaggaaagcaggacatgaggtccgtgcttgcaacttcatatcttcacctcatgtagaccatttccggagtaacccagaactgtatacagctgagctcaaccatttcatgaacaactttgtcctttcttgctgccaccattcttcatagcgacttccacaagtgttgttgttgctaaccatttttggggtccttttaactcttatacaagaaagagaaaaatagttactgattgatgattctttttggtttggattggtttatagattcaaattcattattcctttgtaaattgttggatattgtacatttaggagaatgaagattcaagaaagtgacgtccttgtcctttgtagtggagatttggatcttatggttgtcttttgttatttgttcaaagagggttgttaagaacccaatcataaagtttttgccaaaaaaaaaaaaaaaaa

SEQ ID NO: 871 - DNA, 1107 bp, Arabidopsis thaliana
  Clone ID: ARATH-23APR03-CLUSTER37740_1
acctttttttttttttttttgcttaaagatatagaatgttactaattttccatgtctacaagtttctgtgtctcaagcattcaactttagctaagtcatcaagttacaaccagaagagacactaaagtaaaaatgttgaacagagtgtctctgtttaacctaaacgcaaataacaaaactgtctagatgcatctcactaccatgctaatgctcagaacggtgtctaatcctcagcttctgcaaccaggatagaaatagtcgataccattttccttgatcctgaattgaaaattctgcaacttgttcctcgagcttcctctacctgagttgcttatccctttgttcagaacagtcaattggccatgtacatcatttgctaaaccagaggctaaaggctctgcctttatcacaacatctgcaaggcataccatctgtagcaaaaatgcaggtctctccatgctcgcgtatatatcttcatgattgaggatgaccaatgaacaattgctttcagaacttaatgtgtggcaataatgcaagaagtccaatacgtgatctgagttgctgccggtagtagcaatttccagcagagacatgtcatccaccataacagttatgttaccacttgttacactctgtagctttcgaacggtttcttgtatctcccgaaatagtttcgcaactgcactcacattgtcttccatttgatccccatctgaacacttaaccatgagcatgtcaaagaacaccaatcgattattcgacttatgggtagctaaattacatcccagtttacgcaagattcgatcataatgagagaaagggcgagcaaaagcgagaaagataagtgcgtcggaggagttagaggagagaacacgtttcattagctggtgaagtacaaaggaaccactcgtctctacacagtcttctattagtattacttttccatttagtggcgatggaatagctagctgctcatcgaaccctaaggctaaatcgaggagattcaaagaacgatccatggagaaatttggacggagaagaagaaaaaacgaaggcttgagagtacaaaggagaggagattttaggtttttgcgaaaagaagacttt

SEQ ID NO: 872 - DNA, 1322 bp, Arabidopsis thaliana
  Clone ID: ARATH-23APR03-CLUSTER37749_1
tttttttttttttttttggcctataaactttattctttttagtagaaaaataaataatttatacaattactaattaatttcctcaaacttaaacatgggctacaacaaaaaattagtgaaaaaggggaaaaaactaaataaaacttcaaaaatggagaagataataataatacgggaattaaattagcaatggaaacccaagacggaaccatcggcaatagagacggtgactcgacaatccgatttagcaaccacgtgatgtgtgaacacgtgcagcactttgacccgacccgctaactccatcttcgactctatctccattgttggtccgacccgattcccatacccgaaacccggattcgcatatccatctcctagcgttggccccgtccctcctccgccgaatggcgtacccggaaatcccggcggacctccgattccaggaaaccccggtggacccatgcttctcgggttacccgacccgggattacctggaaaaaccggtggatttgggtttctcggaatcaccggagtacctggatttctcggtggatttattggaaattccggcgagcctggatttctcggtataatcggagctcctgggtttcctggaaactccggcgagcctggatttctcgggaaactcggaggacccggattcccagaaaaatccggtgaacctggatttcccggtaaatccggcgattctggatatcctggaaaatacggtgaatctgggtttcttggagttacagtgaaatccggtggaccgggaataatcggagagtctggaataacggcggcagagacggtggagatagcggaggaggaaggaggagaaatagggaaagaatgaacggtaaaagtggcggccatgtattgaatccgacccgaatcaattttaccggcgggtatgaacataaacccgacttgattacccgaataaagaagctgaatagagctgtcgtaatgagagaaaacggcacggttagggtttctaacggcgacgtactgagagaaggagaagttagcggtattgtttgagacggcgaatgaggggagttggacggcgttaacggagatcttggggtcttttggtttgaagactgtgaagtaaacgacaaggagaacaacgagtaagatgagtaagaagacggtggcgacggcgcaagaagctaaattagttctgccggaagaacggcgacgatcgtgaggcttggccattgtcgagatcgaagagtgtttggagacgacgatagcgttgaaaccgagacactgtgagagtgtgagtgagaaagtagagtagagagggtacagtc

SEQ ID NO: 873 - DNA, 1455 bp, Arabidopsis thaliana
  Clone ID: ARATH-23APR03-CLUSTER3775_1
gaactcactagtcccccccccccccccccccgctctctctcactacgttctcgggctccaaacgtatgaaccagaacaaagccttttagatagttccgtctgcgaaccctaaaatcattcaataaacttcgaacaaaaacgaatgcttttgttcaatcatcttctcagtttctgattccgaagaaaccctaatcaaataaatcatggactgctcatgcagtactcgtccttcgtctctgcttatctcttccgaaccatcttttcgctttcctcactctaatttctcctcgaatctcagctttcagataccgaaagatacgaagttggtgaagcagcgtttggtagtgagaagttcctctggttctgattatcaaaacggcgacgttaatgggtttcctctcaaaccaaacaaactctttatgcaagaggcgattggagctgagtatggagaagggtttgagacttttagacaggatggtcctcttaaagtggatgtggatttctggaatgagaaactacaagatggttttcttcaaagaatacgttacgcaatgaaaccagatgaagcctatggacttattttctcttgggacaatgtcgtggctgatactcgaagtcttaagttggaagcttggaagcagctcgctgcagaagaaggaaaagaaattacggaggaggttgacatccaaagactgatgctttatgccggcgctgaccatgtgcttcgtaaggtgttgttttgggagaaaacgcaaagcaaaattgatagattgaaactcaggctatcggaaatatattatgatagtcttctcaaactcacagaaccaaaagaaggacttagagattggcttgacgctgttacaactgctcgcattccctgtgctgttgtctcaaatcttgatcggaaaaacatgatcaatgctcttgaacggatgggacttcaaaagtatttccaggcagtggtttccgaggaagatggtatggaatcgatagctcacagatttctttctgcggctgtgaagttggatagaaaaccgtcgaaatgtgttgtgtttgaggatgatcctaggggtataaccgcggctcacaactgtacaatgatggcagttggattaatcggtgctcatcgggcgtatgatctggttcaggctgatcttgcagttggaaacttttacgagctatctgtgataaacctcaggagattatttgccaacaaaggctctacatttatggatcacgagaaacagatcatagaaaaatcgccgcccaaaagaaagcttaccattgataccatattctaagcacattggatcgcagcatatagtagttaggttaggttcatgatctcttaagctcttgtctttatggttatacatatgtttgatactagacgcaaaccggatctatcgagtgaaatatgaagcttgttaaagccaaaaaaaaaaaaaaaaaaaa

SEQ ID NO: 874 - DNA, 820 bp, Arabidopsis thaliana
  Clone ID: ARATH-23APR03-CLUSTER37823_1
cgtctcaaacatagtagcaattgagctctcgtaaaagatatttgcgttctttctttcgaagctaaacacatgtctatatgtgtattgtataataacataccgcacaagaatctgtagctgttttcttattccttatcagttgaattaagtaataccacaaaaccccaaatccccctcatgtatgtgtattcatgaagaagaatctaacccttcctagagagaacaccaagaatatattgaccaattcattgaggaaactataccagatttcatttactgacccgaatgtagcggcgagtcatatctcggatttcggtaaattcaactcttcagcaaattctttagtcatcttcaagaaaccttccatgtgaagttgcttccattcctcgaaatcccatgtcccgtataggtcaggatcatctttcttggcccaaacgtaggtttttgtttgcagtttctcgtctgaactatctgttaacaaaacttgaacattctctctttcatactcaacatcctcaaactcatctaaaacattaagttcatcatctgtgattccaaataacacctttccagagactttatcagacttagctggtataatcgccggataaacacgacctttgatgctgaatcaaatcagggagggttgcggaagcggtttgagggatacggttgaggaggagacgaacgacgtcgtccgccatgagactgccgtagacgaagacactgtgcattgtcactgtaccactcatcttcttcctcttgacttctgcgagctttcgattatgtgagacttgtgagtgcgagagaccaaaaacag

SEQ ID NO: 875 - DNA, 622 bp, Arabidopsis thaliana
  Clone ID: ARATH-23APR03-CLUSTER37835_1
tgtaatcgatttgaagaattactacagatacatgcatgaatgtacatttgagcttggtttaaaccttcttcttgaaacactgaagaagaatgtcttacgaaccagttcaaatctcaaagttaacacctcttatgatccaactcgaagcaatgcattgatatatcacaatcaaaagcaatggcgagaatcgattaaagttatttcattgagactttattaagcttaagttatattaagaagagacactactttttagaggaggatttcttcttggagctaacaacaacaacttgaggtttaggatgtttctctgcttcacttggatctaaccacttaagatgatgacgattaaagcaaggccaattaggtattgtgatcagagtcgtcagaacaacacctccggcgtaaatcaacatcatcatcctaaacgacgccgttgtgtaaccaacaacgaacgacacaacggcggcgatcagaagcaggatctgcattaactgctccgccaatttctgcccttgccaatccatatctagaaaatggagacgattttcaaatctctgtaaaaattctggtttcttcttgacggaagaagacgacgactccaatatttcggttagtactg

SEQ ID NO: 876 - DNA, 2221 bp, Arabidopsis thaliana
  Clone ID: ARATH-23APR03-CLUSTER37872_1
aaaaactttctagctctatctcaaaacatcatcatcaatggctgcctcataccacgtccgatctagtagcttaccagctcggctacacccacatggtctcaaccaaattcagcaactccttaataagcttcctgcagatgataacaatagtctctcacttctctcaaatctctacgactctgtctctcatcttttcaacgattcaccttcttcacttctagtccctcatcactctttcttcactcaccttcttgatctctcccttttacaccttgacttgtgttccaagctaagagacatcacttgccgcatcaaggattgcctccgcgacctccgttctgctttcagacggaggagacacagtggagattctaccatttggtgtcacgtcaaagcttttatccgctctaggaaagcggttcataaggacattgctaagctactcttgttgctcaaacaaaccggcctatcctcatctgagtcctctcatcccttgatcacactgctccaacaagtttgttcccaaacatgtcaaacctttaggacagtcttgttgtccctatccacagctgtacctaagcccaggccttccaaatgggccctggtcaccaaactggtgatcaagaacgttactagtacaagtggtcaagttaggactggacacagaaacgaattccagatgatggacgaagaactgcgaagattcagcatggcagaagagataaagaaggatcggatcaagtctatgatcaccaacttggataaagtagatgtagcggttgaagatctggaggagtcgctcgaaagattgtacagacgtatgatccaagctagagtttctttattgaacatactctctttgcatatataactcattaattggaatccttgtatgtatacaatatcatccaaattttagaggaaacatgttaccttcacatatttttggacactgaaacaattgcatgtataaaactataaatgaaaaacttagcagcagcgacatttcaacatatcgatgcaggtgtagggtcttgatctatcctcgagttcaaacgctgtgggaagtgagtctagattatagtttccgcaacagacgttgtataggttcctccgaattcctctgctaaacggatgcactcgtcccggaatattcctcatgtatggaatacgtcttcgtctcacaagttcataagtgctttgatttgtcaaaattaggtagctgtgaaaaatcaatagaagcagcacaaaaatcaaagagatcgccaatatgacaagcagcagtatgataattgcattcttccaccaaggttttgctacattactcaggtagtcaacgtacatgatgagcgtccagatgcatagagttgtctcttcacagatgtaccaccagaatttactatggtttttctggcctatacatgttactaaccaaacacagtgatgatcaaactgaagaacacatcgatcacaatcatgacaatgtttggttcgtggaggctgctccacatgacaatagccgcatgtcaaatttctaatggatgtccctggagggtacaagtccagaaccaacttcccccagggcgttggaggctttctgggacatgaggctgatcctccttcgacattaacaacaacgctctcactttttctggaagcatgttgtattgaggtcgtagatgggtttctatacattgcactagcctcgcaaacatccctcattgcatcaacaacatacccaggtgaagagccagaagttacaaaatactgcagaagcgttgcagaaaacagtaagatataacagcccatataccatggatctcgtttagttttctcaataaattcagcatcgaaaaggaagagaaagccgataaagacgaggtggagagctactagtgccaatttcagaagtagagaagatcttcgaacaggatcggagagacaagggaggttgaggagacattgatcacgagctcgatcccagggttgaaggaaagggcaacaaacgcccatgttttggtttgactctctctctttctctcaagcaaacattgggattggagaagaagaagagacagtgacagaatcgggtaataagccaaaaagaagatcttcaaaatttaatctttgaagatagtttatggagatgcacgagagagagagagagagagagagagagagagagagagagagagagagagagagagagcccacgcgtccg

SEQ ID NO: 877 - DNA, 948 bp, Arabidopsis thaliana
  Clone ID: ARATH-23APR03-CLUSTER37882_1
tttttttttttttttttgagaagtgaatccgtattctgtctgtgatgagtatccgtgtcttatgaactgtgattcaatctgtctttcgatttgtgtttcatagagaaggataagctctggaacttatctaagatgaaaagaggatcttgccctagtgacaccgtgacgcagagaaaccgaccattagcaccgacggatgcgagaaccacagctttgcagcagatcgaagtatctagtaaacagagaggaagcatccgacttccgctactattccttttcccgcgaccaaccgtttccaccaaaaatctctcggcatggtcaaccctccgacatcacggcacgccgttgttagctcccgtacctagcaagccgacaatcaaacataacccctctttcccaatccaacgaatctccgatttaccgaacaaaaaaccttcaaccggccaagaggaagcaagtcacggtggtgtttgaggcccaaggctcaagcgaaacacccaaacacactgaatccgcgacagccaacaaatctaggaagatccaccgttaacctccatggcgaattggcactacccaccttctctcgatcgacttccgccgtagttgcagaggccgacacgacggctgagccacgagaagaaatcgctacaccaaccggcgtccacaaccgaagggaatcgtagcaactctctacttccaacacatcggatccacaactacatcgaaggagagaaaaaccacaccactgccaacggagaaggcatcttgttcacccctgaaatttcaaagcaaagccaaagagatgaagatcaaaggcaccgagaaaagcagatctagatctaaaaatttgttacagtgaggagagagaagagaggtttttttgggaacgattgtccttcctcttcctagtttcttttgggttttatggaagagagaaaaatggaaatt

SEQ ID NO: 878 - DNA, 1135 bp, Arabidopsis thaliana
  Clone ID: ARATH-23APR03-CLUSTER37899_1
tttttgttttgttttttgaagattataatcaaatatttcattacattgtgaaagcttagacaatagacatcatatttattattaaaaatcacaagaaaaataaagatatgacaaggagtccatgtcaatgatcatataagaagacacctctccttaaggctaacaacagtatccttgagagattctttgataggagtgaactcaattcccaaacttttcaatttatcgacacacactttgtatgccatttcacccacctcattctcattatccttatcaacacggcacaaatcaggaaaaagttcatgtaaaagcttttgaatgtctttcattgttacatctggatcagcaagtatgtatctgccactagcagaagggacctcgaacgctttgatgtgagcaagagaaacatctctcacgtccatgaacctatagtaaaaactattggaagggtttttaccatttatcagatccacaatcacttctacagagtaattaagagttggctgcaaaactggttcgatcacgtttcctggattcattacaaccaaatcgatcccgttttctttagcaaaccgccacgctgtttcctcagccaaagtttttgaatatccataccatgccttcatcgctaagtaaacacttagatcggtgaagacggtttcgtccaccacgtcgtttgggttaatagaaagagtagcagcagtggacgatgttacaatgaccctcttcacagaagaaactttggcgcacgttctcaaaacgttcaaagtaccattaaccgccggatcgatcatctcagtctgaggatctgtaacggtgaatgaaactggagaggcagtatggaagacaccgtcgcatccctctatagcttgatcgaaagaaccttcttccaaaagatctgatttgaacagttttagtctttcacttgcaccttcaagtgtaagaagatgctttgttttctttgtatccattggatttcggacggtggccctgacggtgtagccacggaggagcaaaagcttaacaatccaagaagctatgtatccggaagctccggtgacgcaaaccacctttccttcgccgttcataattttcttttattataattgctaggttggcttaagttatgatt

SEQ ID NO: 879 - DNA, 1400 bp, Arabidopsis thaliana
  unsure (1)..(1400): unsure at all n locations
  Clone ID: ARATH-23APR03-CLUSTER3789_1
gnnnnnnatgnnnnnnttgancctagtctgcnagaattggttagcggggtcggttacgaagaaaggaagctcttttacattctcgtggcaacgatctcatctacgtgtcacgaaaactcaaatctcttactccggcgaacgatgtaccgaacggcggcgaagcgtcttctcgccggtggtggaatcactaccacccgtctcctccgattaccgaagctcaggtctacaatcatcccttcctcttacacttccggtctctgcacttcgtcgattggtggtaatactgaatcaccaatgggtaatcagtctgtgaaccctaatcaatcgggtccaacggcgtcgtcttctacgggtacaggggaaggacaacgccgacatgagagcagaaagccgagagctgagttccaagaagagcaggctcgtgttctctctgcgtctctccgtcacgtgccgaggttaggttggacggaagaagcgatgatggctggttcaagggatgttggtgtgtctccttcgattgttgggtctttctccaggaaagaagctgctcttgttgagttcttcatggatgaatgccttcaattgcttatggatagaatagactctggattggatttgcaaaatctgattccaagtgaacgtatctccaagctcattagaattcgtctagaaatgcaagtcccttacatgtcaaaatggccccaagctcttagcattcaggcgcatcctctgaatgtcccaacgagttttaagcaacgggcaatgttagttgatgagatatggcatgctgttggagatggagcctcggatttagattggtatgtcaagcgtactattcttggaggcgtttactcaactaccgagatttacatgctcaccgatgactccttagaacatcgcgatacatgggcattcttggatgacagagtcaaagatgcttttgatcttaagaagagcatacaagaggccaagtattttgcagaagacataggagctggagttgggaagtcggttcaaggactgatgaatggagttatgcagacaatgtccagaagaagtggtggctctgcgttttgaaaagatcacacctttacacatgattctgcttcacactccttacggattctccaatattttgagttgggatttactataataatgagattagacttatatgagttgaagtgaaggcatatgaactaatatattatcttctacgtttgaataaaccattgagtttgaaatctttaatttgtaaataaggatgaaacctgttctgtgtttggttgttctgtgcgtaaacagagttggaaacttgtaattttggtctacttcaatttggtagggtgtttattgttcgaaaacaaacatatgggcacttacaaaaaaaaaaaaaaaaa

SEQ ID NO: 880 - DNA, 1482 bp, Arabidopsis thaliana
  Clone ID: ARATH-23APR03-CLUSTER37906_1
tttttttttttttttttgccacaaagtataaatttcatttataataagagaaaaaagcaaattaaaaatctacaattttccacattccgtgggaacaaacgacaccgtttctttctcaagatcatgaagtacattaaaattctgctgttgaacatttccgaaaatagacatcccattagaacttcccatggccaaacacaaaacgccggtgcttatccgccaccatgtagttctctccgggaagctcctaatcagcacctttaaaatgaaaaatcagcttaggaacatcaatattcttggctgcattaggtaacttgaagcacaagtcaagtcctgtggatccagagtcatctactggtaaactcatccgagaagtaaactcttcctttcaacactttaaacgcggtctcctcgagatacgtgatggtcgtgcctgagtctatgatcatacctccggttccatcttcggctagttcaaaagtagacttttcaacagaaaggcgttttgctccaacggtgatgccttgtaactcaaggtaatagaacgaaggctgatctggatttcgtagcaaagacatcgttttggtgacttcaccatctaaacttgcacctgttttgttgacgatacccgaggctaaagatccaataaacaacgagctagatgcttcactatcctcaatcgaggtcaagcaataagaaaacttagtctctttgagctgagaaataagcgagagcggtccgcgaccaagacctacaagacctgacccttgagagaacccgtcgccttcgttctcaaccccacacccaaacccgataccagaaatcgagttctcgtcctcgaaagtgaacgtttccgtggccaagagcccctcttgtagatgagtaatctccataagtatacaaatactcacaagcatctttatcttcgttacagtttgatcgaggcaatgcgttacaaagaccagaagagcatcctactttcgagtaagaggaagatttctccgggtcaaaaatcggagttggttgatcaaaacattcagtgcaaggcttgcattgagtccaaataaggtcacttccggtatcaacaatagcagagtatttaaccgccgggtttccaatagacaactccataagaaactcaccgcttcctccatgagtaggtgctttaatgttattagtatcatcaggcttagaggctacagctaaaacagctacagctcctaatctgtttaatctatggaatccacggttaatccctctctgaatcttttggatcttggtgaggtttttaccggaatccacatgtcgaagactcaatcgaaaaccggatctcggaaggtttttcggaagagtacggtcgattaatgatcttcttgacgatgaaaccgagattaaacatgaaaaaagaataagaaagaaaggaaataataaagaagaagaagaagaagaagccatggtttgtgtgtgtgtgagtggatagat

SEQ ID NO: 881 - DNA, 2085 bp, Arabidopsis thaliana
  Clone ID: ARATH-23APR03-CLUSTER37908_1
tttttttttttttttttgatgcaatagtactgtacacaccaatatattattttgatgtaggagctctaaacacaaatccagttcatatgtacaaacaatcctctatggtctctactcatctcaattcaaaaccaaaaaaaaaaaaaaaaaaaacagaaaatgcataagaacaagttcaaagaatagctcataatcatgaaacgcgttgaaagcttacgcagattgataaattattgtctcttgctctgtgatcttgaaactggagtactcatgtcagtgtctgagtttatctccatacttccttctcgcgttctagaacgccttcggtcctctcttggaatggggtattcttcagactcaagcatacgtacaacttggctcattttcggccgcttatccgagtctggatcaacgcatcttagagccgtcaaaagagctcgtttcaatgaccttgttggtggcttcacttctatgtttggatccactacttcctctgatcgtcttgtcccaaccatcatctttaaccaatccactagattcacctcatgagcaggacggccataatccacagggtctcgtcctgtgattgcttctaagagaacaacaccgaagctgtagacatcactcttttcatttaacaaccctgagtttgcatattcaggagcaacgtacccaaatgttcccatcactctagttgtcacatggcttttcccagcgccaagcaacttggcaaggccaaaatctgaaaacctttgcattaaattcgtcgttgatcagaatgttgcttgacttgatgtctctatgcactacttttggctcaatcgcttcatgcagatatgcaagagcttttgatgtaccgatcagaaccttcatccttgcttcccaagttagatatccatgttgtctcattgctccatgaagccattgttctaagtttccattattcacatactcgtaaaccaatatcctgtgtgtgccttcaatgcagtaaccaagaagccgaaccaagttcttgtgccgcacatgaccgatagcatcaacctcgactcgaaactctttctcagcttgtcccaactggttaagaatctttttaactgcaacaggagttccattcattaactctcctctgtagacaacaccgtaaccgccttcaccaatcacattctctttagagaatctgtttgttgctgtttcaagatctctcaatgtaaaccagtgtccccaaccaagatgagactcaggcaacccagataatggtgatggagttgcaatgttatacaatgatgaggaagcagaaacttcttcagcagactcagaatgtttatctatgatctctaaatggtgaaatgagcctgaccggccactactacttctcttcttcctcatatccaaatgaaccatgactttttctgagtctttgctatttttgtcctgaattgttagaagaatgccttcaccaggagcaaagttactagctgagacatgctcaactctcacttctctgatctctttggagacaaccggaggagtttggataaccggaagaccggttttcgatcttcttgatttctttttcgaagtaagacaacacgaaagaacagagaggatagctatgatgagcaatgcaacagctataccaattacttcccacaccttaagtccaaacacatggctctctctagatagctggcttttcaagtcacctcccatttcttcctgatcttgatattttagatctttgaagaactaacacccatttacaaatcttgaagaagaaagaattccagatcctagaaccaaatttgagagaagagagaaaaacacttgataaaatttcaggagaaagaatgtaatgaagccctaagcttgtaaggagctgtcatgtaactacaacaactacactaaaactgtaataaaacatattcaaataaacactctggcccagccagtgaatagataatttaagagaatttattaagttttgggtttaatatgagtaagagaaggaaatcgacaaaaagggagaaaactttgaaatgtggggagtgagatctggtggaaggtaataagagaagaagaagagat

SEQ ID NO: 882 - DNA, 1696 bp, Arabidopsis thaliana
  Clone ID: ARATH-23APR03-CLUSTER37914_1
ccccgcgatataccgcgggttaaaatctagtattattgaagatttcatcaaataagtacaaacgttcaatatagtatataacattgtcttcatacacaagttaaatctcgccacaaaaccaggagatctagctcacttcctaaaatggggtgacctttcaaatctcaggttccttttaatatttcggatttttgataccgacgattcacacacactgggatgtcctatagactaaaacaaaaaaaatagcccacaagacaagataatgaaagacacagagtttgtgataaccggaccgggttttaggtggaaagaacaagcgagagatgtaatttcccggtccattcttcacccggtttcaaggtgatgggtttctcaatggctgctccatccacacacaacatgtgtctatactcatcatctcccaaatccgtcaatgctctcgctttcttctcccatggattccataccacgacatcaggtagaccttctttcttgatgaggaatgtgcgttttctctcatggtcgaaaatggcaaccacgtctttagaatttaggtacactctatcgatctctgattcaaaggttaatgcatcgccttgctctgtgaaccgctctctatcatgcatattatcaagatagtcaagagtttccagcccttcaagtctaacttcactaatatcggaaatggagaagtaagtgtggtaagcaatggaaaagctaaaaggctttgaattgatgtttctgactcgtgatatcagtgttaggttcccatctaatgccaatgagactctcagatgaaactcaaagctgtaaggccagatcctcatcgtatcttcatcagatgacttaagcaccaaatcaacataggcttttccagttgagtcaaatgaaggtaaagcaggtggattgttttctacaagccacatcttgtttcttgcaaacccgtgttgctcaagtgatccccgagttccaaactgaggaaagcatatagggattcctcctcgtaccggatggggaggcttcaagttggccttggtgctgttgaataacaattcatcacccttgtcagtcttccatgaaagaacttgtcctccatgtaaactaatctttacagaggcgcctctaggattctgaagaagaatctgatccgttccatttctatccttgaccaagtcaacggttggtctcttctcaggaccggttccagatgatggttccattcaaacacagattcagagacttcgataatatttcaccttgacttctcgtgtttttaaatccagaaaaaattaggcgaagaaatcacaggaagaagaaaacaactaaactttcttgtggaaagatctcaacaagaaagccaaagagatctcgtggaaatgaaaccgaaacctcaaccaccacttcaactgcttgcttataagtctttttcttacacaccgataaagctgcaacacacaaaactctctaatgttgcaataaaaagaggataaagtaaaaacacgattaagacacgattaagacagatcgtgaggttgtaattaaggttaacgattagaaaaaattaagagatgcccagatgaatttacgtataatcaagaacacacaaactatttttgacacggaagagatatttaaaaagacacaagtcagaaaaattgggcaatacggagaaggggttgataaagattcaacc

SEQ ID NO: 883 - DNA, 1829 bp, Arabidopsis thaliana
  Clone ID: ARATH-23APR03-CLUSTER3797_1
tggagcttcattttgcctttgtatacttttgagtagatagatagacagactatagtctatataagatccatgtgacaatagttaaaatcctcatattttcatttccaatggagcgcaaagtcttgaataccctcgccttctccgtctttgccgttctcttcttcacctcctctgcttcttcccaataccaaactcttgtcgtcaacactcttccttcttccgcaacactctcatggcccgagtccgaatctttaactgatgaatctttatccgagtccacaacttcactctctgtccatttatcacacgtggatgctctgtcttccttctccgacgcatctccggcggacctcttcaacctccgtctccaacgagactctctccgcgtcaaatctattaccagcctcgccgccgtatcaaccggacgaaatgctacgaaaagaactccacgtaccgccggtggatttagcggcgcagttatctctggcctctcacaaggaagcggagagtattttatgaggttaggtgttggaactccggcgactaacgtttacatggtgctcgacacaggaagcgacgtcgtttggctccaatgctctccttgcaaagcctgttacaaccagaccgacgccatttttgacccgaagaaatccaaaactttcgccaccgtaccatgtggatctcgcctttgccggagactagacgactcgtcggaatgtgtcactcgtcgaagcaagacttgtctctaccaagtatcgtacggtgacggatcattcaccgaaggagatttctcaactgaaacgctgacgtttcatggagcgcgtgttgatcacgtgccgttaggatgcggtcacgataacgaaggcttgttcgttggtgcggctgggcttttgggcttgggccgtggtgggttatctttcccgtcgcagacgaaaaaccgttataacggaaaattctcttactgtttggttgaccggacgagttccggttcttcttctaaaccaccgtcaacaatcgtgtttggaaacgccgccgttccgaaaacctctgttttcacgccgttactaacgaacccgaaactcgacacgttttattacttgcagcttcttggaatcagcgttggtggttcgcgcgttcccggcgtttcggagtcgcagttcaagcttgacgccaccggaaacggcggtgtcattatagattccggtacttcggttactcggctgacgcaacctgcttacgtagcgcttagagacgcttttagacttggtgctacgaagctgaaacgtgctccatcgtattctttgttcgacacgtgttttgatctctcgggaatgacgactgtgaaggttccgacggttgtgtttcatttcggaggcggagaggtttcgcttccggcgagtaattatctgatcccggttaacactgaaggacggttctgttttgcgtttgccggaactatggggagtttgtcaatcattggaaacatacagcaacaaggtttccgggtcgcttatgacttggtcgggtcacgggtcgggtttttgtctcgcgcgtgttagattttgagcttgagttgactgatttattcccaaagactttttgggagaaaattgacaaagcaaattatcaaacattgttatcatcatcgactatcatactactcattagtcatcattcatgaagatccctagattaaatattgtactagtacttctgtactgtcaaaagtcaaagagaagtgaatcttaaaggtgcttttgtcctttgaaatttcttaaaccaaaatgaaattattggtaattcactagcttaagtgctcgttttaaagt

SEQ ID NO: 884 - DNA, 2930 bp, Arabidopsis thaliana
  Clone ID: ARATH-23APR03-CLUSTER38022_1
gttgtattgttttttatacaaacacatatcgaaactcgtatatatcaaatccatagagaaggaaacactaatcaaaacaaactgaacgttgaagaatcaagaaaccaaatgctcatataagaaaaactgatccaagaaatcagaagaaaaagaaaaatcgatacaacgtatagagagattgagagcattaaacgaataggagaaacctctgattggtcaagtagcttcagaggacaagatttcgagctctgcccaccaaagaggagaggatcttggagtagctttctcaggagttatgttgataacttgtttcagttgttccgctacatctttcattgaaggtcgttgtctctgttctgttttcagacattctcgtatcacatcgcagatcacttcaagctcctcttctttgaatgtctttaacgatggatctatcatctctcccaagtcgtctttttcaaggtacttcgatgcccattgctcgatagatccgtattcgtctgagaaagagagctttccagagatgatttcgagcatcaggactccgaagctatggacgttagcctccggttctggaggtagtaacaatgacgtttgctctaagtctccactcacgtgtttcttcggatttaatcttgcctctaagttgaatggaatctccgagaccttggctgcgtagtcatcggttaggtagatttccgatgaattgaagtccgtatgagccataggcgggttcatcccgtgcatatgttgaagacagtaagccgttcccattattattctcatccgtgcgctccaatcaagatgctctgtctccttatctgataggcggaaaacgttattaacgtgcaaatgttcgaaaagagttccatttggagcatattcaaagaccatcatcctattaaaaggatcatcttcttcgcagtatccaatcagattcacaaagttcttatggttgatccgtgacagagtatcaatctttctacggtatgccatttccatggctcttgtccattctttagattcagcaatcgcggttgaagctaccgctatctcaacaccactcgacaatgttcctttatacacagtgtaaccgtcaaatgtctctatgatgttgctgaaatcttcacacgctgtttcaagctcagaccgattgagctttggtaccccggtaacaaaagctttctgcaattgtccactaagaccagttttccaaggacctatgctcttgacagctcttttccggcagaagaagataaccgctactataatcagtaaaccgacgaaagaagcaaccgcgataaccacatacagccatacatgttttgatccttttgactgtttattatcttgtggctgattcttagagatatcaggactagtactgcccttatcaggagaaggtacaggagggactaaaggtggtcttctcttctttgcattggttactgcagggaaagacccgctgcttcgaggtgaagcttcagttataatcccgggagaaggactaggagctgaaggagcaggctcagccgctaaattacttgtctcctcgagtagctcacgtcgtttgtagatatcagtttcctccaaaaagctagggaatgctttcaagaaacgtctggaggttgctttgatccggaatacaatagcttctaccttttttacttgaatgatacggtttcttgaaacacagtgtccaagttttctgttaatacagccgagaacagccaaaggtgataactttggactcttctttaaccgaacttcatacgaagattgaagtctcacgatctttattctcatatcatccgaaaatttgttaccagaaagcaacaagtgttttagcgataagccattgcttagctcaggtggaatttgtccgctcaaatcattctctctcaaatccaggacttccaagttttcgaaactcccatactcctttggaattccaccggagaaatggttccgagagagtattagagatcttaagtcactcaattggctaagctcaggagctaacgttccttccaaagaatatccgctaagatccagaatctgcactttaccgtcaacacaagtaacccctgaccaatagcagagatcattaataccagaaacattccaattcgcaagagtcccatgaggatctgagttgactcttgcccggaacttcaacaatgcggatccttgggaacccacgcgtccgcggacgcgtgcttgaaggccaatgatcaagaagaagaaccaagggaagtgaaatccacaacccatcattataaggttttttacaccaaacactatatactaaagatttttttccctaattacaaaccaaaatccaaaaaacccatttcccagaaacaaactttctcttctatataaccaaaccaaatatcaaaagaaaaaaaagaaagaaagagaaaaaatgttaattttctatatattacaatgtacagaagaaagaagaaaattgtcggatataagggtccttgatcatcattttccaggtttgaaaattgattttcacaaaacccttttcatcacagtgttaatctctgggatctaacagcttcttgtggatctcttgatactgtataaaggaattccttataatgcaaacaatgtattattatgtttctggatgaaaccagcaagcgggtagggcaagcaagagaatgttggtgagaggatttagaaatcaaaatatccctagaaatcgatcttgattatatttttgaaaatcgatttctcgttagtttttgcaggatgatgatgatgatctcagagttgtctctcttcgaccatctttggtctctccagggccaaagggtggtgccttctctctcctccctcttccctttgtcttccctcttctctctctttgcacaatttgttttctttttttttttttgatattgccaaatacc

SEQ ID NO: 885 - DNA, 976 bp, Arabidopsis thaliana
  Clone ID: ARATH-23APR03-CLUSTER38031_1
gttttttttttttttttgatatgcaagttgtgatttataaagaatatttattaaagatcccttactgattctcattaaataatacttaactctaatggttcacaagatttcacaaccattgtgtaatctggaaaattgactagattggaccaaaagatctaacaagagagaacacaagaacagttgtttttaacttcaaacttcttacaatgtagtacctcctccatccgacataagagatgcagccgccgcagcagcggttggcacaacccccgtggagatagacggtttcgacaagtgaacaagcggagcaagaaattcacagaaagatgaaacagcagcagcgacttcactgtaattctcagaagttgcaggagcagttacatcaacaatctgcataccaggtgttacaggaacagcctcatctatagcatgaactttaggcatcttattaacagaagatacagaaacacttatgtgcgcagtccgttggaaatgaaaggcgaatccgactttgagaagctcatggtctagtttgtaaccgagtgcatagaacatacgcaaagcattcttgcttactttactttcaatcatatttctaaccaaaacagagatttgatcagctcctgcacctctcatcgcaccaccaacatgtttaaccgtccatgtgggttcgggttgatcaagatcacataatagcctaacttctgatgacacaactccaagatttgggccgcttcttaagcataactcatgaactcttaaacgttcgcgttgaacaccacaaagaccttgaagaagaatctcaagagcttcaacatgctgtgtctcgatgattccttgaaccacacactccattgacattgagctatcacaaaatctctcaattaaaatcgtaaatatattctcaacaagaccaaatccgaaattggaaaaactaacgaaagcttcctaaatcgtcctcgggagccgaatc

SEQ ID NO: 886 - DNA, 3587 bp, Arabidopsis thaliana
  unsure (1)..(3587): unsure at all n locations
  Clone ID: ARATH-23APR03-CLUSTER3804_1
agaatcaacacactacatgaatcaaaacaaaaaagcttctttttttttttttcttaccagctcactctcagttagtgcataagttgatcagtttggtttcgattgtttcttgaagttggagtaggtcaaaaatctaacagtagaagtattaacacatgaatttagctctcggaaggtatgatcttagctccagctaccgcctgggtcttgctttttttacggtgtttcatacaatctgtcaagttccagatgtgtactctagcaatgttctcaaaataatttatgttaggacgtgtatggagcagttgtgtatggaactcatgttttgttgtatgattggatgcttatctttggaatcaatcgtcttgtgaaagaaacaaaactacgacggtgatgtttctcgttcttttgattttttaatatggttcagcatctattcaatcttgtcatacatatattaattgcagagagaatgcctttgagagattaaaagctcattgatcgggatcatgagaaatgattattttgcgtttggtaaatatgcaagcttagtttaacttttgaactatttacacggaggtgaaaagcgtagtctaaggataggatccggacgagctgtccaagccatcagttgcaggcaattgatagtcgaaattgattcctataaaagtcatgtgacctttatgagagttgaagttaaagccactttgggcctgcctttatgtatcttcacactgggatttatcgtcacagggaaaggtattggagatctgggggcgcaagaaaccatagacaattgttgacacagttctaaagaagtatggtcctttgcataacaatttctttatatttaattattatggaaacatggatctatggtgggatgtggagaggaactctaaggctatactattacctgccaataaccggtcaaaatggtggatccagcaacgttttttgcatcatgagactattttcaactacgattatgttacaatccgggttgaagagcagagaggtctgaatttaaatcctttcatgtacacgataagtattggaagagcaggattcgatgtcttctgaccagcaaagagccccaagacaaaagaagttcaggacagacactaggagcgatctggaataaaacttgttacttcgctggctccctaaaataaattaatcgagctacttttatcggttcgcctatgttccggtttaactgctctaacagttcctactgcaataacgtagacatggtcggcgtagtatgtatctttgatgaaattattcaaacactaggtgcaagcgggtatcccgataataagaactcagttcgcagcggagtaaataggagacgcggttctgcgacttttgattcaagaacagagatacggagacaatcaacgtgggagctgcaagcttgtaaataacggtggaaccaagcggttgcacaacgcaaaaactaggtgaagcggtcatcagcgaaccggaacagaatcggcaataaggtgacaatcaaaagaagattcatcatttcaagattactgcagggacacccagttgagacgtttctaataaacgaagctcttgatatcatcgaagcggctggtggctcattttatttggctaaatgtgaactggggcagggcgctgatgctgaatcgtactcagaacttgaggttggtgcggatgataagagagtattggatcaaatcattgattcattaactcggttagctaatccaaatgaagattatatatccccacatagagaagcaaataagatctcactgaagattggtaaagtccagcaagaaaatgagataaaagagaagcctgaaatgacgaaaaaatcaggtgttttgattcttggtgctggacgtgtgtgtcgcccagctgctgatttcctagcttcagttagaaccatttcgtcacagcaatggtacaaaacatatttcggagcagactctgaagagaaaacagatgttcatgtgattgtcgcgtctctgtatcttaaggatgccaaagagacggttgaaggtatttcagatgtagaagcagttcggctagatgtatctgatagtgaaagtctccttaagtatgtttctcaggttgatgttgtcctaagtttattacctgcaagttgtcatgctgttgtagcaaagacatgcattgagctgaagaagcatctcgtcactgctagctatgttgatgatgaaacgtccatgttacatgagaaggctaagagtgctgggataacgattctaggcgaaatgggactggaccctggaatcgatcacatgatggcgatgaaaatgatcaacgatgctcatatcaaaaaagggaaagtgaagtcttttacctcttattgtggagggcttccctctcctgctgcagcaaataatccattagcatataaatttagctggaaccctgctggagcaattcgagctggtcaaaaccccgccaaatacaaaagcaacggcgacataatacatgttgatgggaagaatctctatgattccgcggcaagattccgagtacctaatcttccagcttttgcattggagtgttttccaaatcgtgactccttggtttacggggaacattatggcatcgagagcgaagcaacaacgatatttcgtggaacactcagatatgaagggtttagtatgataatggcaacactttcgaaacttggattctttgacagtgaagcaaatcaagtactctccactggaaagaggattacgtttggtgctcttttaagtaacattctaaataaggatgcagacaatgaatcagagcccctagcgggagaagaagagataagcaagagaattatcaagcttggacattccaaggagactgcagccaaagctgccaaaacaattgtattcttggggttcaacgaagagagggaggttccatcactgtgtaaaagcgtatttgatgcaacttgttacctaatggaagagaaactagcttattccggaaatgaacaggacatggtgcttttgcatcacgaagtagaagtggaattccttgaaagcaaacgtatagagaagcacactgcgactcttttggaattcggggacatcaagaatggacaaacaacaaccgctatggccaagactgttgggatccctgcagccattggagctctgctgttaattgaagacaagatcaagacaagaggagtcttaaggcctctcgaagcagaggtgtatttgccagctttggatatattgcaagcatatggtataaagctgatggagaaggcagaatgatcaaagaactctgtatattgtttctctctataacttggagttggagacaaagctgaagaagacagagacattagaccagcaaaaaaagaagaagaaggaagaagataagcctcgatccttgggtgacgagtatctatatgtttatatgtactatatgttatgttgtacagaagaagtcgtgtccacaaatatcaattgatgtcagatgtctagtaagtgatcatgtgtagcatacaaactggagtaatttaaaaagtgaataaacaaaaataattactaaaaaaaaaaaaaanttta

SEQ ID NO: 887 - DNA, 1733 bp, Arabidopsis thaliana
  Clone ID: ARATH-23APR03-CLUSTER38070_1
tttttttttttttttttcatcaaaatagctttccttttaaacttgcacgaaaacataattgttgcaacattacagtatatcatcattgattgatataagagaacaatacaaaacgactactagtatcaaaactaaggaagaagaaagaggttcaccattatggttgaaagaaaccgtctaaaaccgttttgtttttttcttcttagagaagatttcaggcgtccggttttcttgtttacgctttgtccctgcaaaccgcttaccaccgctctcttttgaaccttttgcgtttgctttcgcctttcttgctgcaacagctggtcgcttctgacttctttcctttgaagcactattattcccagattttttgttgtcattgctgctgctacctctaggtctcatctttgtctgcgcggagcttttctgataaggtgttttcttatcatcaccagatcttgaagctcgtacaccttgatatgaaagattagccttccctgttggagttggtgtgaccactttgtccttctgcagtcttttctgggccggcgagtaagcttcagacggattgctctttctctttgatggcgtatcaggtttgactcgagaaatccgtaactctctttctctaagcttcaagtatcctttcttgagtacgagatttgcagcttcccgtgttttaaacaagacgtaagctattcctttcccaatgttcaagtgaggatctctaatgacacgaacagcttctatactgttctccagattactcttacccgtaaacagttgatacacttcctcgtccttcacatcgaaagggagattacccataaagactgtcctcttaggatcatacaaatgagtatcatcatgccctttctgtttcttacgaggcggacatgctctatcaacgcggacatgattcccatcaatcagagacatgttatgtgccagagaagctgcagcagattgctctgtttcaaacacaacataagcatgaacacttgaagctttctcattgatttgtttcagcattatagctcctttccttgtcctcttcgaatcaacaataggcacagagcgtatcctcacagattcaacctcaccaaatttactaaactccttcaagatgacttttttcttaaccttcaaaggcaaattcccaacgaaaacagttctaagaagcttactctcatcatcaaaaccttcctttgaaaccattgtatcagctacttcatcagctttcttcctcttctcaccaaccttcttctctttcatctcaacgcttccatacttcttcgtctcgtattcgttctcaatctcatctctcttcctcttcttcctctttgaaaccaacccactttcttctacagcctccgaaatcgtctctttctcgtcgccggaatctgtaagctttttttcctttttagatttcttcgtcttcacaggcaaatctgtttcttcttcttcttcttcgttctctgcatttcgtttatcccctttcttctcatcaggaattgacgactctttgatttcttgaggttgttttcgccggaaagggttatcagcggagaagagactcgcaaagccagagctttcaacctcgccggagaagagagtggagaagattgtctgagattcatcgttttgagattccggctccgttaccttcgatttcttcttccccatcctcgttcgatttcaatgagagaagaggaagaaagagggagagagagatt

SEQ ID NO: 888 - DNA, 1338 bp, Arabidopsis thaliana
  Clone ID: ARATH-23APR03-CLUSTER38178_1
agaagcaaatcccaacaaagggacatcgaagatacctttgtagttcccggccccccctcgagtttttttttttttttttctgttaccaagtactatgttttgggacatagaagaactaggaagaaaattcaaatgaagataaaaggattatttatccatccatataatgcaacggatagagtttccctcagccaataaatggaaagctttgttaatttcttcaaagcttaattcgtgtgtaatcagatcctctagattaagctcctttttcaaataacgatccacgagaataggaatatcaagtttgggtttcaaaccgccaaataaagtgccgcatacagttctgcctctgagaagatcataactacccaagcttattggcaaagccttttgttccatccccaatactatcgttttacccgatcccgggcgagtactcttgaatgcctcttccatcaaggaagctaaaccaatgcattcaaaactgtagtcagctcctacatctgtcatttctctaatcacctcgctaattttcttctccccacacaaagcaggattgacaaaatccgtgattccaaatcttttacctatttcaaatttcgcgggattgctatccacaccgatgatttttgcggctccacgcaatctgactccttctgcaaccgctagtccaacagcaccaaggccaaagataacgacagtggaaccttcctctacgtcagctactttccacgcagctccaattcctgtggcaacactgcagctgagcaaggccgctatatcaacgggaatttcaggagatattttgacgagatgtgcgatatctacaacggtatattcagtaaaacttgagacaaagatgaaatggtgaatatcttctccacgagagtccttgaatcttgaagtcattccatatcgtcttgtgtttgataagtaatcgtttgtatatcttgtgcaccagttgctctttggagatttgcactctttgcattcttcacattgaggatgaaacactggcaaaacgacgtcgccttgtttaaatccgtctaccttttctccaatactctcgaccacaccgactgcttcatgacctagaatcctaggaaatcttgcaagcggtccactgtctagtttccagaaagtaacatccgtgtgacatagagaagtgcataaaattttgattctgacttcgtaagcttgaggtggatcaacttggatctcttctatcaccaatggttctcctgcttttcttaagattgctgctttgcatcgaatcggctttccttcagtgattgaagccttgtccatggtgaacaatgatggagggatctcagagcg

SEQ ID NO: 889 - DNA, 1447 bp, Arabidopsis thaliana
  Clone ID: ARATH-23APR03-CLUSTER38183_1
tttttttttttttttttgagaaacaagttaatatgttattgactaacaaataatgatcttgttcaaagaagatgacaaaagaggaagaaaaaaagtaagcaaggaatagatggtcgactaattaagttgcactagacttggaacataagagcacacaagtggaaaacactttcggtctgaatctccgagatcaactgctttaaaggatccatccactccaaagatgtaagctatgttgcgcttattatcgtagtctttatcaaaaaccacagcgactttcttctcctcgtcgatgaagaaactcccaaaagttaactgaaactgagggctgacgagttgttttaaactcactgataagaacaccttgctgttccacgacacagcgttgggctcaatcttagacgtcacccagatgtccaactgtaaataatcccacggctgatataatacaacaagctgctcttctctaacactagatacactcatagtatcttcagaaacagcaaactcaaacggaagaggcaaaggcggcccaaatgtctcgcttgtgaaatcaaaacagagtaagaaaaaatggtctgtgtccattgtttcggtataattctctctagcaaaccagtaggcatttcccttgagagacacgccatggagcatttgccataagtgccactccggagttacatcaagatccctccataagtcagagttaaaatcgtagattttgaagggatccaaacaagtaatacccctcaagattttgtgggatttgcggctcttgtcgtatccgagagcatacgaatagctatcgaatttgttgaattgatgtgtgggctcgaataaccgggtatgcccccaatacgggttccaaacaacgagcctagtcttggattcggtgatgctgatgcataacaataaaccgtcacagtgaaagacttgagatatatcagcttcttcatcgcctaagctaataagtttagcttcacgttttatacatgatgatgatgatgatgatgatgatgatgatgattcaacaacgttgttttgaagattgactctcatcaaataaaccctaaaattcatcatcaagaccaccataaactcctttgcgtctgctagtacttttgcttgagcaaggtgcttctttgcaaagctcccacatttggataaagtgctccactttttgcaagtagatcggacaggcctcagagatgtcaacggaattctacagagcacctcctccggcaaatctcttggaagattgtacatcttattcttatttttcctctgtctgtgattacagatttcttcggcctctcgatatatataaaacaattgaagacggcagtcacggcacaatcccttgaggattcgattaagacagaacaaaacaagagcaaatcccaaaatcttcggcctctcgatatatataaaacaattgaagacggcc

SEQ ID NO: 890 - DNA, 1283 bp, Arabidopsis thaliana
  unsure (1)..(1283): unsure at all n locations
  Clone ID: ARATH-23APR03-CLUSTER38198_1
tttttttttttttttttgnttttttttttttttttttttggcaaggaaaaatatcccttaacccggaacctctggtttttgtgatttcttttttcttttttcctagcaatgaaaaatatccctaaaccggaacctctggtttatgatatatcccattacaacaatcctacgatttcaaaccaatcttaaaaacataaattcatttcattgtaagactactatatacataactgtaacttcggaaaagtatctacgattcttcttcaccagttagcctcaagctaaactcccatagttttttggcaagatctttgcctttaccctgagaattagggtcagatatgttgttgtccatcaagtattctccactcactccttttgcctgaggatgtagcgcagcataacacgtagttgccgctccctgtggaatgctcttcagcacttacttccccaccgcattaccaattgtatttatgaagctgtggtagcgtaaaagattggtcataatggatccaggatgaagtgaattagcagtgatattcacaccttgttccttgaatagcctagcgagctcagtagcgtgcaagatattaccgagctttgactgaccatatgcttgcaaagtattgtaacttgcttcatcatttattttgtcaaactgaacaccttcccggtaagcaaatcgatgaccttctgatgagacaataacaattcttccttctctattgctttcactagctgttttcttcatcctctccaaaagaaggtttgtcaacagaaaatgacccaaatgattggtcgcaaactgtaattcaatgttgtcgctagaaagcaagaagggacatgccataatccccgcattattgatgagaagattcaagggaaggtccaaagactgatactctgatgcaaagctcctgacagaagccatagagctaagatccaacttcattacatcaatcttagcctgaggtatttccttaagtatcttatctctgacttgattaccagaatctgtattccttaccgccattacaacatgaacaccacgaagagcaagaacacgagtagtctcttccccaataccacttgatgctcctgtgacgatagcagtgagaccagtaccatcgattccatgagtgacttcttcagctgtggaacgagcagagaacccagatgctcctttccaccaaaaaggccacatttttgttttgtttctatcttctttaccacaaaattaaattctaatctcaaccaaaccaacggctagctgatgatcaaac

SEQ ID NO: 891 - DNA, 1422 bp, Arabidopsis thaliana
  Clone ID: ARATH-23APR03-CLUSTER38199_1
cttgataagaaaaaaagatttccttagtatgatgaaacgaaagaggtatgagacgagatggttccttttttggcccttcttgaaacattagagatttacttttagtcttttagacaagactcctaatgtatattcaaaatgtcatgaactaaagtagataacaaagcccaacgaagtccacaagctaaaaaaaaaaaaaaaatcactagcgaagaaatcagactaagcaacgctcattttctgccggttgctccaactcttggcttggccttaacctcgctttcctgtggcaggtgcaagaaaatgctgctttttgcagtcgccgggttgtgattttctgcacctttgctccagtcatagcaagccgcatatgcatatatcgatccatcgtggttgaacgagctgcatggaattggctgattgcacctcgacatggccttgagtctttgtttactatctttgtcccagaaattgaaagcaccatctgacccagcagttgcaaaagtgccatgtaccgggtggaaattcagagagttgacagaatatatatcatttccatctctgtggcatttgaatgtgaagtttttgctctgttgagaatcatccagatgatgaacaccaacccgcccctcaattgaaccaaccaaaaaaccttgctgatcagggaaggcagtaacacacctcgtctggtacttcagtggggattggattctcttaaactcagtctgaggattttgcaagttgaagactatcagatttctatcggcagtcccgacaaccatcagaggatgtttcacagacaatgtataacatttgtctggaagctgttgggtatgtacaggattttgctgtcttgtgtcccaatatttcaaagttttatcccaacttccagttgcaaggagattcattcccgggatccaagccatagctgcgataggaccctcatgcatagcaacagttacaggttgaccaccagacaacaagggccacatttttgcttgcttatcacatccaccgctaaagactgtggttccatcatccttccaagcagaacataaaaccggctgatcatgtgatattgatgctttaggagcactggctagagaggctccactacgggatatttcccaacacctcacctgattgtcccatgaagtggccacaagtatatcagctcttggactaaaacttaagctcgaaatagaatctgccggtgatggagtaacctcgtaggatttgttagggttactgttggcggtagcaggcgcaccaaaagttgccattatcacgagcgcgaggtctgattaactagagagaagaaggtccgtcggagatatagacttttccggtaagcagaagaggagggaaaacgaattgagtcggaagagagagaatgcgacgaagtacttataaaggtctctc

SEQ ID NO: 892 - DNA, 1923 bp, Arabidopsis thaliana
  Clone ID: ARATH-23APR03-CLUSTER38223_1
gtttgtgcgtgccattgccatatgctctctggatcccatgcatccagtttccaaatttttggacttataaagcccatcaaaagcatcatatttacatacggacattgcatctaagatcagaaacacgttccaaaagtagttcttctaaatcccaaaacaaaaaaccaaaaaaacagtttgaatcaagcccttgatgcgcaaaggaaactaccatattacagcagcgtggcagtgtgttgccaaccaaaaagaatcaatgagttccaaggtcttaagctcgtggtaggacattttgctttagtcaatatcagtcatttccagtccccctaagcgagaaagctgtccttgtgatccaaattccagctggctcagacgaaactcaggtggagtatcaagctctatgttagagggatcaagaacgattttctgacattcctccagatcacggttgaagtcttctggtcctaggggtgcgtaatccgcaatacatggttgtttatcctttaagcttccactgtttgtgttttcctccctgtcctgtgatcccaagagatcgtcgcaaagagacaaggcttccacaagctgttgcgaattcaagataaactgagatccactgtcaaaccacgtcggatcttcctcaccttggttttcattgtctctatccttctcttgctcctctttatcatctaacatttcttttgctccgttttcaagtccgtgctccagctcaggcccagaacttggtctttcatgattaggttgaatactctgaacctcatcttccatacacattacctcggatgtctcggcaagagaaacctcatgggcagatacatagtcactgggagtaacatagtcactggcaatgtgagaatcagagcaaattcgcacagcatttcgaggctcaggtgtagctaattttggagtgacaggatccgctgttggagtcactgcagcaaagatatcctcagagacttcctgttcagctttatcacctcgcttgactactagctgttgtggctgctggtagaaaatcttagaaacaacataatcaccttccttctcgtcttcttctattcccaaatggtattggtgcatcacccagttggttttcacagcttttccgccatagagaaccattatcttcttgcaacctctttgaacaccatccaacacaaccggtttcgttcttcctgtcttatgccagcgcacatcgccaaaatcatcgtcgtgaatctttctacgctttcgagttcctgtgctataagctttgattgctttatggaagaagtgagacaccgtcccatcactcttaacacctggtaaattcttaggatgagtgtaacagattccatcatcttgattgacggttgggatgaactcatcaatgaaggggtgtgagcttaaccctgacaaaccagattgggctagcaaatgccatatgatctcaggatcagatggatcaaatttcacaccctcgaggcaatcctggccaatcatcaacaacatcactgttgtcaatgacatgttgacacttgggacaatgtcttgacgggttgctcttccacaccacttggcgaggatcggaactagccgatgcactcataatcttcgttgcaatccggttgctatcgatcagccatgatcgcccgcccactgcagctcgatcatccatagatcagagcaaaggagaagcagaatctgagaataaaccctagacaagtctctctcggcgctaacaaaaagtaaaattgatatttcaaagtaaggatattctcaaaactcgagtcgaaatactgtttgcttaggtatgaaattaaagtttttatcttttttattgattttatatttgggtggagaaaagaaaaagattttgagagataataaaatctcgtcccggaataactgggaagtggaagatga

SEQ ID NO: 893 - DNA, 930 bp, Arabidopsis thaliana
  Clone ID: ARATH-23APR03-CLUSTER38242_1
tttttttttttttttttggtttctttatggttcttgttctattaaaatccgcctggtttttcttatccttccattactatatacatatgacatcagtaaaatacacacgagtagaacttttattcatatacatgaaaaacaaatggggtaaaaaatcaaacaacaaacaccaattgacacaaacttggatgaagagggaaagggaaaagactcgatacagaatgaaaagggaagacaaaagagaaacttcttagtgtaggaatagagtggaagctagagcagccccaagaagagcagcgacaaatgataaggaagaagctgcgctgtttggagtgtcttcagaagtagtaggcgtcggtgctggggtcatctcaaaggttcccgagacaggtggagaaggagcggattctcctgagggagctggggctggggacggcggtgatgatgcggtgtttttgttgccgcttctatcagccatgacgatgaccacaagcttctcgtttttcttgcagttgtctttgtttccactaatgaaatagtatggcccagagtggttcagcgtgacagaagttttgccatcggcgaatttagcggttggtgagtccgtgttgcagctgtcgtaagcgtctcttgtgacttggagcactgaatcttggtttgattggtagacgaacaacagagagtcaccaatttggaatctgctctgttctgcccattgactgtacacttgagaaccagaagggacggtccaacctgttgcaccaccgaccgtaaactctctagcgtaggctcggtcaacgatcataagaaaacacaagagaccaaacccacaaagcatcatgctctttaggtttcgtgccatttcgtaagctaaataacagagattttagaaaggtgaaggtgaatctagtgtggtatagggtttgatat

SEQ ID NO: 894 - DNA, 2323 bp, Arabidopsis thaliana
  Clone ID: ARATH-23APR03-CLUSTER3831_1
tacttgctccttttacatttcaacgaacaaaacacatgtatacatagaaagaaacgcaaatacgcagatataataaatggcgactggtcgatacatcgttgaggttgagaagggaaagcaaggcgttgatggaggaagtccatcggtcggtccagtgtaccggagtatctatgctaaagacggttttcctgaaccgcctgatgatctcgtcagtgcatgggatattttccgtttatctgtggagaaatctccaaataatcctatgcttggtcgtagagaaatagttgatggaaaagctgggaaatatgtatggcaaacttacaaagaagtacataatgtagtgattaagcttggaaactctatcagaactattggagttggaaaaggagataaatgcggtatttatggcgccaatagtcctgaatggattataagcatggaggcttgcaatgctcatggactctactgtgtacctttatatgacactctaggtgctggagcaatagaattcatcatttgtcatgcggaggtctcacttgcttttgctgaggagaacaagatttctgagttattgaagacagctccaaaatcaactaaatatttgaagtatattgtgagctttggtgaggttacaaataatcagagagtagaagctgagaggcacagattaacaatatattcatgggaccaattcttgaagctaggcgagggtaaacattatgaattaccagagaagaggagaagcgatgtttgcaccataatgtatacaagtggcacaactggtgatcctaaaggagtattgcttacaaatgagagcattattcatctccttgaaggtgttaaaaaattgcttaaaactattgatgaagagttaaccagtaaagatgtatatctctcatatctacctctggctcatatcttcgatcgtgtgattgaggagctgtgtatttatgaagcagcctctatcggattctggcgaggggatgttaagatattgatagaagacattgctgcattgaaacctactgttttctgcgctgttcctcgcgtgctagagagaatatacaccggtcttcagcagaaactttctgatggtggttttgtaaagaagaaattattcaactttgcattcaaatacaaacataaaaacatggagaaagggcagcctcatgaacaagcatctccaatagctgacaaaattgtatttaaaaaggtaaaagaagggttgggaggaaacgtgcgtcttatcctctcaggagcagctcctcttgcagctcacatcgaatctttccttcgagttgtcgcgtgtgctcatgttttgcaaggatacggtctaacagagagttgtggtgggacttttgtgtccattccaaacgagctttcaatgcttggaacggttggtccaccggttccaaacgttgacataaggctagagtcagttccagagatgggttatgacgctcttgcaagcaatccacgtggagagatttgcatcaggggaaagactttgttctctggatactacaaacgtgaagatctcactcaagaagtcttcattgatggatggcttcacactggtgatgtcggtgagtggcaaccagatggagccatgaagatcatcgaccgtaagaagaacatctttaaactgtctcaaggagaatacgttgccgttgagaacttggagaacatatacagtcatgtcgccgccattgaatcgatatgggtatatggaaacagctatgagtcttacttagtggctgtggtatgtccaagcaagatccagatcgagcattgggccaaagaacacaaagtttcaggagactttgagtctatctgccgaaaccaaaagactaaagagtttgtccttggagagttcaacagagtagccaaagacaaaaagctgaagggatttgagctgatcaaaggtgttcatttggacacagtcccgttcgacatggaaagagatctcatcactccttcttacaagatgaaaagacctcagcttctcaagtactatcagaaagagattgatgaaatgtataagaaaaacagagaagtgcagctacgagtgtaaagaaaggaagttgttggacaaatctctcaggtttatatgtttctcttatcactctaattcatattgttatatgtctctatgctgtgttaatatcgaagggtttttttctttctttgcttgtaaacaaccaaatcttttattgttcttaacattctcctgttttatgtatttgtattgatattttaataaagttctctgtccactaaaaaaaaaaaaaaaaaagggcggccgctgatagcatcaagctac

SEQ ID NO: 895 - DNA, 749 bp, Arabidopsis thaliana
  unsure (1)..(749): unsure at all n locations
  Clone ID: ARATH-23APR03-CLUSTER38334_1
gaaggggtttccnngtnnngggaacccgggtttcccccccccnttaaaccgnccgnnttnancccccnnggggtttttttttttttttttgtctgatgcgtttaataagataaaatcaagagaaaacaaagttctttgaaaggcctcgtaattcatgcagaaacacatctaatacttatgaaaccagagtagtagagccaacacaaaagcttatccattctcatgacaaaaagaaaatgttgtttgcttctttacttcttattaggctttaacaaaatctgtagacacagctgaggcacgcatgaacaccgaagaatttgtttctcttttcacttagcctgaggatgagaagcaataaagtcaacggctagatcgatggactggatcttgtctgcttcattatcagggatctcaaacccaaattcctcctccaatgccatcacaacttccacactgtccaaactgtccaaccctagatcattttggaaattggcttttggtgttaccttagaaggatcaactttttggaagtttttgacgacagagagaactcgatctgtgacctcagatttgtcaaggaaagagcctctaacttcctcggagaaacgacgaaggagaatggagaaaggaagtacacattctctagggttttgaattgttggattgacgttgactctcaggtatcgaagcatagcacctctcgccgccattgctgtgtattgcagagtaagagaaaaacctagcaaact

SEQ ID NO: 896 - DNA, 790 bp, Arabidopsis thaliana
  unsure (1)..(790): unsure at all n locations
  Clone ID: ARATH-23APR03-CLUSTER38381_1
ccttgtaaaggccttcncaattcccgnttanaaannacncccantccntcccaccggggccatnnggaggngntggngggcctntcctatcccagtgcatttttttttttttttttgaatcaaaaataaaagttgatgatattgtatttgtacaaactataaatgatgtgttaacaaaataaaatcttcagtataatcaagattgagagaagacgatctttgtgaaatttgtatagagacaataacagatttgtatctacgttaatatgttgaaaatttcaataaaaaaagagtttcaaaatagtcattacagaagaaagaagaaggaatctagacaaaagaagaattagtgagaggtggtggttggattaggttgaagcatcgaaggaaggacgagaggagacaagagagggatcggatctgtgccgttttgacaaaacgtagacgtagaaacacctgtcgtagtagaaggagcctccgctgaaggaggaggtcttggtggtaagagaagaggacaaggagctcttctctgaagccggcagctaagagatcgtcggaaaacgcaatcgtcgttgtgaactctcatctcaaaacctggaaatggatctcctttacgtcctgaatcctccattcttgcttcttgcttcttgataataatgtatcaagtcttgttttgtgtgtggattggtgtttgggtttgttgatgttttaaaatgttggggactagtgctctctctctctctctctttcgtgccgaattcctgcagcccggggncnaaannnnnnnnnc

SEQ ID NO: 897 - DNA, 1905 bp, Arabidopsis thaliana
  Clone ID: ARATH-23APR03-CLUSTER3840_1
gattatctttttctctcggattggcgttaaaaattttactggcgagatttcggattgagaaaaagaaaagtgactggaatttagggtttagactccggcgaagaaggagatttcaaagcttcgaagacagagaaaatgtcgtcgactctcctcgagcaaactcgctccaatcacgaagaggttgaaaggttggagcgattggttgtggaagatctacagaaggagccaccgtccagcaaggacagattggtccagggacatcgtgttcgtcacatgattgagtctattatgctcaccactgagaaacttgttgaaacctatgaagataaggatggggcgtgggatgatgagattgcagcgcttggtggccagactgcgacagggacaaatgtgtttagtgaattttacgatcgtttgaaagagatacgtgaatatcataaaaggcatccttctggacgtcttgttgatgctaatgaagactacgaagcacgcctgaaggaggaaccaattattgcgttcagtggagaggaaggcaatggtcggtacttggacttgcatgatatgtataaccagtacatcaactctaaatttggggaaagggttgaatattctgcttaccttgatgttttttctcaaccagagaaaataccgcgtaaactgaagttatcgaggcaatacatgaagtatatggaagctctacttgagtacctggtctacttcttccagcgaaccgagccgttgcaagatcttgaccggatactttctaaggtttgttctgattttgaagagcaatatgcagatggaatagtagaaggcctggataatgaacttattccatctcagcatactgtcatagatcttgattactacagtacagtcgaggaactggtagatgtaggacctgaaaagctaaaagaggcattgggggcattaggactgaaggttggtggtactccgcagcagcgtgccgagagacttttcctgacaaagcatacgcctttggaaaagctggataagaaacattttgccagacctccacacaacggaaaacaaaacggagatgccaaatcaacacatgagtctgaaaatgctaaagagattgcactaacagaggccaaagtgaagaaactctgcaatttacttgatgagaccatcgaaaggacaaaacaaaacattgtaaagaaacagtcgttgacatatgaagaaatggagggagaacgtgaaggggaggaagctaataccgaattagaaagtgatgacgaggacggtttgatttacaatccgctgaagctaccaataggttgggatgggaagcctataccatactggctctacaaacttcatggccttggccaggagtttaaatgcgagatatgtgggaactatagctattggggaagaagggcttttgagagacattttaaagaatggcgacaccaacacggaatgcgttgcctaggaatcccaaacacaaagaacttcaacgaaatcacttcgattgaggaagccaaagaattgtggaagaggatacaggagaggcaaggagtgaacaaatggaggccagaacttgaagaagaatatgaagatcgtgaaggtaacatttacaacaagaagacttactctgatcttcaacgccaaggtctcatctgattgatcacatcctcttgatgaaatcttctctccttactatatccctttaaaccatattctacctttcgcctttgtaaaatcaaaccattcgtcatctttttgtgaggtttcgtctcattaaaacagtatttagtttatgtttttgaattgactatcacaatcgaggatataaaatttgtttttgtacagaaaaaaaaaaaaaaaaaagggcgagcgctttacttcaataacaagaaacagatatgagttaatatg

SEQ ID NO: 898 - DNA, 2920 bp, Arabidopsis thaliana
  Clone ID: ARATH-23APR03-CLUSTER3878_1
gctcgggcggccctcccctccctccctccacgacgaatttggaacatccggttccaaattacggattacacagaccctagcctcttccccaaatcccaattctccattgctttagaagaatcacacaatggatctagagattgttggtcgtcacgctctctttttcgacgatgattcgatggcaacgtttgtcaactctccgacggcgctcgttgactggaacagcctctttattgaccgctacgatgttcgtcatctcctctcttctcctcctcctccacgtatcaaacgccgtcgtccgaattcaaacgatgctgacttggaatcggagctcgatcacgagcgttatctagatttaccgtcggaatctccatctccgtcggatgatgatgaacacgatatgaatgaggattcagcaaatacaaatgcggatggttatcgtgctgtctctttttcatatggaagctctagtgatgtcaatgaccagaaaaatgctgctgatatggaatctggatttcacccgcctttccccgtgcctgattacttacgtcaaaacctgcctccaactgagaaattacatcagattatcactaggacttcaagttttgtaagcaaacacggtgggcaatctgaaattgtcttgagagtcaaacaaggagacaaccctacatttgggttcctaatgccagaccatcatcttcacctttactttaggtttcttgttgaccatcaagagcttttgacaggaaagtcttctgtagaagagaaaaagaacgaaagtgagaaggatggtggagctttgtcattgcttggttcggtttatgggactgtagaagatgaagatgctaacgaagagtctgcaaacgactccaaaacaagtgagtccgccaaaggtgatgatggtgttaaggtaactgattccaatggacctgaagggtcgaaaggagctgcaaagattgcctctaagcattctctgccgttgaatgatcatgcatctttcataaaaagaaatccctctgtcagcgcagtaaatgttgtagagaagaagcagatcaatacagaaaaacttgtgacgtctgataagtcgcaacccaagcttgaactgcagattgtggagccgactactgagatgaaaagagtgattgataagatagtagacttcattcaaaagaacgggaaagaactagaggctactcttgttgcacaggatgtgaaatacgggatgtttccattcttacgtccatctagcttataccatgcatattatcggaaggttctccaagaagccgaagagttaaaatcaggtgacaaaggcgttattatcagaaaagaagacgtgaagcaagagaagatgggcaatgctgtaaaagatagcaaacacgggtttgggagtgttttaccagatgattctgccaagaaagagaaactaaaaatggttagtgacaaaccaaaggtcgagttgcacaatgaaccattcaagcctgtccaaccgcagatgagggtcaatgtggatgcgaatactgctgctgctattcttcaagcggctagaagaggcataaggaatccccagttggggattctaacaggcaaacccatggatgagacttctcagacccttggaaatgatgtgagttacccttcatctaagtcccctgatttggccaaatctacaggtcaatcactctctggctcgactgctgctagtgaagctgattcttctgaagcaggcttgtctaaagagcagaagttgaaggcagaaagattgaaacgtgcaaaaatgtttgtggccaagttaaaacctgatgcgcagccagttcaacaagctgaaccgtcgcgaagcatatcagtcgaaccgttggactctgggatttctggattaggtgctaaggctgccaaagaaagagacagtagctcgattccatatgtagctgagtcaaaactagcggatgatggtaacagtgaaagacgatcaaagaggaattaccgttcgagatcacagagagatgaagatggtaagatggaacaaggagaagaggaagagagcagcatggacgaagttacagaagaaaccaagactgataagaagcattcatgtagtagaaaacggcataaacataagacacgatactcttccaaggacagacattctcgggacaagcacaagcatgagagctcctcagatgatgagtatcacagtcgttcgcgtcatagacacagacacagcaaatcttcagataggcatgagctttatgattcttctgataatgagggtgagcaccgacacagatccagtaagcatagcaaagacgttgattattctaaggacaagcgtagccatcatcacagatccaggaagcatgaaaagcaccgtgattcatctgatgatgaacatcatcaccaccgacacagatccagtagacgcaagcacgaggactcttcagacgttgagcatggtcatcgtcacaagtctagtaaacgtataaagaaagatgagaaaacagtggaagaggagactgtttcaaagtcagatcagtctgatcttaaagcatctcctggagataacatcccgtatctgcaaaatgaaccatctcaagtttcggatgagctaagagccaaaatccgtgccatgttagctgataccttgtacgtttcttctaactgaacgactcttgaagactttctagttctatttaggtgtctactagtattaagttgacaatgtcaatgattgggtctgatcgattagcgggtttgttcggttttcaggggagatggtcggtgagcatctgaagcataaaggtcaccgatgttgcctacgagaagaagagttgtaatattaaattttaatgtattttgcaaactatttacgaaattactctgaaaaagaccttttaaagaaaccgtaaaaaaaaaaaaaaaa

SEQ ID NO: 899 - DNA, 699 bp, Arabidopsis thaliana
  unsure (1)..(699): unsure at all n locations
  Clone ID: ARATH-23APR03-CLUSTER38833_1
nttctttttttttaatcgtgataaaagagggaatcatttatttatatgggggatgcatggtaagcatcgatgttgttgagttacatagagataaaaaggtggagtaattagaagcgatcaatgattctcatggcagcatcagagagttgagtatagatactgatttgactaaacagttgaagaaactcaaactcgacacttggttgctttaatccacagctatgaggaatgctagcatactctatcgatttggcggctttgtcgtaatcaccggttttcagacctgttttggcttccgacagtagtttaggtgccaccgtcgacgtgtcatttctgcaatcctccaagatttttctcacttctttcgttcctcctcccagtgacaatatatttgtaatgttattggtgatgatatcgagacgagagtcgagacagtgtatgatgatctcggcgatgccaacacggtctgcatgaacggaggttgggtcggattcaagacattgcatgcaaatggtcggaacttgtgcattatggcattcctctttcatcaggtccttctcggcgcaaatcggagagatcacgagcagagctaacaggagaaacttgatcattatcgtcattatgcgaagtatatttcctatgattgattatgttatatttctttgaggggtgtgaatttcttatttgtactaagaatat

SEQ ID NO: 900 - DNA, 1964 bp, Arabidopsis thaliana
  Clone ID: ARATH-23APR03-CLUSTER39104_1
tgggttttttgctttttgggaaggttaaatttactcttttatataaatgtttgagtttggttatatggccacatgagaggcaagaacaaaaaaagaaactgtattctcatggtctatgggaacacatttctatggactttttgtcaagaagatggcgtccagtgattcgactcaatctgcaagactgttcaatcattaatctctgaatggagtcttgttcccatgggactattccaaagtcatcgttgaaaccttccatgccttctatcagaaactgccacactagtgttcctgcaccagaccgcttccgcttggctgatttgtaaataacatcaaagatggttctgtagaaccgatcccgctgcgatggatcatagtccttgttcagattcgagaggccaaactcagtgaacagaacaggcttcttcagttccttgtccccatcttcaatgtgagatagcatccattttacaacgaacttgagtttttcttcaaacccttgatcgtgaaaccagtgatcagggtagatatgaaccgaggcaaaatcgatgtttggcgaatcagagtttcgaacaaaatctgacccaagctcagaggcccaccgttggggttaactgtcagctttttagggctattgggaccgtagaacccttccaagccaacggttagaagatgcttgttgtcaattgatttaatgaatgctgtcatttcgttaatccagtcttgtagagtatccccagagacatcagacatgcagcgaggctcgtttatcaactcccatgcaaaaattgttgggtcgtttctgtactcaatcccggttaaagagtttttgcgggtcagcagcaccgtgagataattcttgaagtatctgcggatagatgggtcaaagaagaaggaatcattggaggagctgaggcctacaccttcttgccatgcccaattgacgtactgagtcttccctccataagcttgtaagttattcactaagctcagaagcaacctaacaccatgtgttttggcctctgcgattacatgatccaaagccttaaagactcgttcatcgaatctaccaggagagatctgaagagcattgtagcctccatcattaaaagcccatgttctacaaacagtgagacccattttagctccagcttcaagcatagctccgacacggtgtctactatgatcattcacagcatggtccatgaaccaataagagttccaaccattcacatacagagccttaccatcgaccacaaactgtgtcccattccgtttcacgaatgctaactcgccctccgttttgagaccgaaccacaaatctccaaaggagagatagataaaagccacacatgtaaggaaacctagaattggtatcactggccctttccctgtaggagccgccatgcctcttcttcctcttattagattctgatatttcacaatcgcttgtaatctcgccagtttcttccgattcctcaccaattaatccaaatctcacccagatagagaaataaaaattaatccttttgagagaaatgtaatcaaagtttcaacctttattgacacagtgacacccaaaagatcaaaatgtgtccacgtttcggacgatgtgaagaaaatctcagaaaacccagattttattataagaaaacaaaagaactcagaattgaaaatgtctccttttacactttgagcccaaaaaaagagaacttgatgaatacacacataacagatctctctctctatcgctatgtggagactggtttcaagtacattaagttcaagaggtggcggcaagaaggctcaggatctatcattcacaatttacaactagatagatattgtgatccccagtaaaagaagagagatatgagaatgatgaatgatgaatgatgaatgatgaagaaggaagaagaaaggtgaaaggtagcaagtaagattcaggatacacgcactttgat

SEQ ID NO: 901 - DNA, 1621 bp, Arabidopsis thaliana
  Clone ID: ARATH-23APR03-CLUSTER3910_1
atggtgaaggaaacagagctaatcttcattccagttccatccacaggtctgattctcgtccatattgaattcgccaagcgtctcatcaatctcgaccatcggatccacaccatcactattctcaacttatcctcaccctcttctcctcacgcctccgtcttcgccagatctctcatcgcttcccagcccaaaatccgtctccacgaccttccccctatccaagatcctcctccattcgatctttaccaaagagctcccgaagcttacatagtaaaactcatcaagaaaaatactcctctgataaaagacgccgtctccagcatcgtcgcgtcgcgtcgtggaggctcagattcggttcaagtcgccggtttggttctcgatttattctgcaattcattggtaaaagatgttggcaacgagcttaatcttccttcttacatataccttacgtgtaacgctagatacttggggatgatgaaatatattccggatcggcatcggaaaatcgcatctgagttcgatttgagctccggcgatgaagaattgccggttccgggattcataaacgctattccgacgaaatttatgccgcctggattgttcaataaggaagcttacgaggcttacgtagagctagcgccgagattcgcagatgcgaagggtattttggttaattccttcacggagcttgagccgcacccgtttgactatttctctcacctggagaaattccctccggtttacccggtcggaccgattctcagcttgaaagatcgagcgagtccgaacgaagaagcagtcgatcgggatcagatcgttgggtggctcgatgatcagccggagtcatcggtggtgttcctctgtttcgggagcagaggaagcgttgatgagccgcaagtgaaggagatagctcgagctttggaactcgtcggctgcagatttctttggtcaattagaacaagcggcgacgtcgagacgaatcctaacgatgtgttgccggaggggttcatgggccgagtagcaggccgaggtttggtatgtggttgggctccacaagtggaagtgttggcccataaagcaataggaggatttgtgtctcactgtggttggaactccacgcttgaaagcttatggttcggggttcctgtcgcaacgtggccgatgtacgcagagcaacagcttaacgccttcacgctggtgaaagagcttgggcttgcggtggacctgcggatggattacgtgtcgagtcgtgggggtttggtgacttgtgatgagatagccagagccgtacgatctttgatggacggtggagatgagaagagaaaaaaggttaaggagatggctgatgcggcaaggaaggctttgatggatggaggatcgtcttctttggcaactgctcgattcatcgcagaattgtttgaagatggttcgtcgtgctaatgcaaatgttggtgcgataattcgtcatgcttacttatttgataccaaaaaagacacatgctaagtttttaaaactaaagatttttcttttcactacttaaacttatatgtacaagtgaaatactgtacttcaagaagcaaaaactatggcagtctttatggtagaaaaaaaaaaaaaaac

SEQ ID NO: 902 - DNA, 1738 bp, Arabidopsis thaliana
  Clone ID: ARATH-23APR03-CLUSTER39121_1
ttttttttttttttttggttaagattgcacacaactttttttgatgaaagaaaggaaaatgtgatattgagtataatttgaaaagattagtcttaagttacatgattccatcatgttgttcaagttagaaaccgaaaccaccaaaaccgccaccaccaccaggaaaaccaccctcgaaatggaaagtgtattgttgtccaccaccaccaccaccatggaacggattatatcctccaccgccgcctccacccatatcttcaagatcctctcctctgtcaaatctcgcccgcttatcgtcatctccaagaatctcataagctgcagcgatttctcggaatttgttctcagcttcttctctattgcctacgtttttatcgggatgccattgaagagcaagcttcttgtaagcttttttgatttctgagatagaggcggttctggaaattccaagaatcttataccaatcttttcgtttgctcatcttcagtgctttctctgctttaccaagtgattcatgaatttccatgtcctgagagttttgagcagcttgctttaaatcctccacagctccttcccaatcttcaagcaacagtttagcttctcctctctgatgtaaagcttcaatcagttctgcatcgatgttaagtgcttcattacagctatttaagccgtcttttccacggccgagcctgactgagaccttgcatagtccaagatagagatgaacgttatttgccgtgtgttcagggtccagagcaatagcttctttatattcctctgctgaaactcgcaactttcctttgtttgcattatcttctgcgctttttgttttcttgagcagttttttcaatccgaagtatgctttcttcagttcactgtgttccggatcaagacgaagccctttttggtaatgcctttgggcgatatcatgatccgccaaatagtagtaggcacggccacgaaggagcaacgcctcgaggttattttcatcttccttgagaatataaccagtctcagaaattgcacctgagtagtctttagacaccataaggagcttcactttgagaagctttgccttagagcaagctggagagaagacaagaacaactttatcaacaaattcaagagctttcgcaatatcctttgattcatacagagtcgaggcagtctccaaagcactcttagcttgatgaagctgagagagttctttctcagcattcgaatctcctgatttgaattccagatatttctggtaactattctcagagtcttcgtatctgcaaaaatgacgaagcacagaggcacgcttaaaataagcttctgaaagcgcagggtctgcttcaatggctgcattcagatcatcgagggcatcactataacgcttaaccttgatactttgtgaagctctctcgaataactcagcagcatctaccgattgaccatctagagcggaaacgagaggttggagaagaagaagttggcaagcaaagacgaagttgagaagaagaagtgtgtaagccattcctctccaagctaagaaatccatccctgaccaaactcggaacagatccattctcgatttcaatacatatacatacacctctgaatacaacgaagattacaccgacaaatttggaatctttggaatcactgaaacgaacgaacgaagaagaagagtctttgattcaagcaaatttgtgtgtttcgaattatcgttcttcgatcgaattcgaagcca

SEQ ID NO: 903 - DNA, 1330 bp, Arabidopsis thaliana
  Clone ID: ARATH-23APR03-CLUSTER391_4
aagtgttagctgctgccgctgttgtttctcctccatttctctatctttctctctcgctgcttctcgaatcttctgtatcatcttcttcttcttcaagtgaaaaatggccgatggtgaggatattcagccacttgtctgtgacaatggaactggaatggtgaaggctggttttgctggtgatgatgccccgagagcagtgttcccaagtattgttggtcgtacaaccggtattgtgctcgattctggtgatggtgtgtctcacactgtgccaatctacgaggggtatgctcttcctcatgctatccttcgtcttgatcttgcgggtcgggatctcacagactcactcatgaagattctcactgagagaggttacatgttcaccactaccgcagaacgggaaattgtccgtgacataaaggagaaacttgcttatgtcgctcttgactacgagcaagagctagagacagccaagagcagttcttcagtggagaagaactacgagcttcctgatggacaagtcataaccatcggagctgagagattccgttgtcctgaggttctgttccagccatcgctcatcggaatggaagctcctggaatccatgaaacaacttacaactccatcatgaaatgtgatgtcgatatcaggaaggatctctatggaaacatcgttctcagtggtggttccaccatgttcccaggaattgctgaccgtatgagcaaagagatcaccgctcttgcacctagcagcatgaagatcaaggtggttgcaccgccagagagaaaatacagtgtctggatcggaggatcaatccttgcatccctcagcaccttccaacagatgtggatttcaaagagtgagtacgatgagtcaggtccatcgattgttcacaggaaatgcttctaagtgtgtcttgtcttatctggttcgtggtggtgagtttgttacaaaaaatctattttccctagttgagatgggaattgaactatctgttgttatgtggattttattttcttttttctctttagaaccttatggttgtgtcaagaagtcttgtgtactttagttttatatctctgttttatctcttctattttctttaggatgcttgtgatgatgctgtttttttttgtccctaagcaaaaaaatatcatattatatttggtccttggttcatttttttggtttttttttgtcttcacatataaatattgtttgaatgtcttcaatcttttatttgtatgagacaattatttaagtatcgggtgacaatgcagctattatgtattgtcgattgttaaaaaaaaaaaaaaaaaaaagggcggccgc

SEQ ID NO: 904 - DNA, 1521 bp, Arabidopsis thaliana
  Clone ID: ARATH-23APR03-CLUSTER39206_1
cgacaaagtcaaatcaataataacctatgatactcttgtgcaacaccaggtacaaaatcattgagtgtgcttgtggttttttggggtcaaacaattatctttttgttgaatctttagaacccgcaatccgaacacacaaggatcgtaaagaaaacagaggaaccttcagttttctagaactataggctcatacatacgttatatactccttaaacctagatgatcatatatatatagacaaagtatggctcttgaatatgtaggaatatatatgaacctggaatatgaatatgttagagaaagaatgtaacagcttctcaacttgaaaggcttttcttgttccaagaattgtcgccgtaaggccttggatttttcaaatggagcaacatgaagatgatggatatgactacggaagaggaaccaacgacaagataggtgatgcccaggaaatcatttcttcctcctaaccaatttgatgtggagagaataagcttcttctgcccactaaagctataagtgttgtaattgttcatcaaatttacttcaacaacttttcctggttccaagtcctcttcgattcttccatataatttccggaagcttagcaaagcagctgctcgcatccacactataaagtcctcttggtcacttagtggaagttttggatccaactttgctccaccaatcaaagttccgttctggaaattgataggatacacattctttccaaacttgtgctcgcggtcactcttccacgcaatgttattccggctcacattcagttttgttctttcacgagaaaacgtaaatgtatcattgaacatactccaagcgattaacccacaaggaacaattgggagaccattagatgactcctctggttcacaagaacttgtgtggctatactccagtccatgtaatagttgctgatcacttctactctttacataccggcgatggttttgatagtagttatcaagctggtagtagataaaaatgggagctttcatatacttttgtaccttcaagtagcgggtacaattctttgggatagatgaatcagttatatacaacagtttgttggttctatattcttcaggaatgcactcaacatcataccggtctataatttcaatagcatcacgagaagcacgaagagtaatgagaccaatgggaatgaaaacaaaacccattaacataaacactgttataaccgatattggtgttaagactggcttacaagctgggagtttctgctgcttaaactgatacagagctttggatcgtcttgatcgtaagaaggatgattgatcaggagcacgattcatcgatccttccacttccatcattatcccctctctcgactacttaacttcactgatacatcgggaagaagaaatggtttactctcttcgccgcggggataaaaactccggcgtcactcaccggtgattcgatctagaatcgcgtgctctctggtagattccacctgatctaagattttttttgaatttgtaaatt

SEQ ID NO: 905 - DNA, 1519 bp, Arabidopsis thaliana
  Clone ID: ARATH-23APR03-CLUSTER39227_1
aatatgtgtggaaacaaatctataaaggatgattaatatacaacaacttatgattgtttacaaactctatacaaagcaagatatatatagaaacaaatccgaaattttaatgacaaagataaacaatgcaattaaggatttgtttgtttgggaaagaaaacaaaaaaaagaaatatgacaagagacaagagctccagaaacacgtgtccactatttgaacgctactctctcttcgtcttctctctctctgacaatccaatttctccagataaaacctaaataaaatccctttctgcgcatgttagcaagatatggttccagagtaaactgaagaccaaacaaaacaaaactcttttctctccttcaatttctccgtctctctctcgttttccatggccgagttacagttagtagaaggtcaccagattaacggcggttttatcccgccggcgataataaactcaatcgaagcaccggaaacatccgccgcagccggagtctcagtcggatcgaaacgattgagaagacctagcgttaggttaggagacatcggcggtgaccagtaccaccaacacgtggttgcggcgtacgattctccgcaagtccgacggccgaaatggagacctagtggtggtggtggtggtggtggtggtaacaggaaggagccgaataatcagagtgggaagacgacgtcgtcttcgaggactcgaactatgacgaatttgagctccggtgggtatgagaatactggaaccctagatgaagatccggtttcgattgggagttggcgggttaagaaatgggtcaaatcatccggtggagagacggcggcgacgacgacgacgaatacagcttcggcgaagcgagttaggtcgaattgggcgacgagaaacgatggtgtagagcaaggagatgagaaattcagtggagaggaagaagaagaggaagaggatgaagaattgggaggagaagaagggtttagggatttcagcagagaagattcggagagtccgatgaaagaacgaagacggtacgagaatagagaggttgaattgttaggagattggcaaagtggaggaagaggaaaagaaggagtgaagatatggttacaagagttagggttagggagatattggccaatgtttgagatgcatgaagttgatgaacaagtgttaccattgttgacattggaggatcttaaagatatggggattaatgctgttgggtctaggaggaagatgtattgtgcaattcagaagcttgggagggagttctcgtgaaaaatggtggaagagttttgttttttgtgaccagccattggcaatgtctgaaacttaattctctcttttgatgtttttttggtttgaatgtaacattttagttagtttgttgtaatggtagaggaagatgaagaaggattaacttatttaaaaaaaaaaaaaagggcggcttttgatggttgggaacttaattgaccaatttatccaaaaccttttgatacataaaaaaaaaaaaaaaa

SEQ ID NO: 906 - DNA, 1855 bp, Arabidopsis thaliana
  Clone ID: ARATH-23APR03-CLUSTER39232_1
aaaaacaaactatcgccggccgttcaattcccggcgacgtaacagagtttaggagtgtgactcaagctcaaaaaactcgttttgtattcgatgagcatctcgcagtttccgccgcctgcttctccatctccggcgtcttcttcgcgatcgctggcttcttcatctccatctccggggagtttttcgtcatcgatgaggctatggagaccagctgctcagcggaatcttaggaaccagtggtctaacctgtcgaattgtcggcaacagtggatcgtcgcttgttctgcgggaagatctcacgctactttgctagtcaattcgtatctgtcacaaaagtatatgccaatgatggagcttggtgtgttgagtgacatgtttgatatcgacaagaaagctttgaagaagctgtttacgcaacagagttcctatcgaatcaagcttttatcttcgtacaaggaaatggtagctgttgttgttgagatggtaaatgcaagcagatctctgagatgttacacgaagctgagtaccgggtcacttatacagttctctggcactaaggaagattcaaatgatgctggagattgcggtggcattcctgtgtttaatttttggaatgtctctgcatttgagaagatggctgaggagcttgtggagatgttcaaacgcgaagtaatgctaaagagattgctcataatggaactgatctctttaagcactgaagttcctcaacccatcaacaacagttggtcagatgagctttaccatggagaatttgatcatctcaccaaatgttctttatattctatggaagtagctaagccagttctccccagagtgaaagattataatatcggtagttcttctatatcacataccaaccagccaaccgcagaaattttgcagatttacttgacaacttggcttgcagaagtaaacatcgacactcatagggtggatgagatattagctttggttggggaagaaattagagtcaccttctaaatctcgaaaggtgttcacaagttcagcttctggttaagtttcagtgacttttatacaaagcacaactgattctacaaaagtactcaaggacttgagagagagagaggtggttagaaccgtagctgtgtaaacaaaaattgccacttactgctatattttagcttgtttactggatttcttactggggcactgtactgagcgatatttctttactaaagtatacaaatggatttaacttacaatgtttctgatgatgcatacagtaatgctacatatttagtagaggatctcccgctttttgacaacggaggcctttactatactcaggattccgaccaactaactcatacccacccaaaaatagaaagatttggggaaatagatatgaaagcaaagaatggggaagattggccaaaaagtgaattatatggatccatgaatagttagagagagagacattgtaccctgtctggaatattctgaggcattggagctatggtaacatatctttgtaggtttaacttaagtgaattcacggtccggttcatagatgaagatggcgggtggaacttcgcaaaacgattgatcactgcaaacttctctagatcctggacttcgactctcaagtctggaattgtagttccattttctagccctgcaaagtcagtctccagtttccgtgttctactaatgaaatcttcagcagctttggagatgtactggtcactgattttttcattttccgttctctcagacaacgggtttgagttgtttgggggcgaaaagccctcactcctgtcggtactactggagctacatgcatctcctagtgcaactcttccagcagtatatg

SEQ ID NO: 907 - DNA, 1770 bp, Arabidopsis thaliana
  unsure (1)..(1770): unsure at all n locations
  Clone ID: ARATH-23APR03-CLUSTER39459_1
tttttttttttttttattgaattttatatcagatatatattattgaatggtaaaaccccaaagtctcattctctttacaactaatcacacacacctgaggaagaaaaaaaaacaacaactcaagactgatcctttcaaagcaagaaaatgtacataagtcaacgctaagtagtggtcattgtttcaagtttttcatctagatcaaaatttaatcaaccacctcatttgcaagggaactcacagatgcttgcttagtctattgggtgcttatcaatttgacgagatgtgtagtgcgcagaaagcagaagcagagaaagaaaagcgctagccacgaatattgcatcaaaccatcgatgatagaaatcaaactgaatatctccgcctaatacatctgttattatccctctgtactcatttctcaagctttttcttataagaagaatggaagacaaaaagtacattcccatgatttctgataggaagagcacaacattgcttgaagatccacttccaaccctcgacactgcaaagaagaacttcatcagattcgtcaagaatcccctcactgatatcacgatcaacatcccaataaataacagggnaaatatactgtgagagcaatgctgcatctactcctatatcaaagaactgcaagaatatgctgatcatcatcgtgacaggatctttcgtgcccgcctccttgaaaacgacactttgtagagactttaacatcttatacacacagtaaatggaacacgcatagccaagaaagttctgcacatgacccttccaagttcgagaaaaagcagcagcatcctttgcttggcggagttcataaatttccaagaatagctgctttgacagctcttctaaaccttccacctctgcctccattagttttatatcttgctccttttggtcatcttgaaccgaccgcacaacagtcccgacaaatcttctaaagaaagatttacccttttgatgctcttctgatactagacttcgttccacctcaacttgacataaaagaattttcttcttcttagctatgcaagtctccattgattgcatcagttgcctttccagcgattttatttctgattcttcaatctccctaataaagagcgatatataactgtagggcaaatttacagctccaaaacccgataagacggccatgagggtcacaccaatgaccccgattctgctgaccagctgaggcattgaaaagaaacctttgtctgaaggcataggaaaatgtattcccatgcgccagaaagcataaaggaacgctgtcaagaataacaaggccccaacagcagcacgctctcttcttacaccagtgttacgaagcatcaaatagcaatgataataaggtaacatgaaaacaaggagcactatcaaacaaaagagatccaccttccagtttaccatccttgcctctctagataaaacagggatgatttcgaagagaacaagctgtaaaaggttgcaagagaaggcgaagacgacgctgaaaatgatttgaaccaaagctcgcttctcttcgtactctttgtaaagcctccggttgagaaaccatagaccagccgatcctaagagacacagagatccaatcaccaacattccctcgaagatcccccatccgtaacccatctctctctaataaggaaacaaaactcagatctctttctctctaccccaacactctcatcagagtctcaagcttccgctattcgactgaatttgccgacgaacggtggttcctat

SEQ ID NO: 908 - DNA, 1486 bp, Arabidopsis thaliana
  Clone ID: ARATH-23APR03-CLUSTER39475_1
tttttttttttttttttaaaggaatatactctttgagtgctacgtaaaacaagaacatgtggtcattgaagttatttccatggaattgggtaaaaagatataaataacacaaaacatttgtataaccaaggaaactttagatcgaagcctagacactaatctccgaggatccgatctcttggtttagataacacaaaacatacaaaaattatagcagaacaaattgtacctgaagactatgtttctttctctatccatctgtctctaatcttttgtgcggccaagttcaacatcttttgattgtgtagtttctacaccttccttcaaaagttcaaactcttcctctgttaagctatgtttcacactgtttaaagcctttgctgcaataatcgactgtttctccaattccattgcccaactatagattaccatcccaacaatcgcaacaatcatccccgctacgtttttgaaagtcttcgcagcagcgaatccgggcccgcctggcgccaggccgcccacggcggtcatggcgccgtgaactccggtcggtgctgctgcgaaccgaccggcgcatccggacgggctcatgtggcggttctccgctagaccacatgagagaagaatgaatagaaagcaaccggaagacatattatacttcataatgaacttcccactaagaagataatcaactaaaggaccgacaacaagaagcgaaaaagcttgaatcggcgctgttttactcaacaactcaaaggacccaattgaatatttcttctgtagagaacctattaaaatttgctgcaaggatgacgagaaaatcgcaacacaagcacagataaaacctttggcattaactttaacatcagtcacagtacaaataccaacaccaacaacaacaaccacaacagatattttcacttctcttgagtatctcttgctatgtagaatccattccattacacacaccacaggaatcatgctcagcttcgagatttggtagaagccaacggaattgagcatgagactgaagttcatagcagcaatagagacattagcaacaatggagaaccaaataagctcccacataggaacatgcttcgaagcagagaatccggtagcgtttgataccataccgaccaatgcggttaaagcgaagtggaatccggtgagagttgtagcgaaactaaatgcgaatccagaagaggacataagttgtttattcgccatgatgattccaacggagcttattacattcattgcccaagctcccatatcggagactgctgaaggagattttctctcattctccgccgccatctctggtcaactgtcaccaccaccaccgtagaaggagatttccggtgatgcgatctcggagacagagagatagagagatagagagagaaagagagattcacgctttgttggaggctcaccttctgagagattctcttttctctctttcacgttgagaaaaatatctgac

SEQ ID NO: 909 - DNA, 1528 bp, Arabidopsis thaliana
  Clone ID: ARATH-23APR03-CLUSTER39493_1
ttttttttttttttttgggggttttttttttttttttttttttatttttatctgttttaccttaaaaacaactaatatcaagaaccgggttacattcagaatttctcgaccacaattcgtttacggtttagagaacatacagtacaatgccattacagattctccattttgttctacattaaagagggatcaggtaaactcaaaaaaaccaaaactatagtgagtaggatcacagtgtagtaaccggtttagctgggcaaatgaaccaagtttcggtttgataaagatgtcctcatttcacagttcagtccctgaggggtttcattcccagtgatgctctcagtctattcatctctgcaatttcaggatttggatgatcggttccatcttccttcatcttctccttcttttctttctttttcttaggttcttcccgatcccgcacatcatcagtttcatgtctcttacgatccctactcctgcttctacttctgcgccttgccctgtctcttctgtctcgttctctatctctgcctctttccctgtccctatctcgctctctatagtgatccctgtctctctccctatcccggtctcgaccatgcccacgttctctttcatagtctctgtcatgatctcgatccatatcatagtctctgtcataatcacgatccctgtgtctatgactgtcgcgtctcctgtctctgtctctttctctttctctttcaggactcttacggcgctgatccatctcatcttcagatccatcagcaatcccttcattctcctccttttcttcctcttcttcaaagtcgtcttccaaaacacttttccttggctctaataaaccattctgttcaagcgtccaccttttcttcaaacgtggcattgcaatatcacaagaataatccttggttagaagttcctcaatgacttcgtccacatgtgtcagcgaaaacttcccatcagataacttttgtctcactttccggtagtcattgtagagaggttcgaggtagcgatagacatcaacatcagtcccagtgagacgcagatagaacgcaccaagaatacgaacatatttgtagtcatcattttttatgaactccacgacaatttccttctcaggctggatttgaagcatcttcaatatgaggcaaaggaacggagtaggcttgcggctaccaccaaaggtaccacctagatggtcgagctccatagctttgtccaccaatgtctccgccgtgagaccaaagcactgctccttccaaaaggtgtgctgataaatcttcgttcgcacaatcttctctaccagattctgcggattcgttcctcttatattctttgccaacggatctgttctgtttgccattatcgcctgaagttaatcagaaactgcctcaaaggcctagtcgtcggaataataaacgtcgagcgacgccgcttcagtgaagccggaatcgatgaaacagcttccacgaatttgccgtcgtcgaagacgaacccacgctaggtctttgaagaatct

SEQ ID NO: 910 - DNA, 717 bp, Arabidopsis thaliana
  Clone ID: ARATH-23APR03-CLUSTER39519_1
ttttttttttttttttcctttttttttttttttttttttttttttacccttttcaaacatagaatcattctcatttccatcatatcatcatcatacaaacataaccctaattgcatcaaccatggaatcaaaaaccatgtctctaacgagtaaaagcatataacataagagaaacatagatgaaaagtgcagaaggaaccagaatcacaagcggcacaacagctgcataagtatgaccactagcaccacagcccaaagtcccaagcttgatctgaacaacattaatcaaagccaacatgagaaacccacatccacaaaccgatcccaaaccggatgtaaccatcccaaatctaagagccgtcttgttcacatagtaaaccacaggatcgattcgagtagagatgtgaaacgaagaagctatgttgagcctcattgcttgtttgagacctagagcgatgagacttgagaataggaatgatgcgaaagagtacacatggaaggcgacgagattctcagccatacgagctgtggggacgcaattagggtcggttacgaggctgttgtctggatcggtagggttccaagctaatccgatgaatacggcgagtgtgaagagtgagttcacgttgacgattccgtcgagagctgtgatgtgaatactcgtcgtcatttttctctccggcagatccggccaatcagagagagagcttcgttcag

SEQ ID NO: 911 - DNA, 821 bp, Arabidopsis thaliana
  Clone ID: ARATH-23APR03-CLUSTER39524_1
tttttttttttttttttatgggttgtttcttcatttaacttaaaatgattagagaaagtgataatacatgataagagagcctacatattaatctatgtgggttgttgaataaatcacaccaaatccctttagattgatgatttctccttcattcttattatttgctgattttacaaacataatataaaatctataaatatcaataatcaattatatataattatgaattaatgacacaaatccatgtcttcgaataatcttgattgactaagtgaaaagagatgctgcatctctgtaggttcttcttgggttagtagaagcatgatgaaaggtgatgctttcttggttgttgttgttgagagttgtaagattgttgtcatggccatgatgaggaaactgttgcttggggataaaggaaccgatgaatctcccttgcttcttctgatgaggatgatgattatgtttccttcttggctgagaagatcttgggataaacactcctgttcctttgctctctcgaattacgttgtaattgatctgctcattgtacatcatatatggtgttgctgatgtttggtagtttcctctgaacaaaccctggaaagagacagaagaggaaagtgaaatagggttttgttcatcttcatctgtgattaagagattgagttgcttgcttatgtcagcaaagaagacatcatcatcaagctcgagctccatggccatatatctagtctcttgattagcctgttgttgtctctagaaagaagtagtttttaaaaaatggtctcaagtggagttgtcgctgttccagacagcgatga

SEQ ID NO: 912 - DNA, 873 bp, Arabidopsis thaliana
  Clone ID: ARATH-23APR03-CLUSTER39558_1
gacaaaaacaaaaaaatagtataattatcattttttttttttttttttaatcaaaaccaatataaatcatatagtaactaaacgaataaaagaggacatttgtcaaattcacatggaaagaaaaaaacaaaactccaataatgaaaaatgaataatttccaaagaaaacaatctctttttttcttcatcatcatattttggtcttttactttcacttttcacccatcctctttttcttgttttcctattttacccttcctacatgaacagttctgattgtagcaacgtgtaataattagctgcttcatcctcaagctcccaaagcccaacaccaaacccatctaataaactaaacccattaacgtaatcctgactagtctcactcttaatcatctcataattactcccgccaaattcagtgttagggattcctagttcgtcgtcagttgcttcaagaagatgcttcatcactttctctttatctccttcgtactcatcttctttcgaagtgcatgaagaagaggaagaggagcaagaagaagagagagaaggattttcttcgaaaacggcagcgttttgctcttcattagaaatttcttgctgaagcgtggtgattagggaagttatgtcattctcggcttcatcttttaagagagttagaacttggttgtacgaggaagaagatgaagaaggcttttgtcttttcgtttcttcttgtgttttgatgatttcttgttcttgctcatctctttgacgcttcaatgaagatgttactgttgttgtttctgccatttttggagaagaaagatagagaaaacaatggtttttgtttagctttttaaatcgtgagagagagaaaatcgttgtggttat

SEQ ID NO: 913 - DNA, 852 bp, Arabidopsis thaliana
  unsure (1)..(852): unsure at all n locations
  Clone ID: ARATH-23APR03-CLUSTER39653_1
ggangncttttcttaaaaccccactggnnaaangggatngtntncagccnntaattggnaaacccnaggggttnccnatnnnncngtnttaanaaccgncccataaatttanannnaccccactaaaggnnaatgggnncngncccccccntcnagtttttttttttnttttttanaagttccccatctaaggggataacgtcgacaccccccgtggttcccccttttaaatgttttcatgagactttcccaaagaaaaatcaagattattatcattaatacattaccattattggtcctctttccacatctctacccaattctcctttgcctctttgagtccaaaaagagagttagtcttggccgggtccaggtttgtggacaagcttccgtacgcaatcccaagagccgacgaaccaaaggtcacgagtgtggtcaagtatggaacccacaaaggcacgtcccagacgtttctatccttcaaaacttcgagtactttcaagatcgccactcccaagcccagtggtgttcccacagacaccacaatcctccccatcatcctctcgaacacttcttgaggtatcgggggatcgtcttccgggtccgggtctggccggccgggtttttcagaggttctagaagattgaaaccctttaggtccagcgtggagcttggattcccatcttggtttgttgttaggatatagggtttttggattgtgagatttggttttgacggttgttcttgagagagatgataatggtagtaaacggtgtgagcacaagagagctctcatttctatttcttcttctaatgttttttcgttttctcgcagccgtacggatgcgtgtg

SEQ ID NO: 914 - DNA, 751 bp, Arabidopsis thaliana
  Clone ID: ARATH-23APR03-CLUSTER39679_1
tttttttttttttttttattttttttcttgtactatgattttccaatataatatctgtctcaaaacatttgctaatcaagcgatacattatactccaccctttatttacattatactagaaagatggatttctctgaactcaacttgtgtgctatatatttagtgggtggctaaggaccagaagttgagaataaaggaaggagacaccgcaaaccagctgatgaaggccattgctgtggcagtctcaaaccttgtgcagtgattcacgttacattgtccaagatcgttgatgagtacagttatgccagcagacgcagatgcagctgcaaatgtgagcgtagatgtgactccatctccaacagtgaaacattgaacaacagagtgatttcgaaggcttcttctcactagaagagcataagcatcgacaagaaatagagacaagctccacaggctttgcagactaaccgcaagaaccaagcaacagaatgcggtggcggagcggaagtcggaggtagtgaccatgacggagacggagataagagcgggaacgaactgagagagacggaggatgagaccgccggtggttccgggcatgccttgcacatccttcatcctcactggtggtctatcgatcgctccggcagtaggagccaccggaagagcatcaaccgggtgaatcgccggccggctcacgttcatcatagaactcgagctcaaacagttcccaccaagaaagagcaactgaaaaagg

SEQ ID NO: 915 - DNA, 1758 bp, Arabidopsis thaliana
  unsure (1)..(1758): unsure at all n locations
  Clone ID: ARATH-23APR03-CLUSTER39709_1
agtaacgatcacttgattactagaaaacgaattctcatttttttttttttttttgtttgccatttaaaataattctaatgataattatggaggtcaaaaaacacaatatcagatcacatgatttaggcgccaaaaccacaactaaacaacaaactaagtcactcaagaagccgacacgtgtcgtctcttaacgtaatcaaacaacggtcaaaacaacacttaaggagtagtaatgagtggaaccttaccagaaattgataaaccatagcctttaagaccaacgtaatgtgctggattattcgtcatcaccttcatctctctaactccaagatcccttagaatttgtgctccaatgccgtattcccgtgaagcaacgggaaatgaaacaccctcggcttgatctgaattggtgttgtaagtacgaggcttgtggcttagatcaatgcctttactttcaggaccacgtaagtagacaaaaacacctctcccattttcttcaatcagtctcattgcaatcgctaactgttttccaccagagctatttccgaatatatcatctgtgatacactccgcgtgtactctcacgagaatatccttcccatctccgatttctcccttgaccattgcaatgtgctcaactccatcaagtaatgacttaaagcaatgtgctttgaatggtccccacattgtcggtataggcgcaaccgcagtaaactcaaccagtctctctcttttccttcggtatctgattaaatcagcgattgaaattaatttcaagttgttctcttgagcgaattggcggagtcttggtaatctagccatggaaccatcatcatctacaatctcacataaaacagatactggttctaaaccggacaacacagtcaagtcaacagaggcttctgtatgccctgctcttttaagaacaccaccttctctgtatctcaaaggaaaaatatgaccaggacgattgaaatcttcaggttttgaatcttttgatgcaagggttaatattgtttgcgccctatcacgagctgagacacctgtggatgttcccttttttgcgtccactgaaaccgtgaaggccgtgcggagtttttcctcgttatccttacgcgttaccattaaaggaagctctaacctctccaagtcttcgcctttcatgctcacacacacgattccagtcccatgctttacaacaaaagccatagcttcaggtgtagccaaagatgccgccattatcaaatctccttcgttttctctatcttcatcatctacaacaactaccatcttgccatgtcgaatatcttcaatagcttgaggaatagacgcaaatccatcagtaggtcgatctaaatcaaactcttcatcctcaacttcaggagaatccattgttgtaggaatcatttcagctgctaatgttccaaacgaaaccaaatctggctgtaactcaatccccattgatgatccattactcttagaagaagagaacacatctccttcctcaggtatcactctcattctaacattaaacttcttcgatatgatcctaggatacaccaagctcgttccaaatggttttgttcccttgacaacatcacgggaaggcaaaagatgcgtcgaatcgcaccggagagtaagcgacgccattttcaccggagttttgaagagagagacgacgagcttcgaagagactgaaccaccgccngtagaatatcactgtgtgtgtttttcgccggtgatattttttggtgtgct

SEQ ID NO: 916 - DNA, 2418 bp, Arabidopsis thaliana
  Clone ID: ARATH-23APR03-CLUSTER3970_1
acttttgtagtgactagtgagtagagtaggcttttagagagagagagagtgcggcgcctggggaaagataaccacagaacacaaaaactcattcattaagaatgagaaagaaagtcccaaaaaccttttttgctctgaaaaagcaacgcaaagttttgaaaaatctcacacctttttcacttctctgttaccacttgtgtttcccctttggcatttttctcggttgtcattaatgagagttcctaaaatcatcatcatcaagtgtaacttctctctctttctctatctctatctcaaagctctgaactttggagagatcatggtttgtgtttgatttctcaagtttggttttttttacccttttggaggatctgagaggagaaatttgcttttttttggaaaatggggagaaaaaagtttgaagcttttggttttgtctgcttaatctcactgcttcttctgtttaattcgttatggcttgcctcttctaacatggaaggtgatgcactgcacagtttgagagctaatctagttgatccaaataatgtcttgcaaagctgggatcctacgcttgttaatccgtgtacttggtttcacgtaacgtgtaacaacgagaacagtgttataagagtcgatcttgggaatgcagacttgtctggtcagttggttcctcagctaggtcagctcaagaacttgcagtacttggagctttatagtaataacataaccgggccggttccaagcgatcttgggaatctgacaaacttagtgagcttggatctttacttgaacagcttcactggtccaattccagattctctaggaaagctattcaagcttcgctttcttcggctcaacaataacagtctcaccggaccaattcccatgtcattgactaatatcatgacccttcaagttttggatctgtcgaacaaccgattatccggatctgttcctgataatggttccttctcgctcttcactcccatcagttttgctaacaacttggatctatgcggcccagttactagccgtccttgtcctggatctcccccgttttctcctccaccaccttttataccacctcccatagttcctacaccaggtgggtatagtgctactggagccattgcgggaggagttgctgctggtgctgctttactatttgctgcccctgctttagcttttgcatggtggcgtagaagaaaacctcaagaattcttctttgatgttcctgccgaagaggaccctgaggttcacttggggcagcttaagcggttctctctacgggaacttcaagtagcaacggatagcttcagcaacaagaacattttgggccgaggtgggtttggaaaagtctacaaaggccgtcttgctgatggaacacttgttgcagtcaaacggcttaaagaagagcgcaccccaggtggcgagctccagtttcagacagaagtggagatgataagcatggctgttcacagaaatctcctcaggctacgcggtttctgtatgacccctacggagagattgcttgtttatccttacatggctaatggaagtgtcgcttcctgtttgagagaacgtccaccgtcacagttgcctctagcctggtcaataagacagcaaatcgcgctaggatcagcgaggggtttgtcttatcttcatgatcattgtgaccccaaaattattcaccgtgatgtgaaagctgctaatattctgttggacgaggaatttgaggcggtggtaggtgatttcgggttagctaggcttatggattataaagatacacatgtcacaacggctgtgcgtggaactattggacacattgctcctgagtatctctcaactggaaaatcttcagagaaaaccgatgttttcggctacgggatcatgcttttggaactgattacaggtcaaagagcttttgatcttgcaagactggcgaatgacgatgacgttatgctcctagattgggtgaaaggacttttgaaggagaagaaactggagatgcttgtggatcctgatctgcagggcaattacacagaagcagaagtagaacagctcatacaagtggctcttctctgcacacagagctcacctatggaacgacctaagatgtctgaggttgttcgaatgcttgaaggtgacggtttagcggagaaatgggacgagtggcagaaagtggaagttctcaggcaagaagtagagctctcttctcaccccacctctgactggatccttgattcgactgataatctacatgctatggagttgtctggtccaagataaacgacattgtaatttgcctaacagaaaagagaaagaacagagaaatattaagagaatcacttctctgtattctttatttctttggtagaaaaataatgtagtctctaatcaaatcttattccatctatc

SEQ ID NO: 917 - DNA, 2523 bp, Arabidopsis thaliana
  Clone ID: ARATH-23APR03-CLUSTER3971_1
aataatgaaaattcgtcttccttccttgctctcggcgataacttggtttctctcctctctctcatctctctttgtttcgacccttttttagtatatttccaggaaatatcttcttcctcctttcgttttctctatctcagttttctctcttctcagcattaagtagtcaacggtcagcgatctcggcgttccttctaatcggaaaagtctagcttcagtttcttttttttttgcttttttggtttccgcgattaatcgatttgggtattttgattttctcttcaaattaagtcaacgggtggatacgcgttgagagggcttttctcgtattctgcttctaatttcatcatcttggtattaccttgtgtgggtggtagcttaatcgaaggattcgagatcccttttatcaggggttttaacaatgatggattttctctgatgagggatagttctagggtttgtttttaatctcttgaggataaaatggaacgaagattaatgatcccttgcttctttgggttgattctcgttttggatttggttctcagagtctcgggcaacgccgaaggtgatgctctaagtgcactgaaaaacagtttagccgaccctaataaggtgcttcaaagttgggatgctactcttgttactccatgtacatggtttcatgttacttgcaatagcgacaatagtgttacacgtgttgaccttgggaatgcaaatctatctggacagctcgtaatgcaacttggtcagcttccaaacttgcagtacttggagctttatagcaataacattactgggacaatcccagaacagcttggaaatctgacggaattggtgagcttggatctttacttgaacaatttaagcgggcctattccatcaactctcggccgacttaagaaactccgtttcttgcgtcttaataacaatagcttatctggagaaattccaaggtctttgactgctgtcctgacgctacaagttctggatctctcaaacaatcctctcaccggagatattcctgttaatggttccttttcacttttcactccaatcagttttgccaacaccaagttgactccccttcctgcatctccaccgcctcctatctctcctacaccgccatcacctgcagggagtaatagaattactggagcgattgcgggaggagttgctgcaggtgctgcacttctatttgctgttccggccattgcactagcttggtggcgaaggaaaaagccgcaggaccacttctttgatgtaccagctgaagaggacccagaagttcatttaggacaactgaagaggttttcattgcgtgaactacaagttgcttcggataattttagcaacaagaacatattgggtagaggtggttttggtaaagtttataaaggacggttagctgatggtactttagtggccgttaaaaggctaaaagaggagcgcacccaaggtggcgaactgcagttccagacagaggttgagatgattagtatggcggttcacagaaacttgcttcggcttcgtggattttgcatgactccaaccgaaagattgcttgtttatccctacatggctaatggaagtgttgcctcctgtttaagagaacgtcccgagtcccagccaccacttgattggccaaagagacagcgtattgcgttgggatctgcaagagggcttgcgtatttacatgatcattgcgacccaaagattattcatcgagatgtgaaagctgcaaatattttgttggatgaagagtttgaagccgtggttggggattttggacttgcaaaactcatggactacaaagacacacatgtgacaaccgcagtgcgtgggacaattggtcatatagcccctgagtacctttccactggaaaatcatcagagaaaaccgatgtctttgggtatggagtcatgcttcttgagcttatcactggacaaagggcttttgatcttgctcgcctcgcgaatgatgatgatgtcatgttactagactgggtgaaagggttgttaaaagagaagaaattggaagcactagtagatgttgatcttcagggtaattacaaagacgaagaagtggagcagctaatccaagtggctttactctgcactcagagttcaccaatggaaagacccaaaatgtctgaagttgtaagaatgcttgaaggagatggtttagctgagagatgggaagagtggcaaaaggaggaaatgttcagacaagatttcaactacccaacccaccatccagccgtgtctggctggatcattggcgattccacttcccagatcgaaaacgaatacccctcgggtccaagataagattcgaaacacgaatgttttttctgtattttgtttttctctgtatttattgagggttttagcttctgctgctccatattattggttcttaagtgaatacatgaggatcagattgggtttgtaagtgttatatgatgaaaaaggatttgaatgttgttgaaagctaaaaaaaaaaaatgtcttaagctcacc

SEQ ID NO: 918 - DNA, 1302 bp, Arabidopsis thaliana
  Clone ID: ARATH-23APR03-CLUSTER39721_1
gcttgttctctccgcagtggtaggtgtcgccccaccgtgcatggctccccccgccaacttgtttatcactataattttgtattctgtatagagatttagttacatgaagagagggctctctagggcttgcgagcagtaaacatgataaaagaatcctgaatataatcttcataatctgtgagaccacatgatgtgcacacatccttgatctcatcctgcatcaagtaattgtagctctgcagaattctcgattggaaaggacgaataatccaaggagtcgaaggactgtatctgagaaacgttgtcccgacaaacacacctccgcttcttagaacacgacagatctcagcaatagcatttgtaggagaaggccaacagctgcaaggctgcaccagcatgaaccgcgtcaacagaacccgaagggaaagggaggcgagaaacgtctgctctcacaacagctatattagttgagttgtcgaaagtattatcatttttagcgtgttcgttgctccctcgaggcccgttccccgtgtgggcttcggcgctcacgccacactatttgccagactgcgcaaatttgcggaaaaacaaaccgcttccgcaactaacatccacaagaagcccacctgctgcttctttgaagtattcctcagccattctaaactcttcatctggaccggaaaccccgcttcgcttaaaggcttcacgccaacatctttcatacaaaaatgatactaatggactccgaaagagctcggtagtaatgggtttgacttcattataatcatccaaatcagcagtgacagtaagatccaagtattcatctttgctagaatatgtcttgttacattgtccacacttgaatccagacctgtagattgcttgtaggttgatacctgaaggtcctttcctcataagtggttcgtagcaaacaggacacgcgaacacttgagtttcctctatttcgatctttggagtttcatttttatttatgtccgatttgggagcaacggcgcttatggctgcggatggaaaacgagaacgaacagaggtagaagcagagaatcggagaagaggagattgtgaatcagaggagaagaaggaagagcggttaggtaagaaaggtttgttgaggagagtaatagcagaagaagaagatgttagagccgccatcgccatttgagcagagaaatggagcttaaaaatcaacgggcgcggggggctggtgtggctcaatttatacgaaatctcgttgctcagacaaattgtgcgtttcttgtaacagagtctggagcaataaat

SEQ ID NO: 919 - DNA, 698 bp, Arabidopsis thaliana
  Clone ID: ARATH-23APR03-CLUSTER39732_1
aggccggatccatccctggagtgttttttattcagatagctatggaagaacaaatttctcgtccaaaatataaactaacaacaagatctttgaatttagcaacaaatgtgttatctaataattgccaatctgttcaaagacaatgcaagttacaaaaaacaaaaagcaacaggagaaggaccgaaacttcaatcttttgttgaatcctttgacactagaaggttcttgccatgtgctagctcaagctattcagtaaaagaagccaagaacctgaccacccacattccgtttgattgcttcttcatggtccaaaatcccatccggagttgtgattacaacataaccccactgacgtgttggaagtgtgcgttcagtgtatttctcaatctcttttgccctaacgtcttgcctgtaggtaagagctttgcagtcattaaccctcccttgcagatcaactgttattctcccaactctatgtggatcatacacttgaaagttcttgatataacctttctccttcatgattctcaagaacgaagacataacggtggagattggtttgagctccaccgaagcttttcctcgtctctcagcattcacaatcgtcctcaacgcatcgttcaaaatcctcctccccatttctccggtcaaaaaatcccgacgatactacacaaatctgtcgtcttctcgccgtatgc

SEQ ID NO: 920 - DNA, 955 bp, Arabidopsis thaliana
  Clone ID: ARATH-23APR03-CLUSTER39735_1
tttttttttttttttttcttcacgaagccggagcagagaacaatattatacaaaatgtaaatctcacaagttacaacaatctaaacactaccaagtttttacagctacaaaacgtgtgaataatcaagcaacaggagggattgattcagcgattgcaagcggctcaagaacaggagaagagtgagctcgtgcgggtgggcgaaagagagagagagagagagatggaaaacgtttcacttgaggactttgaagtgaaaaagccaagaaacaacgaaggcgaagaccatagcagcaagtaagaagttcataacagggcgaccatgccagattcctcgtggctctgtctgagttagagattgtcccgcagctgcttgtgaatgtgtagaagcagtgctctccggattagattgttcaccagccacgtttagagccattgcgccgcatatctcacatgtcatgtttcctttgatcttaaaccaagtctcagcacacttactatgagcaacacccaaatcacctttacaagagcaacctaattgcaaaggcaaaccataatattcttcttcttcttcttcttcttcttcatcttcttcatcttcatcatcatcagaatcatcttcttcttcttcatcttcatcttcagcttctttgttagtctctaaaggaagatgacagatcctgcaatctcttccacctttcttcttcttcttcttcttcctcctctttctcctcctagttctcctcttcttaccaccggaatgtagctgtttctccggcgccggtacaccgccggactctaaatcgacctgagacaaagaatccaagtcggaggagtcaccgtcgatgctaatttcgacggagtacggcggcgagtctgtaggattcgccaaatggtgatgagatccaaaagcaaaagaaggcatttttttctttcttttttgaagattaaagcaaa

SEQ ID NO: 921 - DNA, 1857 bp, Arabidopsis thaliana
  Clone ID: ARATH-23APR03-CLUSTER39738_1
aaatcaaaacgtaatcaatcatatgttacaagaaacaaacagaggagaaattcacaacaacactacaactgttccaaacaaaacactctccactttattaaatcagtgttatcatcaacttaaaagagacgacaatgctctctttggatttggatcataaaaagaaatgtaaacaacacaatggtatcaatcaggctgtgattgtgacactgcatacgcaagaaccagagagtttgatctcagacgttttccactgtgtgcctggtgaagcatccgggtcatacagtaaagtacattgaccggtttcttcctgagacgagaatagcaaaagcttcccactcagcttaccaaactgaaacccggccctcgagcttcctgatagcggaagagccaccacttcccaggtttcgtcttccgcattgaacaccgacatcttccggtggttcttccagtcgatacagaacagctttttccctacttcaacatgagctgtgaccatcgttaaaccgtttttgctaccatgccaggagccacattgagtgttgtacacatcaagaagttttgagtttccaatagtgaagttggatctcccacccatcacatatagcttcccgttgaaggcgctagcgaaacaaccccacctcggacgccttaaagactctatgaaagtccatgtacacgtctcaggatcatacacctctgcacttgacagactctcaccatctaccccatgacctcccacaacataaacatgcccgttcacctcagcacaagcgaaatcataccgagctacctccaggtctgctagtctactccagctattgaggcatgtatcatactgataaacatcagcagatgcaacaagcgaaccgttgatcatacaacaaccagcaatgacaagaagtttcccatcaaccacaacaaccttaaaccctgtttttgcaggaccaggcatcggtggaagagatgatagcttctgtcccaaacagtccatcacctcccatcggttatctttcccaccagcattcatcgttaagacataaagccactcctcaagcataccagcgagtcttctcacagtaataaactctttgctctggacaacaaacctccatttcttgcatacacttcccatggatgggaacctagcacgcggaacaagcgctagacactgcttagcgacatcatcaggcaatcccgggatcaaaggatcatccataaaattctcagacaagcgtgaaccgagatcaagatttcctttggaaaaacacatgccgtgattcacaatccttttcttcccacttaaagcaaaagcttgcatctttagaccaatcttttgaacagagagatagctaaatctccctaagaacaaatctctaaactatttgtgttttgtgtatggaaatgttattaaagactttcgtgaaacccgtcacgtatagtgattttcaaagagagaggaataaacaatgtagcggagaagaatggaattgcagtgagcactgaagaatattgatgtctagcagaatctaattcatgttccataccaatggcttcgttagaatctatgactgttgttaaattgatgttgtttcttctcatacacatctctgtatcaataaaggtcatgctagggaagaagagtcatcagccacctacaacatccatctttagaagtaatgaattttcgagagaataggggagctttgtcggtttttgggttctgtcttctgcttcgtagggtaaagacatttatacaaagaaaagagaaaatggcggagaaagaagataaagatgaggttataccgagagaataggggaactttgtcggtttttgggttctgtcttctgcttcgt

SEQ ID NO: 922 - DNA, 1034 bp, Arabidopsis thaliana
  Clone ID: ARATH-23APR03-CLUSTER39740_1
aaaatctcagtaaccatttctcgggtttccaagaagaacagtgttttttttttttttttttgagactaaacaagaaaatagaagtaaaacaaatccatgacaggattagtcctctggaaaaacaaaacaaggatctgaatcaccaaacagatacggaaactagaatctaatcaaataccatcttacattcttcttgttgttgagattctgtcatcgagacaaaagcgaaaaatactagtcgaaacttgcgtttaagaacttaagcagttcatttcttttgctctctgcagctttgtcctctttggacttgtcaaccttcagcagaatttttttccctgaaacagcacttctacgttcaccatcgtctttgtcgcggttcaaaaactttgatagttttacaggcccgctacttccttctccttcccctttctttctttctctgttcttatgccgtttatgacgatgactcttgcttcgttccttatccttagccttctttggcttttcatgcttcttgtgccttcgtgacttctcatgctcactatctgagctctcactggaggaatcggagtaagaagaatcagaggaatcggaggagtgttggcgtctacggcgttttttcgaggtggatcggctctttttccgtactttgagcgagtctctgtctcgatcgtttctacgatgatgacggcgatccttacggcgacgatgagagtctgaagaatcagaggagacgtcggaggaagacgaagatgatgaagccgccattgttgagaggacaaatcaaaccgcgaagagcggggcgctctcgggatcgtttctacgatgatgacggcgatccttacggcgacgatgagagtctgaagaatcagaggagacgtcggaggaagacgaagatgatgaagccgccattgttgagaggacaaatcaaacagagaaaattagatcttaagggtttggtcaaatttattagacagataaatcaaacagagaaaattagatcttaagggtttggtcaaatttattagacagat

SEQ ID NO: 923 - DNA, 1264 bp, Arabidopsis thaliana
  Clone ID: ARATH-23APR03-CLUSTER39794_1
tttttttttttttttttgatataaagcaatcacagtagcaagaatggttagagagagcttcaaattaaactctcgcttcagctctggattcaatacaagaaatcgaaagggctctaacaaaaggagtttggagaaaacaataagttacattttgaaatcaaggtcgaagtagagtgttaaagaggattgggaaaagaatcacaataacaactacaatagcgaggatagtggcgatacaagcccatttcctgttgttcctctgaagtactttagccccatgcaattgatcagtccctctcatgacgaaagagctcgcctttgagacatttgattcaatgtcattgagcatattcccttgagcttcgacaagagcagccatgtcgaggaacacttggtgcagctctaacagactccgttctatctccttgaccgtgtcgtgtcgttcttgaatctctgataatgtgtccatgacctgtccgcgaccttgctcttgtattgctttttggagaaaacgttcgctctctccgctcgatatgagcttctcgaccgtctcttcgtccgctttttgccccgttacagtgaagtaccttctctcgaccgtttctttgtattcagtagccattttggttcgtagtctctgaaaatcatccatcatgtctttaagcttcttccccaatccactaacgaccgatgttctggtccgatcagcagacgagccaggaccacaaccagcgactttcctctgcgcagcatttgatttctccaaagctacaagcttagtctttatcatcttgacacgtttcaagacctctgtaacactcgaatccatacgagcacgaagcttcttcacggccttggaatcatgtacggtcttggactcttcattagcatcttggagacgcttatgaatctcgtcgacagctttcatgtcttctttaacactctcgacatatccaaagaactcatcgaggttgcctgaatcaagagaaacattttgagactcgatgtcatcgagttggacctggtggtttaagtctgtgtatctcttgaatgagcttgagataagatcgttcatggcgacgatcaagaacttagagaaaaatgatttctaatttcttgaaaatgggcagaggaacattaatggtggttggtttagatggttgacatgaagctagagagacctttaagagccgtctgaaaccaatgtgtaaaatactaaatagacatataatgagctgtgtttagaaccagtcaagagtttcaa

SEQ ID NO: 924 - DNA, 852 bp, Arabidopsis thaliana
  Clone ID: ARATH-23APR03-CLUSTER39829_1
aaaatatgttgactcaaaagttctcttctttttttctttttgccaccgaaaataaccacatttaagataatttaaccacagtgacaatatcgttttcacgcaaaaagaaaaaagcgaatgcgttgagtcaactcgttcgtgttacaccaacaatttcaccttttcatctatacttacaagtttcttcaatctcttcctactcgatagctacgataaacacataataaaaacgtgttagtaatgttctctcttctctattcacaagagcttcaatcatctctctttcttagattcttgtctcaaagaatcctcggtttcttcagtactccggtcaatcccgaaacacttaagaaatgcagatccagccagcctaaacaaagtacatggatgatgcaaactatgacttgaatctttctccaacgaaccttctccttcctctgttactgttgtgactctccttgttacagctggtgttatctctccttttatgctttgagagcttccaacctgatgagactgtacgagacttgaattgacggaaaaccccagaccatggtggctgatcggaatcgtatttccagaaagaaatcgcttagagagagatgaaccagaggtagaaggaacagaatcagaagacgagtagctgttatctccgatatctaaagagaatattccgacgacgcaaaggaggagtaagaggaggacgaagaccaacatttggatccaaattagccatgggatattattgtagctatctaacatcaaaaactctttcccggaatccaccattttttgtagagagataagagtttttcccgggaagagagatttgaggtaacgattgaggaggag

SEQ ID NO: 925 - DNA, 1241 bp, Arabidopsis thaliana
  Clone ID: ARATH-23APR03-CLUSTER39830_1
acatttttttttttttttggaaatactataagtagtttttcagttgccgacataagaaaataccgttttgatgtatgcaacaagttaaaaagaacttttgtcttgacttgaataagatatttttcttgactatgaagttgaagaaaatatacatgaagatgacattagggttttgatgatcttaaagatgaaataagtattagctctttgcacagccgagtgggaatgatcgaacattcattcttcctcccaaggcgagcgccagcagatcgaactcttctacataccacagttctgatactattgccttgaatcctcggatttggttgtttagtcttgtgaccaactcatggagaagctggagatggtcgtcagaaccagcctcagttggagatattggtggaccaagcagtcttgccaatgatgtatgaagaattgcagcatcataaagttgcttctccggtgcacgtggaagaacagatctcagtttcaagcggattgttatggggtcatctccagaattaaccttccagcatccaagaagaacaccagtcgaggttaatagaactctatccaagataatctccaaagggcaaagctctttagcaactgctttaacagcagctgcttctgcttcaacctcaacttcagtagctggaacagagaaaatgtgattcgatgcatgaaacatgctgaagtggtacatcttagagtcctgaaaccaaattgtattttcgaagtaaggactgaacacattttttacgacttccgagactgggacagagtattctgtgctgagatgtaatacattagctcgcacagggggattcgcaaccttaaggacaggtgctatctttccatctttcagtgtgaagagatctgaaagtgacaatgactgagacgtttcaccttgtttaagaaacacgggtccgttttcttgtaaatcctgttccatcttattgtacaacctagtactttgctccgcataggagacaaaggaatctgatgaaggagatgaagtggatggcgaatttcgaatacccatttggaaaagagagtagaagatagtgagagagatggtccagaacaacacagcggttctccaattcggtgccctaatcgcagacgttgtcgatgtcgccatttctccttttgttttgtttcctgggaaactccattagtcttttctccattaacgtcaagctctgttttcgagtcatcgctgttccagacagcgatga

SEQ ID NO: 926 - DNA, 1481 bp, Arabidopsis thaliana
  Clone ID: ARATH-23APR03-CLUSTER39834_1
ttttttttttttttttaaccttagaaatgttaaagaggtagattcggaacaaaaataaaataccaaagattgtgatcttctcaaacaaagcttggacctatagacccgtcacacagtgacacagaccagattggtagtttctacattcagtcacacacacgcacacacaatctgtctcttatttgtgagttacatatagagagagagaaagagaaaagagaagagagaagagagagaccaactttggtagctatttgtaggtatacagtttgaattcaatccaactgggatgaagctcaattcaattgattagagaaatcccttgacccagtagttgaccagccaacagctcgtttacagcctctgtgggatgaaatccatcccaaaacacatatccagtggcatttacacacgttccgaaggatagagaattgcaaaggaacgatgtttctattgtccctgttccgcagcatgccctttttgtttcaaagaatccattgtcagttgggttggtgatgatgtccaggaaaggttggtagacattaaaggcgacgagtctgagacctgagtgtctattcatcaataaccgggttgtgttctcaagtttggtattgaacatgatagcgtcgttgttcagtctctcaacacaacttttgtttcctgcaccgaaaagagtgatagctgcaggcaggcaacccatcggcggtagcgatatcactccgattctccttgctcctagttcatacagattctggatgaattctgagaaggatctcaggagaatgtcagcgaactgatcaggtgtatttaggatgttgagtagaggattgatgtaataattctgaagaaagtcgctagatcccgcactcaaaatgtggatacctctagagaacagtatgcgcgcgttccccctcccgatcattctcgttactctattttgatacgccctgtaatagctcagctgtcgtgttaaggagatcgagccaaatggaacagatgtggcatcatagtatcctgaagaagctgatgcaaagttggcaccgatcaggatattcttgttgcttgcttcccggcttaggaatgcaggtgggtatgaagagaaaccaaggtactcggctgagaaatctacagcgagttttccgttgcagaatcttccggtgggtctttggttgatgaagtctctaccgtaaggaagaaagttggatttgacaatgctgagtaagttattgttgttgccaacgtcaacaatggagtcgccaaacatgatgagtgcaggaacaacagctcctttggatttgcagaagaaacaagaaaccaagagaagaactctaaaccccgaaactctcatcttttgcattccttttcgttcctgtctaatgcaatcaggtcgttaggacaaatagagaagagagagaagcagagagaaagaaatagagagtagtggtcggggggggggggactagtgagctctctcctggtgc

SEQ ID NO: 927 - DNA, 1127 bp, Arabidopsis thaliana
  unsure (1)..(1127): unsure at all n locations
  Clone ID: ARATH-23APR03-CLUSTER39918_1
anaaccctaaccccgaatcttgggcccaatttttgagcagattcatccataagaatatttacaagaagagtaacagagagacaaacatgtgaacacaaacagatcaaaggaacaatagagtgatgtcaagaatttacgaacaaacaaaaacataagtagtgtttttggttacattttacaagaatccaaagagaagaaactcatctggtaacttctcttgtgttttcttcattgtctgcacctgagactctcttatacctgaaagaagtagtagggctgggatcgattctctcacgaggagcaaactcattgtagaactgaacagagaccatacggttattagctgaattatttggtgcaggtgaattgtcagaattcaaactcgcattgcttgtgaagaacccttgaaagattaagaagacgaagaatataaccgtcactatcatggcgaaaatgctactgcagggagacgaggactttgctgctttcaatcttctgagtgttttcatccgttcaatccgagcacgctttctcatagcaagctccgtgatttccctcatcaacttctggtcattagcactcagtaacggaccttttggaggcctcggtggctttgaaggttttctcgtcttcttaaacttatcattatcaaacttcatatccgaaagatccaaactttgactgcttctttctctccgctttccctctcccattaaagggtctactagatcatcagcactcttttcagacccatcaaaactcaaacgtccactccaaacatgattcaaaacattctctgaatccccttccgctgaaacaagattcgtcgttatctcttgtgtctcattgaatctaccatcttcaatatctacatcaagatcttcttcttctcctgaaacaatttgatccatcccgcacaacacacaaaagctgatcaaacccttaaatttcccctgaaataataatcctctacagaagcttcctcaactcaaaagacttgctcttttaactccttgcgtcctcaaattcaagcataatagctggtaatgtcgaaaacccttgatgctgtgatgtacgaggaagacaaaaagaaagaactttgaatccaattttgggaaaaaaaagag

SEQ ID NO: 928 - DNA, 1222 bp, Arabidopsis thaliana
  Clone ID: ARATH-23APR03-CLUSTER39919_1
tttttttttttttttttaaaaacaaagtgagctttttgattacaaaagagcagatcttacaaagtagaacattacataataagataaaagaggtaaaaacacagagagctcgttgattacgaaagagtagatcttagggagcgtatgatgtcagtgagggagacgactccttgaagcagaccctgttgatccatcacccatactctgtgcactcctctggtcaccactttctctatagcttcctccatagtcgactccacaccgcaactcaccacctccctctccttccccgaagttttctcggtgaactccagagctgtgagtggcagccacgtttgcaactccggtaggcgacatcctttcaaatcagttgctgaaaacgtacctatcacttttctatgtctcccattgactagctgcagatgatcctcttgtgctatatcaggtgcatgaacgatggggacagcgttgagcagagcacccttcataacgttgatggcattggaaacagtggttctctctgtgatggcgtaaacggaatcattaacagctccgagatcagagatggagcgtgagagaacagttttgaggtcatcaaagtgatggtctttaaggaaacgcaagagatccatctgagtaagcatcttgtaagcagaggcagactcaatcaactcaactcctgcaatagtgttattgctctctatgctgctctccactggcactaaagctcgatggatccctttgctaaacacttccatgcactctaacacgctggtattaggattcagtgtccagagactgagtccttcgaggcaatgaccgatgatggatgacacctgtgaactcatcttgcgatcaagatcagagagattggaatcttcaccggcgatatgagcaagtatgtcaagcatcgtgagaatcccgatatagtgttttcttacaactccagtttgtttgtctgattccatgatcatggaaccaccggctccgatccagtggcctggaggtgcagccactgggagggctgagatggagttagccaccaatgtgttcattgcgtgggaaagtgtagccgtgtatggtacctcgacgagccgtcggtttctgaccgttagatctttggccgtgacattgatcagacggctgtgatcttctttgctcttctcttcttgcatagtgttcactactgttgtcgtgtcatcgctgttccagacagcgatga

SEQ ID NO: 929 - DNA, 2044 bp, Arabidopsis thaliana
  Clone ID: ARATH-23APR03-CLUSTER39972_1
aaatgttaatctgttgttgtcttttgatataactttgcatttcgatcaactatattcaaaagaatttatatgcctactcatcaaaagaattacacgtcagcaatactttacactttcacttccctggggcacgttaatattccactcaataattgccagctcagcaaacatctcacgtgcccgagttaatcccctcacgttgtggaccccactcgagacattcccggttaaccaattccgaaacagtccgaaaaattccagcctagcatccattcagacacagaatcctacatgtcgacttctcgttggcttaaaacccttgaccttctgtacgaccgatcatcgagcttcctccacaacgactcgagaatatgccacgtggcgtctccttctttcatcggcacattgtacaagagggcccgcttaaacaccggttcatgtaagtttctttgtattgcagacaaattagtagccgccacgtgttccaaaacctttcgtagattcctcacgtctttctccgccaccgttagtgagatttccggccattgtaccgtctccgagaacggtaattgaatcccatcggcgataacaacgggaacacaacctaacacggcggattccactagtctaggactccatggtgcccaccctaaaggacagagacaaaacactgatctcacgatttctgatcggtatccagcaaaccggtgccggtttagataaaaccgccttcttcctccgaatttctttagaatcgccgttctcactcccttgctgtaaaagcgtccgctaatattcttagggttgacttccatttttccccggaaaaacgcccaaatgtctcgccgtccgttcaccggagctttttcaatagctttttgaacactctccggtggaatataaggagaatcacaacatgttccacttcttgacatggatgcttgtacttaactccaaacgtttgtaaaattattgatctcttcataaattttggaatcccttcctctatagccatatcctccattgcgtggaagcatgcgccaaagtcatgggaagcgacgaagacgtggtcagagccttgactcctgttccaaaatgggtaatgatcggagagaaaatcgacggcggagctaaggagagagcgagcgtggcttagagaagggaagccgttggatgtggagaaattgcaagaaacgtagacagggacgaagaagtaatcagcttcatctgggtctaacgtacggacgtcggaggagagaagtgcacggtggatagctacctccgccgcgaagaggtggctagcgcaacggtctgatgctgtaacccaatcgtcgttataactcgccggtaaatcgtaaacgtatatcttcacccacgcgtccgcccacgcgtccgcggacgccaaaaaatcaatttttgaggagaagtgaaagatttgagacagaggtgagttttcgttccgggcgtccttaccaatggaggtgggttttaatggcggaaagattcgatgagagcacgagatgggagagacgacgacgttttgtggttagacaagagacgtattgacgacggtgaggattggtcttcgacggagaagtaagatgtgaagaaatacagagagaggcaaaaccagaggatccatgtgtaatagtttctgaagaagaagaagataaagatgtttcttttatttcctcctctgttgttattaagctgcatttttacgacgaaacctgtcttcttcttcttcgtcttggtgatgttcggtttctttatgtcaagcgacattgcttgatttagctaaatcaaactcaagagacagagatttgggagaaatgtagagaaagagtcgttgaaagaattacaaaaccggtgatctacttctcatcattctctcgtgtgggtttggtttgaatccaacagggtcataacaaatcattaagaaacccacacaaaaaaaaaaagagtttttttcagagtacagagagaatttagagagagaaggtcgtcacatggtgatgggcaatggagcagaatagagctcgac

SEQ ID NO: 930 - DNA, 1692 bp, Arabidopsis thaliana
  unsure (1)..(1692): unsure at all n locations
  Clone ID: ARATH-23APR03-CLUSTER39998_1
nttgaaaanancgtncntncancttttncantaaaccgttnccccnnaacggnggctngnntncggttgaantttggngggttaaccggnggngtaacangngggtttgttggnggnnaaaccggaggctttaccgganctttggtnggagggtnaaccgggggnttnaccggaggtttggctggnggggaaantggnggcntnnccgggggnttaattgggggcttnaccggggctttggttggagggtnaactggnggcntgacngggggnttanttgggggcttnaccggaacgtaccgggccgcggccgcccttttttttttttttttttttttttcatcttgaaagctgctatttttattcaaacgaaactcaaacgacgtcacttaaagagatacaacataatacccaagcatttaacttaaagactagctaacattgattaaaattcaaccgtacagtagacgcataacaacactctctctcaatctttttaaacatgaaacaatcaagatagtaaccagagcatcaaatcatcttcatttggggcaagacgggttaaaggcaaatggaccaacgttaaagagaccgtatacgagcttgttgacgaccaccgtagattttcccagctttttctcaggcttaagttcagcgccgacatctccaccgaagagctttgagactttgctgcatttgtagtcctttgatttcaccaaatacacacgacatcctctgaaaccgaagttcgtcaccgtcttaggagccaacaacaagaagtatccgttcttgtctgtcgtcgtctccgctgttatgttcttcttgctcttacacactagtttcaccgtagcaccttcgatgggtttagcgcctaagagtgtgttgaaagcagcgtacttgcagcttttgcagtaaaccgtaccccgaacggcgactagactacggttgaacttaggcgggtaaaccggcggtgtaacaggtggcttcgtcggaggagaaaccggaggcttaaccggagctttggtaggagggtaaaccgggggcttaactggaggtttggctggtggggaaactggtggcttgaccgggggtttagttgggggcttaaccggggctttggttggagggtaaactggtggcttgactgggggtttagttgggggcttaaccggggctttggttggagggtaaactggtggcttgactgggggtttagttgggggcttaactggagctttggttggagggtaaactggtggcttaaccggaggtttggctggtggggaaacaggtggcttgaccgggggtttagatgggggtttcaccggggctttggtgggtgggtaaaccgggggcttaaccggaggtttggctggtggagacactggtgccttaaccgggggtttaacaggagatttggccggtgggtgggggtgagggtgagggtgagggtggtggtgatgaggagggtgtgggtggtggtggccgtggtggtaaggagcaggagcaggagctagagaaggggtttgagtcttatggttcacttcttcagtgaagacagaggaagtgaagcaccaaagtgctacgagactcactaatacactcttaccaatgaaacccattttttgttttgtttttgggttagtgatatttggggggggggggggactagtgagctcctggtgcccaaaa

SEQ ID NO: 931 - DNA, 2032 bp, Arabidopsis thaliana
  Clone ID: ARATH-23APR03-CLUSTER3999_1
ggccaaagctaacaatggcggttttggaagcttctctctccattttctccttctcttcttcttcttcctcttcaaaaccttatctcttttctaaacgctcttcttccttaaaacttactgcccttagtcttcgaattcccagcaatctctctcccgtcttctctctacgttccggcagcgataactcacggcggctcgtctccgtactctgttccgtcgcggagaaagaaacatcggcggatgaagaaacgtcgcaggaggagaagactgaagaaacccagaattcaaatctgaaaaggaagctttttgtattcaatcttccttggtctatgagtgtaaatgacatttccgagctctttggacaatgtgggactgtgaacaatgtcgagattataaggcaaaaagatggaaagaaccgaggatttgcttttgtaactatggcttctggagaagaagctcaagcagctattgataagttcgatacttttcaagtgtcagggaggatcattagcgtaagctttgcaagaaggttcaagaagcctactccgaaatcaccgaacgatcttccttctcctgcccctggagacactcgtcacaaactctacgtatctaatctcgcttggaaagcaagatcaacacatctccgagagcttttcactgctgcagatttcaacccggtctcagctcgggttgttttcgctgaccccgaaggtagatcttctggctatggctttgtctcatttgctactagagaagaagctgagaatgcaatcacaaaactcaatgggaaggagataatgggtagacctatcactctaaagtttagtctgagaagcgccagtgaatctgaagatggtgacagtgtagaagctaacaacgcttctgaagatggagacactgtagaagacaaaaacacttccgaagaaaacattgtggagtgactcttattattttctctgttatccgataggagcatgagaatctgactagagatcttattacagttttgaaataactactgctacaaagaacacaataatgaagatgtaacagaaattcagtaaactatacttcaatcctgctaatgtgtgatgaatcaccaagccattgccatcctgctccttcataccgagtaagttcgtcgaacgagacacagcttcctgtttggtaatgccttcttttggacttcacattagcatccgtagtcttaaccatgaaatgtccagtagaatgtgacctcgagaatcgccaagccgaggcttctattagccttttgcttgaaccagcggttggaggattttcctcatcatggtttatgtcctgaatagtaattgtgactgtgttgtggaatgattcaagccttccagatccaatcatgccaggatctaactcacaccggcaaacaggacaagtcttgtgtaactcaaaccaaagatcaatgcaatttgaatgaaagggatgacgacaaaccgttatgagcctaactgtatcttcatctgaaaactctgacaagcaaatagcgcattccgtcccatgatttttcttagttgcagatgaatagtggaatacaggaaaggaccggatgataaacgggtcgaggccagtattttcaggcggagtggccacatggattaggtcaccgtaaggtgttcgttgaaggttccaagtagtaaataatcgattcagaagaaactgccataagaaaagagagaagaatccggcgaaaattacaaagagaagaacaccggtcaaaactacggtgacaggcatggaaacactagggaaaacagcagtagctggtattgaatctattgatgttgttgacgacatttgaaggttgatgattagagaaacccccagattgctaccagtttcgtagattgcggtggtgaagggggcgcccgcgcagcctgcttttttgtacacactcgtgattcgacgctaccagatctgctagagtcagctcgtcagcgtgtcctctccaaatgaaatgaacttccttatatagaggaagggtctcgcgaggatagtg

SEQ ID NO: 932 - DNA, 1175 bp, Arabidopsis thaliana
  Clone ID: ARATH-23APR03-CLUSTER40017_1
tttttttttttttttttgccagacgaaaaaaatcattctataaagcgagacgatacatgtaacaacaatcagaaacaagaaaatgaaactcgatcaagaaaaaaaaacttttaatgttacagagaaaaagaggagtttaaagtctttaacaagctttacagctacgtctgcaattcccagggatctctggagttccaaccatatactctggattctttccacattctccaagcactgcccatctctcacagctctcgtttacgtcagtacaattaccatcatgtgtcaatatcttatcgaatgagtccacgtggatccacttagtagccgaccatttctctccttcgatcactggacaacctccgtgaaggctaaaggggtctgggattgcgtcttgttggaggttgaagaacaacagagcattccctttcttcggtttcacagcgattcctttctttgcacaatcagaaagatcgtctttattctcagaaagcgagcggcgagagaattcctgtgcatcggggaaaacagtttctccaccctttgtgacattggacagatacaagagaaccgttgctatgcggtgtccaccacgggcaatgttgactttgtcgtggaagtagtcaaagtgagcatcatatttctgaccgtgctcatatctcaatacctgaaggtcttccccgttttcttttgggagaaatgtccatgttgagagcttgtcctcgataccggaaacaataggatcctttcctttggagataaaagtgccggagctggtacgaacatcactgacttgactctcgccattatcgttatcagcaaccgcagatctctgcagattctctttcgcaagagagattagatgatcacattccaagtccgtcaaaaaaccttcatacacaaatgccctgggcttcgacgaaacctgtttgactttagaaggattgatgatagaacttggagaactaatcagacaagtggaagactgaagcaagacgagcaatatagcgacgaacaacaacaatccgagccgagacatcgacattatagcaatcgtagtaatttcttggatccagatgatcgagatcgaaaactagaggataattttatttattttttctcggaaaataaagagggaaaaaaaatggacgcgtgcgtcacccggatatcgaccc

SEQ ID NO: 933 - DNA, 1360 bp, Arabidopsis thaliana
  Clone ID: ARATH-23APR03-CLUSTER40025_1
atttttttttttttttttgttatatccagtttggatctttattcttcatgcttgcctagcaacatcggcgcacatggatttttgcatacgcacatgcatcagactaatattcactcatgtttcatgaacttgattcttacgttcaaaagaccgaagtgataacatacgaagtttgattagacaataatactccctaagaaaccatgaaaaaatgttgaacagagcttctccaaaagctgtaaatccgtctaccctaatgtactctacctgccattattcaaaccagagaccgaaacataatccccttgagtatctcatactgtagggcttcggccagaaaacatacccctgaaaaatcagttcagattagaaggacgcttggtttctttatcaggcagtatgttgttagggaggttaagctctggtggagtttctctcactattccgagcattgagtcatactcctcgtcctttagagcatgcttcttgcgtagaaccttctcgaactcaatcacatttaatggctttgcattctctgcagcgtgagcctgtgcgaggtttgagtagtttgttgctgactgagagataaaagcaatttcctcatcagtgagcttcctgaggaaccttgctgggtttcctccccatacctctccagaaggaattctggtgttttgtcgtacaagcgcaccagcagcaaccatcccatgcttttcaacaacgaccccatcaagaagtgtcgcacccatcccaataaaggtctcatcctcaacagtacatccatgtaaaacagcactatgaccaatggttacattgtctccaattatggttgggtgcaccttcccgcttaagtttgattttgctacatgcacaagtgagttgtcctgaatattagttcctgacccaacacttacggtgttcacatcgcctcgtaatacgcatccataccaaatggacgatcctcttccaatgtgaacgtccccaataactgaggcgcttggtgccacaaaagcgtccttgtccacaatcggagccttatcaaatacattcatcaatgtccgatgccttgacagttgttctcggaagtaatttttgccttgaaggcgacaaccgaggcgatcaagagcttgaccagtctcacggatccaaaaaccgaccgagtaaaatgctctgcctagggttcccattgatcgtcactttcttcgagctcacaggtaaacgaggactcaacactgaatgaagaagacgaaaatggtcgaagctgaagaagagacggaagaaaaaaaatcagcgaaaatggatttcaacaggaacattccgggacggcgaaacaataaattacagttacagtggtttaatatat

SEQ ID NO: 934 - DNA, 2818 bp, Arabidopsis thaliana
  Clone ID: ARATH-23APR03-CLUSTER40026_1
tcctgaaaaatattaaagctaaagagcaatgacgctctcaaatacagaattggtacctcagatttggggtgactgacaataaacaatgacttatcatcataatccaacaattcaaaagattgagtcaattgatagttattattctcttctcctatgtaattcaacatgatgcttccacacaaggatcgatcattcatcacaggcccttccttgtttcaactctctcttgatatcaatgcgggtaagacagaagcgacctcttacgcgatctctttttctccttttttctttcatttcaaggatcacaataggttgggaggagatagggaaagaggacgaggatgaaggaacggtgcttttatgtcgataaagccacagtcttacaaattgggcagagattcttgagcatcagccattgcttgacgcaggcagtgtgaaattcatgaccacatcccagtgttccaagatcatctccttctgcatactcttcctgacagacacagcaaggccccatctcctcgcgtgtcccggcgccggtcgtgctatgtttgtgctgtttcattactttcaggatcacctcttcgcttagaccagtgctcacatctcctatgcgttccccaagtgccaatagctcctcatatgacatgttatcaacatcaagacgcatatcccgatgcctatcatgcatctcggccataccttggtagatcagtggatcgaataccatataatcctcaaaccgtaaattctcccctcttcgcatggcactcaacacctgccgtatctcggaaatcagccggttccttccatcattatcagcagctaagcttcttcctaagtgacgcaaatggagatgatcattttgcctttccagtaataatcccgatcttctttgtcgagagcgatgactacgactactagatccagacggcgctgcagcttcattcgaggaaacagaaggccctgtgggtagtaatggaagagaagcaccatgagtagcagattcagattcgatactaggaaataaagaccacggagcaacttctgatattcttgattgattatggggagtaacccaagtgggattcggctgcaaaccatggatccctgaactcgatcctgctcgaggaacaaagggagaatctccagatgtactagggtttccacgagtgaaactccaacaaaactgatcctgcactggatttctcgtttcatttgcaggtgtagtaaagactggctgctctgagtttattcttggcgcgtcccatggtgacaatccctcttcaggcatactgtttgctctcgaactagacgaagcactccaagcaaattggtgtatatttcttgtcaatgcaggaaggtggatcatacttggctgaccatcaccactgcttgagctacctgtaactggtattgctcttgcatccagagggtcaacaaaaggagaagttgctggtaactgctgttgctgacgcacagaactaccggactgtgtgaagctgaatgcaactgactctggtggctgcccaggatttaaccgcctgccaggtctagagatggtttccgtgcttcttgtagaaggaaaagcacttgctgtaactgctctcccaccacccaatccaaatcttggttctggtagaccagactgattattaacatttggagaattttgtgagggcatagacaaacttaagctacttgaagcatcatattgagcaagaccctcattccaagcaccattctcagtttgaaaaaagcaaccatgactttcaccagggaaagaatggctaggagctccttcaagagcctttcttttgcaggatgaacctagaccacccaacgaagaacctggaccactgcttctctcctctgcggtttgacttgagcttcccaatgaagtctcgcagttattatggcggataacgaccccagaagtctgcagaccactaccaatgtccatgtccttgcccagatttacatgacttaacatatgactagagcttgacccacgcaaaaaggactctccaggtaacaacatacctgattgcccttcctcaaatccatagccatctgagagaagctgtcgatcagtctttgaaccattggaatttaaatgatcagaaggccccaatctagagctggattcacccaaaactccaccagttatgattttgaacaacatgcgagctagagcttgcgtaagttggtcgtcctgaacctgtagtattgtttggaaactgaacatccactggattcaggatgttattggaagtagtctctgaattggtgctacagatgggttctccatctgcataatttattccagtcgatgaatcaccagtgcttcgtggaccttgcattggacttattaatacctctgaccaaacacacaacaacgctccaggacagaaaccagcgaaaagttattaagttcttgaggaaaccatgttgatttcaaagggtcagcctattatttactccaggctaaggaatgtagctccaggccagttggtactccaagaacggaatatctgcaaaaataccaatcagatgggtctccgccaaagtaatctgcttagaagttttgtaagaaaaaacaattaaaggcgtttcatttattgaattttccggttgtttgattctcaggatgagattgcctatttccttcaaaaaagaactctttaatttacacagaaaagctctgaaaatttccacagaaaatgaagaaagaaaagagcgtaaaaggggaaagagatgaaatgggttattaaaaaaagaagcagtggatgagggaagagaggatttagtgagctctctc

SEQ ID NO: 935 - DNA, 1769 bp, Arabidopsis thaliana
  Clone ID: ARATH-23APR03-CLUSTER40038_1
tttttttttttttttttgccataaactatagttttctttctctgatgtgtaaacaaagacaatacaaccaattgttgttagcaaagccctaagacagaaaccaacaaagaaaacactttggttaaatataaacaaagacttgaacatgttgcagccattggtgaagtaactcttccttcaatggatccttttagcagtttaacttgaagaagtttcagtgaatttcattttctatgtcccgaggaagccataagaaccgcgacagcgactatgaacataagaagcatactgatgagaagtgtatatgtttttcttgatgatcttctatattctccaaacaacaatatcccccaaaatgtactcacaagtggaagtgcctgaacagcgtctgcagctgcatagcctgcggcttgaccacccatgaactgaagaccattgccaaatccacatagaaatccagccaagaaagaccagcctcgaccgttccagtcattcaaataagccttgaaagaagatcttgggagaccaagtataggccaatagagaaatctgatgttaagtatcagagcaactacaaatgcagagatggagaagtagaagaaggcagtgtacacatttagttttggaactccatgttttaatgtgtgccattgatcgtttgttgctaagttgaatgcaggtgagaacagagaaaagcagataccggcaaagaaagttatcaccaatccgattattgtgcttttgccaaagacctttatagctctttgcttctcaagctctatgagaaaagctgcagtcccttctttcgctttcccttttgttaacccgttgcttgcagaaattgtttccatttcgaaggaagaagtagtctctaaacttttgaaattttggagtttggttttgttatcagcagcattggatttatgaacagcggaaccgaaacaaacagcgatcaagaaacaagcgacccccgggaaaaggacctcagctctgttgattctatcatccaagaaatagttcaaagttgtgccgataacaaccgtgatactagctgtgatgacttcagtaactgataaaccaacataagcccaagcatattgtgttgctaagtttccaaggctaagaactattcctccagccattgcaaacatcactgactgccaattatcttgagagagctgtgtaaagaaatttggtctgctcggacctatttctcctagtgtcaacgctatgatcactgcagctaacagatttgtgagtgtgtagtcaagataagtgtgttgaggaagtcgaccgcgtctttcggttagagtcatgattgctggccatgtccctaagaagagaagagccaagagcatacatgcaattgctcctcctttgctctctatcatatacatctttctatctctcttttatatacttataaaaatcatgaaaaaaactctgcaccaaacaagattcttttggttatctgatcttcgacacacattaatgatcgatcaaactcaaattgaggattgtgatctttagacaaccgcaaaggcaaggcaagagtcaaaatctattgggtttctagagaagcaatgaagaacagagagagtactaaaaagtaaacatctttgactaataatgagtttcttgaaagagattattattaccttttggaagcttctgttctaactctaacaaagaacaaagacagaacaagagagaacaacttttgattcttccctttggggagattcagaataattgctagtggctcccat

SEQ ID NO: 936 - DNA, 2498 bp, Arabidopsis thaliana
  Clone ID: ARATH-23APR03-CLUSTER4008_1
catcgtaatatccactctccgtctctatctctatctctcattctctctcatccaacgctatgatcggagagaaagatctcgccggagatggagagtgttctcgaaccaaaacatcaaagcctcgattctctaatctaaacaaccaaactcatcaagacgacaaaaccggtcagtatcatcagaaaggcgtcgactttctcaacgtccggtccaacaatctcgatggtgggttttcttcaaaatcatcacccagatcaggaaacgagctcactcttagctatctctgtgaaaactccggtaaactcgctgaaagtcttggtcaaaaggggaaagaagtagtcaccttttctgagaattcaagctacgatgataaatgggtcgagagagatttcttcaatttgagagaaatgaatcctaattcttctaaacgtaaggctcacgaagaagaagaagaagctgaagaagaagaagataagaaaagtaacaaaatcgaaaccctaaatctctctttagctttacctgatgtatctctgtctttaacggcgtcaaacgccgtgaaaaggccgagagtggtgacgagcgagagaacaacgacgtcgttttcaaacgatttcacggcgacggcgccgtcgatgtcttactcttactctcatcctttctctcacaacattagctgctcgatgactcgaaactccacagatttcgattgctccgttggtaaagacgatcacatctggtgcgccggcgaaggaaccaacggatctgttcatagccgattcagaccaatcggtgacggcggcgtagcgctcgcgaacaatccagtttccggtaaaccttcaagctctgctgattactctttctttccctcggagttaccggctcggccggggaatgaagtcacgatctccggcgattcgaggaagaaagtagctaacttggaagataacgatgcggttagatcggagagggtgttatacgacatcgtttcgaaatcgatttcttctgtggctttgattattcaagggatggctgatgaaactctagaatcagctaaagagtatctaaggaacttgattgattcaccggagaagaaggagaagctggtgaatcttcagaaccagattgataaaaggtctgatcttagtaaggagacgttatcgaaatgtgttaaagatcagcttgatatcttggtagctgtaagaacagggcttaagtatttcctctctggtaagatcagaatccctatgaacgaattggtagagatctttctcttcttgagatgtaggaatgtgaattgtaagagtctcttgcctgttgatgattgtgaatgcaagatctgttccaacaacaaaggcttttgtagctcttgtatgtgtcctgtttgtttgagatttgattcagctagcaatacttgtagttgggttggttgtgatgtgtgttcgcattggtgtcatgctgcttgtgggattcagaagaatttgatcaaaccgggacatagtttgaaaggtcagagaggtactactgagatgatgtttcattgcattggatgtgctcataagtcagagatgtttggattcgttaaggatgtttttgtgtgttgcgctaagaattggggacttgagactttgatcaaggagcttgattgtgttagaaaggttttccgaggaagtgatgatgcaaaaggcaaagcattgcatcttaaagccaatgaaatggttaagaagctagagagtaaacagatttcccctcttgatgcttctaacttcatcattcagttcttcaactatgctgagtcaataccagaaattcccgacccaccgagagagctaaccgttgcagcggaaacgagctacagaaaagacgaggcatctgtgacgccttcaacatcaaaggatcaaaagaagaagagctttgcgttaacagatgcaatgatgaacagttttgatagtttagagagcatggtgagaatcaaggaggctgaaacaagaatgttccagaagaaagcagacgaggcaagaatagaggcagagagtttcaagagaatgatagaaatgaagacggagaagatggaggaggagtacacagagaaactagcgcgtctgtgtctgcaggagacggaggagagaaggaggaataagctggaggagctcaagaagcttgagaattcgcactgcgattacaggaacatgaagctgagaatggaggctgagattgctggattgttgaagagaatggaagttacaagacaacaattggtatgaaggaatccgaaaaacagagcctttcaattatccatttctctgcactctgctccttgtttcgttttgtgggaaatacaaaattagtgataagtgttttatatgtttctctggaaattgtcttctaaatcttttttttaatctataacttccgtttttgattatatttataactatatatattttatatgattatataatacatgtattttgtataaagtaaatcatttgtactgccgt

SEQ ID NO: 937 - DNA, 1789 bp, Arabidopsis thaliana
  Clone ID: ARATH-23APR03-CLUSTER40096_1
tttttttttttttttttcgaacgaacagaaactgcatatgattatatatattttacactccttgagaatagataaagatagacataaacaacattaaaaatagcaaagattaatgtgacgtactaaggaattataacttttaattaccccacacgcttacaaaaactaaacatatccgttaggtccttgacctgatttgcgctttgagagaatttttcataacgaccgtgaaggcgtacgtctcagtcgggtcgggtggagaatccggaaccgggatccatttaaacgaatggatcatccttgcaagcatcaagttgatgtgcagaatccctaaagaccaagccgggcagatcctacgacccgcaccaaaaggcaacattgtaacaccacgtgtccccgtccagtcagcatcaaccccgtccccaccggttaaaaacctctcgggtcgaaacttaccaggatccgaccaaatatccgggttctcagtaacccaagcagtgtaaatttccacatacgcccctgccggaatatcataccctcctagctccgtgtctttcacggcggcgtgagagagaagaaagtgtcccggaggatgtcgtcggagagtctctttcacgatggcttctaaataaggcattttcgccacgtcatcctcttcaacgacgccgtttttgccaacaactccaacaacttcctcatataacttctcttgaatgttttggtcagtcactagatgaaataacgcccattcaagcgtcgttgcactcgtgtccgtaccggcagagacaatctccgagcacaaagtcacaatctcttcatctccaagctcaccacctctctcgatcaaattcaaacgaaacaaagaatccacataagctgcaccaatcggactaaccatctcttcgttaggattctcctttgcatcaacgaacttacgacggtttcttatcaacggcacgagacactcgagctgcgtcttcctcagctctctagcttctctaacttgacgccgaaacaacggagtgaaaaccggcaaaaagtcaggtaacgtcggagaagttataagcataacgtccttaagaacattctcaatgttcttaatcttttcctcgctgatcttggcaccgaaacaaagacagatcaagatactacaaatcgttagcctacattggctcataacctccacgaaacctttctcaacattctccgttttaatcctcttcatatgattctgcatagcccaactccttatccacgagcactgcttcactctcggcgcggtcactagctctgtcacaaagttcctcctcagagtcctccacaaagatccgtactccgccgagtttatagcgcatttcccaacactaaacatgagccggatcggcgagtccggaggccgggaagcgaatgtagggccgcgttggactagtgcctcgtggatgagtttttcgtccgtgatgataatcatcgtacgttgtcccatctgcatggtgaatattggaccatactttttacgtaggtcacgcattaagaagacgaaatggcgacgttggaatatgacttggagtaggtttccgactagtggccatccttttggtcccggtggaatgttcaagctacactggctgcttccggcggaaaagtaccggcgccaccataggttgatgaaatagagagcgaacaagaatatgattacgtcggtgagatccatgtttattattattgaagagagaaagatgggagataagtgaagaagaatgttagtcagagttttgaacaagtttagagt

SEQ ID NO: 938 - DNA, 1535 bp, Arabidopsis thaliana
  Clone ID: ARATH-23APR03-CLUSTER40137_1
gcacacaacatatttttatttgacaatttttacaaagtaacaatttttttttttttttttacaaaatattggtaactttcaattaaacaaaacagagtttccctagtaaaagaataggataactgcttttgtaaatggaaattagagtaagaaaaaataaaataaaaaagttttgatggactttagagaaaattatgaacatttcaaacccataagctggaagcaacagagccaagcttcttctttgtctcctctgccatgttcttcaatgatgatatgtcttgttgtgcctggagagataggcggttgagaagatcacccgcagtgagatcaagagggaaatctccatcaccgtctccaaacagatcagcactagagattgctgatgaaccagaaaacttcttcaatgaacttttggcctcaaggtcagcagagttgttgtcatttccaaagtactgagcagaggatattgatttggcgtttgtgaatttcttccgtgcttcgtctgtttcttgaatttgcagttttgaggaacttgtgattggtttcttctgaaacctgcctccgttcatctccaactcttcctcaaagaagcctgatgattttggtggagctacatgactaacgacttgagggctcatgtaatcttccctgttttgaacattgtccgcataatcaaaacgagaggaaaacgatgacctggctgatttagctgaaactggtgatgtcgcttgtataataacagattcctctggcttttgatcataaagagtcccgctcgacttagtagttagcttccgggcgccaagtccgccagttttgcctgtcttcttagcaccaagaggtttcttaacgctgcgagaaattcttggtgagacgggaacaacatcaggcttttcttgctgctttagagtattactctctttaagagcttcactggttttgatgctggagagtccattaggcacttgtgttgaatcaggaggagatggaggcaaatccaattcttcctcagccttgctttttgcaacttctttagcaagtatctgtttatacaaatcagcagctcttgaggtatacttagcctcggttttacctccatcgctccatccgtactgtttgaaaaagacttgtgccctgttgtttcctccatatatcatcattttcaattgctctgagctccatgaatctaaattggttgacctgacgaagctaatgtggacgccaagactccgatgaacagctgagcaatcgatgcagagaaagatcccgtaagtaacggaagcccatgttgggttcttcgcattgcaatcaaaacaaatcttattatctgatttggctttgagtttcttaaaaacagagatcttgtcattcagattctcagacgccattgtagggatgtgaaacaatattctccagaaatgaaaattccggagatgtgaaattttcgaatcgagaggagaagaaaaaaaagaaagagaataaaaattcgaaaacaacgcaagaaatcgaggggtttataaatgaggttgctt

SEQ ID NO: 939 - DNA, 1875 bp, Arabidopsis thaliana
  unsure (1)..(1875): unsure at all n locations
  Clone ID: ARATH-23APR03-CLUSTER401_1
naaaaaaaaagaagatgagaaatgtctctcagctacacaagacccccatccgtcgtcgttgacccctttccgccataaaatcccaacacctgttttcttgcatcgaaaccatccccttgccttgtttgcttggacagatgactccttgctagttttttgaagatccggccgtatctcttcgacctcaaagcttccgcctttggatccgatggaatcacaaggaccttctaatggtcatcccatggatatcagcagcaattcaatcccatcgtccgcctgtaatctgtgcggaagagtcgttcaatctgcttccgatgatcttgaaatcttcagcttatgtgtcgactgtaagtttttgttgcttgaagatttcggcactcccgcgcctcccttggctcggcggcagacaattaggaggaggaggatgaggaggaggagaagaacaactaggcacgacagctctgagtctgtcggtgtcggtgatctttcctcccaacaattcacacacttgataagcattgcaagacaaagcctttcaacggttcaagctagtgaggatctacgtgatgacctgcgaactagctcccataccactccaagcggctcaacaagatggagactcttctcagaatctgaaagtgatgattttgacaactttggcgaaaccgaatcaaacgctagctttagcctctacagatttccccatgctgataacgataccatttcttttagtgcttacggtggagagtctgatgcttccacggacaggcatgccgatatctttgttcaaccagatgacaggagcgacattgactttgacactgatatagacccgatgcgcgctggtcttaaccagtggaactcagacgaagaagacagggaatgggaggaaggagcgggtccttctggggttgcaggaacacgctatagaaactatttggcaagtccaagtgagagctacagctccatgactcggtttgattcacctgagttagagagaagctttcgtcaaagaattatagagaggaggcattcgttatctcgcaacatcttcactggtttggaggatttggacttctctccctatgctgcaaatgttggggattatcttgatgagagaggctttgatgaactgcttgagcaacttgctgagtctgacaattcaagaagaggtgcaccacctgcatctgtctcatgcgtcaggaatcttccaagggttatcattgcagaggagcatgtaatgaagggcctagtttgtgcgatctgcaaggagcttttctccctccgcaatgaaaccacgcagcttccgtgtctacatctataccatgctcattgtatcgtaccttggctgagtgcccgtaactcctgcccactctgccgttatgagctcccgacagatgataaagattacgaggagggaaagcggaatgtgctggatgtgagcgaggatagctcctcctctgatgatggtacagaatcgggggaagaggaatatgtagagagaggtgagagcgagtctggtgtgagcagagtcagcagaggaagatggctgtttctggctgctgcaccagttgtgagtctggtgggcgttgtgttggcaatgtggctaagcagcccacacaggaggggtatagcaatctctcatagccaaagggagaacagaaccagaagatggctgccgtttttctgactgatgcccagatccgtaggtgcctccagaatctgtatttttttaagacccttaaaagatacttgagtttcgtctgctgtttatcgacttggtactgtttccacacattagttttaattgacgtttaactaaagttctgctgtttgtcgcgtgtttcaaataatattcttgatatatccagagaa

SEQ ID NO: 940 - DNA, 1482 bp, Arabidopsis thaliana
  Clone ID: ARATH-23APR03-CLUSTER40229_1
tttttttttttttttttgaaacaacgtactactatgtcactatgtcagaaacaagacatatacactgctacaatgcaaatattaaaataaaatcatttatattaaatttgccaaccagtagaaaaataaaatctaagaattacaaatgtcagactacgaaaattcttagtacaatttatacttattgtacgacaaaaaaaagagagatattttactagactcatcaataatcctcactaagaaacccaccgatcttattctctctatcgtaattattgttgctgcaattattgctatagttataaatatcattattactattgtaattattattatgattatgattattactaccctcacccaccaaatcattacgttcaaccctaaacgcatcgttttgttcttcttgactcatttcctctttagcactgtggtgaaacgggtagtaccctggttgtgtcgccggaggtacaaccgacgggagcttcgagagaagcgcctcgaggctgctcattgacggtgttatcttcatcgaaagcggtagaggcggtgcagcccctcctacagcttgtggctggttgtggtggcctatcaaaaagcggtggttgtggtcagaatgataaaactggtgctcaggctgctgatgcggaggagcgactcccgggaaatgccacgtgtcagaaggagaagcgttgatgaaagggtaaccagaagaagaagggtgaggaagaagtactccagggatgctctctatatagctcagcttttttcttagcatcacaacatagcttaaatcctctatcaccttgtgaacagctcctaactggacaacaccttctcgaacagaaatcaaggcaatggttttgataccagactgaaactgagcttcccatgtcctagggtatgagtcagcggaattatgccaagcagataagaagttaatctcttggtcattaggttctttataaatccacttgtgactgtgatctgcagctacttttcctatcaacccttctccataattgtagatttcatgagacatcttgaagaacaattcaggctgaagcccttggtattgttgaaaatcactatttccataagccgctgagccaccaccgccaccactaccttctccggagctcatttccgcggcagaagctgcaaagttgcaaaaaccatcttcccaaaccaagatccagtttctcctgttccctcttgatctatcataagctccttgaccatcccatttgggaggaggatagtttctaggcaagatcctccagaaaacagcataaacccattgagagttctcatggatgcataagcttcttagtgtgtgttgaagaagatgagtcactgctaatggatttagatgttcttccatttattctgaatttacaatggctttttttttttgggttcttttctctttatttttcttttggttctctgagtaaagacttcctttagatagaagaaggt

SEQ ID NO: 941 - DNA, 2344 bp, Arabidopsis thaliana
  Clone ID: ARATH-23APR03-CLUSTER40239_1
aaagaaaagctctgattttttatgagcaacaaaaaatagtttagtcaaagcgcaattagagtttatttttttttttttttttttttttcttaaggattaaaattagttagggaataagaaaaagttggaaatttacataagtgaaatgaggatttacatgattctacatttgctatctttatctttaggggatttgccgtcgtgtctcgaagacgcagctgatgatggcctgtggctgctccttggtacctgtggaccagtgaccaatcgtgaggcagcaacgctagttggttgtggagttgggttactacgtgggctctggtcctcaaactcttgttgttgcaaagctattgctagttgcagatcagaattgacatctatgcctgcatccgctacattgttgatgctggcaagataatcagcagtatttgtgactgcgtttcgttcatcccatgtgccacttgcaccacctgtgctgctgtcgatcgtgaagtccttgaaggtagcagtcatgaatgcagtgtcaccattaacctcgtttagtttttcccaaaccaaatcaggctgattcaggtaaccttgatctgtagccaaaagataaagttcaccttcatacttgaacatggtgcagaaatgattgttccggaaaaaaacacagagttcacgttctttgaggccttcttgcaagcgaaagagtccacaaaaggttaattgacttgcactattcttcataaagttcctgattagttcaccttcttctgctgtgagcccatccgtagccctcccttcagaagaacaatcaccaacatccttctcaacccttttaccaagaagtgactcaccttcataaacgggttctttgtctgcacaaactggaggcactgtgtttacacattcctcaccttcgtacataggttcatcggtagatacaggtgggataaaagcgttgggtgcatcatcatgctgggatctgcaactcaaatctggatcaatagaagctgcatcagacttgagtacactctcagaactgctttcacttttcgctgactccagattacccttatccacagagagtgcctcagaagaagttacatcgacaatggcctctttgctgctactcacgttctcaacatcacaagccgtttcacctccagattgcttagaagataattgatcatggttaagatcctcacttttagttgtaatcgttgtcggaaatttcccaactttgatcatattcccatcattttctgatgctttatcatcatcagttttgaactggtctagctgactgatattagtaatatgggtgctagttggactcgcatctgaaaatgtgaacgcagaatcttgattggttgagtctccgttagtgtttggagttggatcattcccctgcccctgtgataactgcaaggcttgcaacaactctgtttcttcttcaagatccccctttctcattctacgaagctctgcagccgcaggtggagaatcatcaaaagatcttgttttcgaaagacaaggtgaaggaacccctaaaactgcagtagttgccgcagcaaaatcaacagaatcttctccgggattttgatcgccttgagcctctacattctgtgtctccagtgcaactagctcacccataagagcattatacgatttgctaccaattgcattagctgcttcaacatcctgaggatcaactatccatccatgatataagggaatgtcaagtaaatcaaatattgcacattcaggtgtgaactcaaaatcatcaatcctcctgaatttaatattgacatcaattccagtagtaaggcgtggaagaagatcaattgcatcagcaatgttctgttgctgattctcaatatatccttcatctttgttattgactttactattggaatcaatgagtctgtcgaccacgagggacatcaatctctcttgagaaacctcataacagtcaggatttagattcaagttgtttctcaagagaagcacattacaaatggctaacaaaggacaaggtccattttcgttctggagaatgataggtgtggttcttccaaggaactgaatcgatttcgtcttatacaaaatctcctcctccgtagtagtttccttcggtaaatcttgctgctgcatcgcttcttgattcgtctgcgtttcttcgctcggagattctgaagatgaagcggtcgccattgacgatgatgatatcaaccaaagctaatgaaaaaacaaattcgaaaaaaagtcaaattttcgatcgaagaagaagagagacagattattggaaattccgaagaaattttattttttctgatccaaatcgaaaagaggaagc

SEQ ID NO: 942 - DNA, 1468 bp, Arabidopsis thaliana
  unsure (1)..(1468): unsure at all n locations
  Clone ID: ARATH-23APR03-CLUSTER40257_1
nttttttttttttttttctccttagcaccttgcttgtgggtgtttgttaatatcaagtgcaactacttccacaaatcaagttcattcatacaaatcatacaaggtttaactaacaacacaaacaaattttacaagaattgataaaacacaacaaaaaataaacaaagatttaaccattttggccaaacaaaggctacatcgatgcagagaggtgagatgtaacaagggaaaaagtaagtggcttctgcttcttgtattcattgtaccgcaaaaagaagtaacccaaatattcaaactcaatgggagacatccttgcctggatgatcgcccatattgcccagtacaaatgagatgctaatttatacgcatctgtctctacaaagactgattctacttctgcgatactgacctcgtctggtttgtctggctgtaagtaatgcttgatgaagtgatattgttcctctttacttgggtacaggctgtaatcacagtcgtatcctgcatattcattgaagtgatttccgatgtcaaagcctctatagttgtatgatccatactcgaaatcaatcaagtatagtttctcttcttcatcattcagcatgaagtttcctgatagtaaatcgttatgagcaaacaccacaggtgcgttaagtaagcctgtgaattcccttagctcaataatttctgtatggagttcttcaaacgaaatagtttcaaagagcttctgcttatcaggttcctcaaacgtaagagtagatgctttttcatagaacttcaagatatcaacccacagctgaggttccttggaacctggtatgtcaactttatgaaactttccaagttctctggcaatttgtgcagcaatcttttgctctctcatgtctgatggctctaaggttcttgcattgatgaacgattgcaccatgccatttccaaaaccaccaagcaacttggcaccaaatccggcagccgagagatacttgatagccagaatctctctctcccggttaataacatactcagtgttaggcccatacagtcgcactgtaacagacacttctttattagtgtcctctttcacagaaaccttcagcaaaagatttgtaatgcctccagatactctctcaacagagaagagtgaatcatcaagctctccccaattcttgaacagatctttacataactctatgatacgaggaatcatgagaggaagaggcaaagacgtgtcgacgacgaacgaagaataagggatttgttcggcgtcgttagctgcatcttcggcgttggctaatgcccagatattcttcgctgctcccattttctttcaaactttttctcttcttcttctgcaaatacaaataaagattctcttttttttttttttgtaatcagatctcaattaattttgattctgttttttttttcctaattcaacgcttccatttatattttatgtcggcattttgat

SEQ ID NO: 943 - DNA, 1542 bp, Arabidopsis thaliana
  Clone ID: ARATH-23APR03-CLUSTER40264_1
tttttttttttttttttggagaataaatcaactcaaaacttgcaatttcataataaaactacgatcaaacgaaactccaaagtataataatgtaaacagcaaaatacaaaagattgatctttggagaaataagtaatttattttcaccaaaattatgtttacaactttcttctccaatttacatacacaattgacttcacacgttggttatgatcttagtgttgtcacaatgaaaatgttgatgacgaagaggacgaagacgatggtgaccaagaagtcatatccatcggataactccccaaaacccgtaaaaacgacgtaaactcttgaacctcagaaagcgcattctgagcacgtgactcggccatggaagcctcgaagtcgatataaaacatatactcaaaatgcttagccgtgcccacattagcctcatcgactagcctaataggaacattatggttcggcctagactcaatcttagtcaaactaatgttcctaaacgcaaaagcagagagaaccttaaacaaaacgcacgtgcctttctcgtgagcaaacactatactcgtcttaaacggccgatcagttctcggtataatcggttcacgcgccaacatcacaaagcgcgtgacgttactcgcgtcatcttgtatcccatcttccaaaatctccaatccgtagatctccgccgcgcgtgcactcgcaatcgcggcggtgtcacggatattattcgcagcgataaactccgccgcaccggcggtatcatcaacagcttcacgagctacgttgagaccgagtttagtcaacgtgtgttcgcattgagctagtccttgaggatgagagatcacacgagtgagaaactctttccgtacaccgggaagagccatgagacaatgatgaaccggaagctgaacttcgccgacgatgtgaagacggtgacggaggagaagatcgtaattacgatgaatcgaaccgccgagtgagttttcgacgggtaaaacagcgcgatcggcgatccaaagctcaaccgcttgaaacgcaacttcgaattgatcgcaaggaatcgcttgacagttaggataagctttaccagcggcggcttcggagtaagctccgggaacaccttgataagctacacggaggttagatccatgcatcggagctggagatagatctgaaatacttaaaggcttcttcgattgaatcgattggttgttgttgaatggaactagattcaaatctgagactccggcgccgttgttgtgaccgttgacggcggaaacgtggtaggatgatgatccattggaattggaagataaggattcagattgttcttgtgagttaactttgcttgagagaatggcgcaggagctttgccaatcggagctactggaattaatggagaaagagtcagatctcttaccggcgcaatgtatgacgtgtcttcttctcgccgccgttgttaccgttgccggagtatgggaaggtaagagagttctcatttttttattttgaggttttttggttatggaaatgttttgtttt

SEQ ID NO: 944 - DNA, 1132 bp, Arabidopsis thaliana
  unsure (1)..(1132): unsure at all n locations
  Clone ID: ARATH-23APR03-CLUSTER40434_1
aattgaatttntaggcttgtttatgtttttgtcctgtttggcaacactcaaaccgaaattcaaaagtattttcaagtagcacaagcagaacaccaaaaactgttatggaatcatgttctttatacttacaaacttatgtacatttgcttacaattaacctcaaaccattagtccctaatgcttcagagtctttaatccaacaccatcatcatctctctgttcaatgaacatccaagaatagtagcattccagagctaagcagaaaaccttaaaggaaacgttacgcattaaatggcttcacgccacttgcaattccatcaccagctctctcgttctgctctttcttcacccacaccattgtagaagaagaagctcctctcggcattggccgattacgatatctccatttggtttgtgtcttgagagttttggcttctcctctattgatagagaagttctcaaactgtgtttctatggccattgatttggtaatctctttagatttggtcgctttcatccaataaactggaaccacatctttcaccggagtattattctccgtcacgacggactcaggcggcacgattgatgatacacaaccgcaatcgatgacatcctcaaccacagctccatcttgatttttattcgtcttgctattatatcgtttcctccaagctcccttattcttcttcttcttcttcttcttcttcttcggtaatccatccgccgcatcttcacctccaccgctctcgatcgccaccgtgacttccggtttctccttctcaacgaatcgtgcttctccgccgtctatagattccttttttctcccaaaatgcttccgattacttcgattcatacgcttctcctcctccgctttcttcagatcttcttcctctatctttttctcttcctcagcctgtagtttccgtcgtctctcttcttcttcctttcgcttcttctctttctcattgagccaacgctcctggagctgaaggatgctgatgtagttagccggaatcagaggaacagtctttcttttgccgtatgtgttcttctcctccattgaaatcatttccttcacacgcttcacaaacaaacctcgtcgaagctgaattttctcaaagcgtactgt

SEQ ID NO: 945 - DNA, 1325 bp, Arabidopsis thaliana
  Clone ID: ARATH-23APR03-CLUSTER40495_1
gtcgtggcctggtggtcgttggtctctaagttttttttttaatttaaacattattattaatgtaataattaaccaaaaaaaatagagttaccttacattttcgagtctacttacaacatgaaatccaaaatacacgacaacaggaggttgaatttctttatttcgaagaacaaaataagagatttctttctttctttttttgccaaaaaattgaaaacctaaattgaaaaaaatacaagacagacaaattatttacaaaaataaaaaaatgttcgtcacttgcatttgcgttgaacttttcagtctttattagaccctaccatgccaatcaatcatttatcatcaatacatctccccaacggcaccgtcagcctcaatgacggcgtctgcgtcttctcaccatcctctcaacctctgattccgtcagttccgtcaacgcaccgttaaccatcctcatgtctcccacagtaatctctccttcgacgtcatcaccgacgtagatcttgtccacgtcacctacgtcaaccctaatgatcttcccgagtaaccttcccggctgcttccattccgcgagcaacgcgggcaccccaaaaccaacgcgtgcatcccacgcactcacttccaagccgtcggatcctttcttctccgccgctaataaaaccgccgatgacaataacgagtatgagccgcatttgctgaaaaaagaagccaccggacttccttctccgttgaaatcaagattgtcccaaagcttcacgactccgcttgagcctaaatctaacaaatctccgaagctaccactgcaccgccgcaaccaggggacacttccactaatacccttatcatcatcatcatggtaataaccaaatctttgaacgcgtgaatcgccattgaccgagtcatcttctttgttatcgtcctcatctttctcttcgtctgaagagtctgacgagaaagaccaatcggagtcgctgtcgtaattacataaaagagtttgggaaggtagagacacgtttacatttcttaatctaaagactaaagtcttgattcttgtagttaacgatgtaaatgaagcaaaaaatgcaagtagcaataaggcgccccatttccaaaaactataagcttgatgtaactttccgacaccggagactgccaaagctcgagataaatacgacgggtcgtttatcgagtttatccccatgtcaaaatcgcctattctgtttataatcgggacctccatcacagaaaacgtttttttgttgttgctatatttggtaaggaagaaaatagtaaagagagaaaaagagaggacccaggaattccgg

SEQ ID NO: 946 - DNA, 943 bp, Arabidopsis thaliana
  unsure (1)..(943): unsure at all n locations
  Clone ID: ARATH-23APR03-CLUSTER40511_1
cggnnttgncacttggaccgggcccccctngngnnnnnggnntcgatangcttttttttttttttttttattttcacaggactcaagtttttttttttttttaaagttcaacactttaaattgcttaaaagcagagtatgatcaactagttaataaacattgacaaacaaagtaaaactacaatctcttgttcaattcatcacatagaaccacaagatcaaattttacaaaaacgctaaccttacaaagcaaagcttttgaggaaatcaggatcacgtttagctttctcctgaaacttcttaaaccaacgatccaaaatatccataggaacaaccaatttacttccatcaacaccacaaaaagactgcataaagttaaacaaattctctccaactttcatagccaatttctcaatcctcctctccgcaacaacatccaacgacctcaacgttgctacatcctccaccgaaacaccgatcttcgccgataaggaactcgaatcacccgccgtgagttgcatctttgcagcactaccaggttcaggccattggagtgataaaacagcagatggtctagctaaagttacagcaccacagaacacaaaagctgatcctggagattgaacataaacagctaaagctttatctggtggaagattgaaattgtttaacaagaagatacacatctctgagatttgatcataagcttcaccgacgaagtggttcatgtcgagaacccagtggaatgtgtcgatttgagtgaaggttgagatgtctatagggaaacttcgattggggaagacgacgccgaacattgttgatgttttggtttttttgaaaggttttgaattttttttaatgtcagtgaagtttagtttatgttggtgatggagtgatggagtgatgtagatgattgaaagagagagggtgaagaatttgaagat

SEQ ID NO: 947 - DNA, 1635 bp, Arabidopsis thaliana
  Clone ID: ARATH-23APR03-CLUSTER40551_1
tttttttttttttttttgctgcaaatctttattctacgagaatggtacaagctgtgcccattaaaatacaataaagaaacatagaacattcagaatcttggacatcatatatatataaacccatcacaatggacaagagtttacacccaaaaccataatgcaacaaaagggcactgctactgatatcagtttttagaccatacactttcaagtttaaaggcaagaaggaaacataataaacttaatatgatatagcaaattagatgtatgtcgatatttactaaccttccaagccacatgtgctaagcatagactacatctctagatgattcactggtaaagctaggcttcagagactccaagtaaccatcgtctttctcaacagtcttctgtttcatgtttctactctcctcaaacgaggaatctccttcaagattacttaagacctccttctttctcttcctcttgaacgtgtacttgatgcaccgatttttactcagtgctaaaactggagtttcttcgcacaaaggagatgcagaaacctccatattctcacagctctctttttcttccttccttgcctctgtttcgctaatctccagctttctgtcattttcatgttccctcggaggagatgttttcaaggatataagagtgccgacatccttctgagaagagtttggagacactattggggcttctccatctttaacagaagatatggagtcagtagcatcagcacaaccagacatttctaagctctctacaattttacaagacgaaacttcgtgaagacatactccatcattcacatctcctacttctacagaggaagacagaaccccattggccatactgctatctactgtgtggatcatctgagctaaaccttcagtttccctgcgttttgtcagtatagatggaagagtgtagtgacattgatccttgttatctttataagaacaccggttaatactatttatgcgagtcaaagacggtacttttatcccattagccaccactgatccattttgttccactgggatgcaaaaacctacagcttctgtgttctcgtgactgcaagaaacctcaggcattacagaaactgcagcatcacggttattccaacagaggttttcctcatgattcttttcaagatgtttctgaccatccgtaagtttcttgagctcatcgtgaagtactctcaactccaacctcagctctcctacaatatcttcagcttctccaagctgagcttcaagttcctcaaccttctgttgctgcttcaaggattgcatctctgtctccttaaccttggaatcaagcatctgtttaagcctaaccaacgtatgaagtgcttcatttctaaccgtcacaagttcttgctgatacctacgcgccttcttctcagaaaccatcacacgtgccgccgcttccttcgtcgtgttcagtatcgtatcggcgtaggctctcttcaacgccgctaaggtctctgggtctgccattagagccgataatgcgattgcagagaagcgattgttgattttccgaccaaggtcgcgaactcgccaagaagaaagaaaaagctaaaaaggtttttttttttttttcggactttgtgggtcgaccggggaa

SEQ ID NO: 948 - DNA, 1400 bp, Arabidopsis thaliana
  unsure (1)..(1400): unsure at all n locations
  Clone ID: ARATH-23APR03-CLUSTER40601_1
nctttttttttttttttttggttttttttttttttttttttttttttttgttccgggccccccctcgtgtcttttctctttgtttaaacggaaaattcatggttcgtattgagttgttaaaagttacaagactcagattcgaatatgtcgtaaagtacaaatcattcaaaataatttagaagaaaaagtacaaaaagttcaaatatcccccatgaaagaacagcctccaatttcctaaggatctctcacttcaaaagggaaatacacattatacctgtttaactgtatccacacacattcgaagcttccatgaaaaacctcctcatattttagctttctttgtttggtttctcttaaaccttgaactcgtggacatggaaccatttcgtggatgaccatttgtttcctttcaccactggacatccaccgtgcaagctcgaagggtctagagatgcatcaggcctcatgttccagaaaagtaaagcatctcgcttctttggtagaacagatagtccttctttaccacattttgagagctcgttccaccatgggacagcactaatgtttcctcttgctgcagggaacacagtctcgccaccatcatcgacatcagagaggtacataagcacagtagctattcgttgtcctccattcttggtgttgaactcatctaagaaatagtcatagtgaggctcatacttctgcccaacttggtagtgaagaacttgaagaccttcaccattttcaacaggaatgaaggtgaaatctgaaatccttttctcaatcacctcgacaacttcgtcatgtcctcttctaagaaaagttcctgagctagttctcactctgctatctttgctcccaccggttttctcatctaccacggttgacttaaccatactcggtttagcaaggctgatcaagtgctcacattcttcattagtcaagaaattgtgataaacaacagcacgaggctcccaagaaataacttcaacccaacgttcaccattcccttcttcatctccagaactcgtctcactctttcgtacaatgttggtcaaatcattcgtcttggaagagtttctattagcattaggtagtgacaaaatcccgagacccagaagaatcagaatcactacgagaagaagtataagcaccgtgaaagcttgtgttgatcgtgacacagattttcgcggctgataacgaagatgctgcttcgatttagacgccatggaatttggttttttcttctggagattttgttttgttcgagatctaaaagaataacattgaacgaaagagaaattacgaagaagcttagattgaagtttatttatatatataataatgaggattaagaagaattgtaatttttcttgtgtgatcgaatctcttcttctttt

SEQ ID NO: 949 - DNA, 870 bp, Arabidopsis thaliana
  Clone ID: ARATH-23APR03-CLUSTER4064_1
aagactatgggaagtgtacagttgagtggttccggcctagtagcttctctacgtccagtttaatatcttattgtttaaaaaagaagaacaagactatgggaagtgtacagttgagtggttccggcctagtagcttctctacctccaaatcatagctttagccacaagaccaaacttaataagccaaattcgtacttctttcgctcaaaacacaatgccgcaagaaccaaaaccgtccgagccataagcaccgcaccagcgagccagcctccagccgctgatgagcccgacgaacctcctgctgtcgattttgcgttcgtccattcggtgttgttgccggacgggacaccggacgtacattggagaagagcgaacggtggacagaaactaagagacataatgttggattctaacatcgaactctatggtccttatagtaagcctttgtcaaactgcgcaggagtaggaacttgcgctacttgcatggtcgagattgtaaatggaaaggagcttctaaatccgcgaactgatattgagaaggagaaactcaaaaggaaaccaaaaaattggagactagcttgtcaaaccaacgtgggaaatccagattctaccggattggttgtcatacaacaattgccagagtggaaagctcatgagtggaacatccctaagaatatacctaatgacgatgatctcgaaacttctacttgaaaccatccattaatttgtcattgttgttagttgttactatatcataaaattgtaacgatctattttttatatatatggatcgataattagctatacaacattacaactacctatttaggtgaaactatatattcatacatccattagttaatttataacc

SEQ ID NO: 950 - DNA, 1381 bp, Arabidopsis thaliana
  Clone ID: ARATH-23APR03-CLUSTER4067_1
aaaattgaatcttacgcttctgtctttacttcctctctcaacgtaagaatcttgaaagaaagaaaaaaagaaaacaacatgacagaaaattccgaaaaaaacgatcgtttaaacgatctcacgatttttatatcgacgaagacaggagtgaaaggactcgtcgatgccgaaataaccgaagttcctcgcatgtttcatgtcccttcttctattttatcaaacaacagaccttctgatatatccggcttaaacctcaccgtcccaatcatcgacctaggagatcgtaacacatcttcaagaaaccttgtcgtttcgaagatcaaagacgcagctgagaattggggatttttccaagtgatcaatcatggtgttcctttaactgttcttgaagagatcaaagaaagtgttcgaagatttcatgaacaagaaccagaggtgaagaatcaatatcttcctaccgataacaacaagaaatttgtttataacaatgatttcgatctctatcattcttctcctatgaattggagagactctttcacttgttatattgctccagatcctccaaatcctgaggaaatccctctagcttgcaggagtgcggtgatcgaatacacgaagcacgtaatggaattaggagctgtgctcttccaacttctctcagaagctttaggtttagactctgagacacttaagaggattgattgtcttaagggtttgtttatgctctgccattactatccaccttgcccacaacctgacctaactttgggcataagtaaacacaccgacaactcttttctcacgcttcttcttcaagaccaaatcggtggtcttcaagttcttcatgaagattattgggtcgatgtccctcctatacctggagctcttcgttgtcaacattggtgatttcatgcagcttgataacgaacgataagttattagagcttggagcttagggtacgacccgaacaaagatagaccgcagcagatcgagcacggtttttagttgcgtgctgcttttgctcgagtctttctccaaattccacggtttaaggaccgattaaagatcttttgtctgatgaaaaccctgctaagtacaaagatatcaccataccagagtacactgcaggatttcttgcgagcatttttgatgaaaagtcgtatttgactaattacatgatatgaagaaaatacttgtccgagtgcaaaatatatatttgtgcgttttgcatatgttacgctacattttctttgtacccgctatagagttcctcaaccattgtaccaatatctacttattttttagaacatcaactaatttgttaataagaaagatttttctacagtgaagacattgaattaccaaaaaaaaaaaaaaaaa

SEQ ID NO: 951 - DNA, 847 bp, Arabidopsis thaliana
  Clone ID: ARATH-23APR03-CLUSTER40681_1
ttttttttttttttttgtttaatcgttttattcacttgacttgcacgaagaagcaagatacaatcatattcaaagagtaaaacaaactaaagagaaacgacatacatttcagttattgttacatatataacgaattagttttcttaaatgacatgcattggattttagctcctcatcaatgcacattacggttaaacaaattctcagtgacctccgccgccaattcctccaccaatttctttaccggctcctccgccgattcctccaatggctccaccgtcaactcctttacctgctccaccgtcaaatccttttccgactcctccctcaattccttttccgattcctccctcaaatcctttgccgactcctccatcaaatccttttccggctccaccgtcaactcctttgccaactcctccatcaaatcctttcccggctccaccgtcaactcctttaccggctccaccgtcaactccttttccgaagccaccgtcaactcctttaccggctccacctccgaatcctcctccaccaaatccaccaccaaagcctccaacactgcctccaatccaaccgccacctgctccaaagccgcctccaccgctgataccaccaccaccacctaagtcgccgaattcttttttaaagcccttcttgtggaggagaggatgagggtgagggtgaggaaacaagggcttctcatcaccaaactctgcttctcccatagtaaaatctgtgaccaaagcaaacaccaaaacaaacacacgcactttaccggcgattagacccattgttagtggaaacttaaaatgtttgtagttaaaatattagaagctattggaat

SEQ ID NO: 952 - DNA, 840 bp, Arabidopsis thaliana
  unsure (1)..(840): unsure at all n locations
  Clone ID: ARATH-23APR03-CLUSTER40731_1
gataataaggcacatgatccccccggcgccggcggtagcgcttgccttttttttttttttttacgaagaaaatatcttgtaacactcacaaagacaacccaacaaggccaaaagagtagttcatgtttttattttgagtagactatcaaactcttttgatccaatcatttccactactcaaacagagaaacactaaagaagtggtatataacatcaatggctataagaactctctatcaaaaaacaccaacaagtgaatgaatcacaataacttgctcttattgttgatcttcatgaatgtttcgaattgcagcagtgattttcttacaatcaaactccatcgtcttcatccaattctcaaaatctccaatttcctttacggcgctattaacggcgtgagtgacggcaagccactgatccgtttgtttgccgaatttcgccaccgtaatggcaagattcctaatctccgactcaatccgtttctcgttaacgaaacattcctctactcctccgttcaccgccttcactagcagatccgccgttctcgccgcgtgcctgattgcttcctttctcgatctctcggttttttcccggagctgtaacgatgatcgacgattgtcgtcgattagctgtaagagactcgattccagagtttcagactcttcttctgatttctccttctctaaaaaaggtagcatacggccacgcgccgccgagagtgacatcggcgtattcattctctctcgccggtgaattcggtcggtaacgattgaattagtttccccccatctcgcaaaaaaacaacacaacaaaaaaataacatcaataatacttgttatn

SEQ ID NO: 953 - DNA, 1260 bp, Arabidopsis thaliana
  Clone ID: ARATH-23APR03-CLUSTER4081_12
acaattcagattccaattttctcaaactctaaaatcaatctctcaaatctctcaaccgtgatcaaggtagatttctgagttcttattgtatttcttcgatttgtttcgttcgatcgcaatttaggctctgttctttgattttgatctcgttaatctctgatcggaggcaaattacatagtttcatcgttagatctcttcttatttctcgattagggttcgtatttttcgcagatctgtttattttcttgttgtttccttgtatttgatccgatttgttgaaagaatttgtgtgttctcgattatttatgctttgatctgtgatttttatctagatttggtgttagtttcttgtttgtgcgatcgaatttgtcgattaatctcggtttttctgattaacagatgcagatcttcgttaagactctcaccggaaagactatcaccctcgaggtggaaagctctgacaccatcgacaacgttaaggccaagatccaggataaggaaggtattcctccggatcagcagaggcttatcttcgccggaaagcagttggaggatggccgcacgttggcggattacaatatccagaaggaatccaccctccacttggttctcaggctccgtggtggtatgcagattttcgttaaaaccctaacgggaaagacgattactcttgaggtggagagctctgacaccattgacaacgtcaaggccaagatccaagataaggagggtattcctccggaccagcagaggttgatcttcgccggaaagcaacttgaggacggcagaactttggcggattacaacatccagaaggagtctacgcttcatttggtctttgcgtctgcgtggaggtatgcagatcttcgtaaagactttgaccggaaagaccatcactcttgaagttgagagctccgacaccattgataacgtgaaggctaagatccaggacaaggaaggcattcctccggaccagcagcgtctcatcttcgctggaaagcagcttgaggatggacgtactttggccgactacaacatccagaaggagtctactcttcacttggtcctccgtctccgtggtggtttctaaaccttgtctctctctcttatggttactgaaccaagttcatgtatcgtttcatctagtactttggtggtttatgttttggggccatgtacagcctctgataaataattgatcgactatgtttccgtttctttcatctctcttttctttcaaacaaaaaaaaaaaaaaaaa

SEQ ID NO: 954 - DNA, 1206 bp, Arabidopsis thaliana
  Clone ID: ARATH-23APR03-CLUSTER4081_13
acaaattcagattccaaatttctcaaactctgaaatcgttctttcaaatkstbtcaatcgggatcaagatgcagatstttgttaagabtytcaccggaaagactatcaccctcgaggtggaaagctctgacakccatcgacaacgttaaggkscaagatccaggataaggaaggcattcctccggatcagcagaggcttattttcgccggaaaacagctagaggatggccgtacgttggctgattacaatatccagaaggaatccaccctccacttggttctcaggctccgtggtggtatgcagatctttgttaagactctcaccggaaagactatcaccctcgaggtggaaagctctgacaccatcgacaacgtcaaggccaagatccaagacaaggagggtattcctccggaccagcagaggttgatcttcgctggaaagcagttggaggatggcagaactcttgctgactacaacatccagaaggagtccacacttcatcttgttctcaggctccgtggtggtatgcagatctttgtcaagacgttgactggaaagactatcactttggaggtggagagctctgacactatcgacaatgtcaaagccaagatccaggacaaagagggtatcccaccggaccagcagagattgatcttcgccggaaaacaacttgaagatggtagaactttggctgactacaacattcagaaggagtctacacttcacttggtgttgcgtctccgtggaggtatgcagattttcgtgaagactctcactggaaagaccattactcttgaagttgagagctccgacaccattgacaacgtgaaggctaagatccaggacaaggaaggtatccctccggaccagcagcgtctcatcttcgctggaaaacagcttgaggatggtcgtactttggccgactacaacatccagaaggagtctacccttcacttggtgctaaggctccgtggtggtttctaaaaacttatctctgttatgaatcagaagaagttcatgtctcgtttcatttaaaactttggtggtttgtgttttggggccttgtaaagcccctgatgaataattgttcaactatgtttccgttcctgtgttatacctttctttctaatgagtaatgacatcaaacttcttctgtattggaattatgtccttgtgagtctctttatcatcgtttcgtcttt

SEQ ID NO: 955 - DNA, 1372 bp, Arabidopsis thaliana
  Clone ID: ARATH-23APR03-CLUSTER4081_7
aacaattcagatttcaatttctcaaaatcttaaaaactttctctcaattctctctaccgtgatcaagatgcagatctttgttaagactctcaccggaaagacaatcaccctcgaggtggaaagctccgacaccatcgacaacgttaaggccaagatccaggataaggagggcattcctccggatcagcagaggcttattttcgccggcaagcagctagaggatggccgtacgttggctgattacaatatccagaaggaatccaccctccacttggtcctcaggctccgtggtggtatgcagattttcgttaaaaccctaacgggaaagacgattactcttgaggtggagagttctgacaccatcgacaacgtcaaggccaagatccaagacaaagagggtattcctccggaccagcagaggctgatcttcgccggaaagcagttggaggatggcagaactcttgctgactacaatatccagaaggagtccacccttcatcttgttctcaggctccgtggtggtatgcagattttcgttaagactctcacyggaaaraccatcactttggaagtggagagttctgacaccattgataacgtgaaagccaagatccaagacaaagagggtattcctccggaccagcagagattgatcttcgccggaaaacaacttgaagatggcagaactttggccgactacaacattcagaaggagtccacactccacttggtcttgcgtctgcgtggaggtatgcagatcttcgtgaagactctcaccggaaagaccatcactttggaggtggagagctctgacaccattgacaacgtgaaagccaagatccaggataaggaaggtattcctccggaccagcagagattgatcttcgcyggaaagcagcttgaggatggtcgtactttggcggattacaacatccagaaggagtcgacccttcacttggtgttgcgtctgcgtggaggtatgcagatcttcgtcaagactttgaccggaaagaccaccacccttgaagtggaaagctccgacaccattgacaacgtcaaggccaagatccaggaacaaagagggtattcctcccggaccagcaagcgtctcaatctttcggcttggaaaggccaggcttgaaggattggaacgttacttttttggccccgaactaaccaaacaattcccagaaaaggaatttctaaccttctttcaactttggttccctgcgttctttcgtggttggttttcttaaattttcgttctcctttaatgctttaagaaagtttcaaatgttttcgttttcatgtaaaactttggtggtttgtgttttggggccttgtataatccctgatgaataagtgttctact

SEQ ID NO: 956 - DNA, 2604 bp, Arabidopsis thaliana
  Clone ID: ARATH-23APR03-CLUSTER4095_1
atcagaaacacaattccttcttcttcttcttcttcttcttgtctccgatgtcagccatggatgttatgattcactcttcaagctttctcctcccttgcgacgaaactagtacagggacgagatacgctctcgttgttctgaaccagattttgcgacgagtcactctgcctctgttggtacttgtaaagcagaaccttttccctgtgttgatagagacgctcatttcgtcgacgccgtagttcatcgagtcttccctaatgaagacgctttggccattcgattcaggtataagcccggaccttttcaaaggagatatggattttatacctcttgacgccctcgagttttatataatatagggaactaaggctatagctttatttcatgatcgagacaccacagattttgataaatgcattttgtatatccgtcacttcattttgaatctaatgacttcccgaatcccaattcttgccactggcctacttgcagccctaatgaagaagctatgggctctccacaccgtcatatcccggatgttagcaaaaaagatagggcttttattcgacgtgaagcccatgacattgataccaaagactgatctaaatgcatttcgtattcccttcactctaccatgacccaactgtatacatgcatccatatttatcccacccgctaacttgaatcaagatttgttccagacgcccgtaatctacacctcttttagagttggcgggatactaggttaatccttctatgtgacgaatgcctcatccaaagtcgaacaaagtctgatcgacatgagatacatattcagtcttctctagaagggcctcactgtggactcatccccattggcactccatctgctaaaacccacgacctctatgggttccaatggggtccctcatccaacgctgttattcaactttttttggtttgaataattacttcaacattattgtgttgatttgttttcactataccagcaaataacaatttattgccttaccaaacatcagctagtgttactacatttgtactagatagtatcaaatctaaaacagaggagttttacttgggttcttctgtccatcgtctcttcatttcggatttggatcgaacttctttaagattcccatccaaaccataatctctctccatcacaagattgattccttcatctgaataccatccaactccaatgcacaacactccatctttcttcacatccacgtatgcactcacaccacctggtagccacatcacagacacatcttgcatatctatcatctcttcctccccaaacgaaaccaaagtttccggtaagttccttctctttagagcttctgtgcagaggtacacaactggagtgctttcacctggctgttcgaattcggcttcttctccgtagagtggagttgcatttacttcaaatactttccatgatcctgttagttctgatggttgcgtgcgtttcctctgtgagaatggttttaactccaatggtgcgtcgttgtcactttgctcttcataatttgaaggactaacccacagttcttcataaacaccaactctcattatctgtatatctgcaccaccattggcgaattctatagtgtgaactactctcagtctcttatggcaacccttcaccagacactgttcaaacttgaaagtcggtgtgaggtaatagttggattcactcatctccccaacagggattgtaactggacctctggaatacgatccatcctcgaagtaaacgaggccgggtgcatctaccatggaatcctcttccatgacatcacttgctttcaagttaaaagactcaaacttaggcaaacgactatctacaccactctgatcaacaaaaacctcatctttactctcagaacactctccatgaggatttaaagtaacccaattgatcttcctctgtatctcagactctgtattagctccactagaaggagatggtaacgcttcaatcttagaaagagtataacaatcataaagactctcattcttcttcccaatttcaatcggttccatctctccagtaatcggcgagaacacagctcctacacctttccaaatcccacttacactactcgcaaatgttctccaaactggttttatcacaggctcctgagtttgaagaacagtctcggattcgatcaacatcgtccctgaaaccaaaactctaccgaatttaccctttcttcctccacctaatctcttcccgctttttcttccttttggcttcaccttacgcttatccttctccgccatttcgttgtcaacgctccatatattctctttgttacctttcagacttactttccctttgtttcccgccggacggctatttccgtcgtttagtcttgatccctgcgcaacgatttttctcccgttgacattgtttcgtcgctggaaattgcagattgaaggagataacagagcattatgaaatccaaagcatatattgtggttgtgacatgaaagtggagaagaagaagtgaagcttttacagagatgaagaaatggtgattgcatcgttttctgaagaatcatagagaagatgatgatgagaaggacgcg

SEQ ID NO: 957 - DNA, 1625 bp, Arabidopsis thaliana
  Clone ID: ARATH-23APR03-CLUSTER40972_1
tttttctttttcttttggcaattcgtctccttttcaccattaataaaacttgacaaaagcactgcattgttaataacaacatagttttttactactagagtaaaaccaaccagactaattcatattacaatagcagaatatgaatcagcttttcttagatgaacaaacttagagaaaatggaacaaacaaacaaatgaaacacttgatttgtccacaccttactagttaagtctaccaccaatttattcatagtggcaaagcagctcgttaagtagaagtgaaattaccttcaatcaccggataacgccgaacaaaacctccctcttccttcacggcttccccaaatactttctcagttctctgacccttaagaatgcatttgcctctattcattatcattatgtagcctaagtgtcctagctgaccaagactcaacacgtttctgtcgagatccggaacaaaaagcacattgtcgtccgtctccctccccccttcttgggcctcgcctctcacatcccctctaccttttaacatgataattgatccgttgatcaatttcaccggagccctgtgtcttctgtctagagtggtgaaaaatttcagatatggagacatgtgattcgtggtaccgctggataatagccacatatcctcataaaatgtcacaggaccaagagtgagagataacatttcatacacaggtaattcattactgctttgactctctctcttttctgattcatatctgttaaaaaaactcagcaagactcttaagagacaccttcttcagatctacttgttcctctaacagcgtagctaaatcttcatgcgactctgagagcgagcctaacacctttgtgacaacctcataatcagatttcccatttttcaaacgacgcaactgttcagcgatttctctgactttatctaagtatgaatttgtctgttctgcttcatccatactaagttcttcgaattgcttctctaacctacgtagcttagcttgttcattgttacctttttcgagcaaatcccaaacatctttagccgaagaagcatagagagtcttcctaaaagctgaatcagtgagagaagactgcaaattctggagcgctttcatgtcttcgggttgaatcttcgctgctaactctggaaccttcgatggatctggcgggactccgttctcgacaacatcccaaagtcctttctccgttagtgtagttttcgcgattcgagcccaaatttcgtagttcaggtcatcggaaacatcgacttgttgtttattcgccgccgccatagctctaaatgttgggatatcttgaagaaagcgaatgaataaactatttggagcgctttcatgtctttctccgcgagatctctccatttcgaaaactcttcggcttgaatcgtcgctgctaactctggaaccttcgatggatccggtgggactccgttctcgacaacatcccaaagtcctttctccgttagtgtagttttcgcgattggagcccagatttcatagttcaggtcatcggaaacaacggcgtcgtgtatattcgccgccgccatagccctaactgtcagtgtttcttttaaacctttttctgtatattctcctggagag

SEQ ID NO: 958 - DNA, 820 bp, Arabidopsis thaliana
  Clone ID: ARATH-23APR03-CLUSTER40988_1
agatgaaaaattgtccattcttgatcaaggagagaaaaagtcattttcctgttgaggacagtagaggagtttctgttgcaagaaacaaggtaacattcacaaatccaagacattttgttatcactttttttttttttttttgcttattatcaatttcgagaagatgggtcattacatacaatacaagtaaaacaaaaaagcctgaagaaatctacaactttgcgaccattttgagcatgtttgctgcatctttggcgttatcagggataggtagattacagataagtgtaactctagaggaagatattaagattttgttagctttatctttctgtgttgttttccataacttgacttcccaaacctgaatagtcttccctgtgcttacaggagttgcttcggcgaagacaaggtctccaagatcagcactcttcaaatggttgattgagagttgaattccagcgacccttttgaaaccagaagccatgtgagctcccatacttgctaaagactcggctatcaaagcagatacaccaccgtgtaacaccttgaaaggctggcagcagacgggagaaacaggaaggcgacctgtgatacgtgtcggagataattcatcgaactcgaaacccaacatgtgaagtggagggtctatagctttggtgttggacgatgcagaatccatttttgtgctctgttgcagagagagagatggaggtaggtagggtgggtgtgttagagatgataagagagtttgagcaatggattgaattggtggtagttgggattaacgtcaagtggaaatttcgatgaaatgggtttt

SEQ ID NO: 959 - DNA, 1491 bp, Arabidopsis thaliana
  Clone ID: ARATH-23APR03-CLUSTER40_1
ccgtcttcgttgctttttcgagcggtgcctagtctcaacttccatggctgacatcttaccttcaaattttctcaaaccaaccaaaaagcttcttctccttttctaaaatttcatcaaaccctatagggttttctcaatacaattgattttttttttcttcttcttctctatggatacgaccctttctcccgccgtggaggcggaacaaatcgccgactcaacgatcgacactgtttctcgtttgatcgccggcgttttctccggcgcacttactggaatcttcgctatggctggagcttttactggagctgtaactggtgcggtggcaggaagagctgcacagtatggagttctccgtggggctgcacttggcgctgttgctggagctatcctctctgttgaagtgttggaggcttctcgtgcgtattggtatttagagctgtcaggatcaaggggtccatcatctatggcagattttgtagagcaactgtttcgtgggagactggtagatgaacaacttatgtcaacaatgataaattcacaccattggcagttaaggatttccgatgtaagttatgaagagcgggaggatgtttatggtgaactggaagctagaggcttatcgggtgactctttaaggaaactaccatgctatataatgtcaagtgaaatggtcaggaggcaggtcactcactgcacaatttgtctgcaggacatcaaaacaggggaaatcacacgaagcttaccgaaatgtgatcatacgtttcatctggtatgtgttgataaatggctcatcagacacgggtcatgccccatttgcagacaggcagttaaagattaaaacacgactgttgccgagctgtgtacatagcaaaaacacattatccttatatgttgttgtaacttgtaagtctaaaacccctttcttctgtatttttcctcatttcatttagagcaatctcagcttgagccataggtttcgacttttgaatgtatattgttgtagacatgaataagaatacctacagatgtattgaaaagaatatagaactcgatcaagtcgttttgctatgtacacagctcggcaacagtcgtgttttaatctttaactccctgtctgcaattggggcatgacccgtgtctgatgagccatttatctgcacagaccagataaaacgtatgatcacatttcggtaagcttcgtgtaatttcccctgcattgatgtcctccacacaaattgtgcagtgagtgtcctgcctcctgacctcttcacctgacattatatagcatggtagtttccttaaagagtcgcccgataagcctctagcttccagttcaccataaacatcctcccgctcttcataacttacatcggaaatcctcacctgccaatggtgtgaatttcccactgttgacataagttgttcatctcccagtaaacagcgaaacagttgctctacaaaatctgccatagatgatggacccccgga

SEQ ID NO: 960 - DNA, 721 bp, Arabidopsis thaliana
  Clone ID: ARATH-23APR03-CLUSTER41041_1
tttttttttttttttttcttttttttttttttaacatcaagaaacgctgtgttttcatgactcatcagttcacaacactgtaatatccaaaccaccggggtaaatgattgcattgcatgcacaaatgcacacaaagacaactacacaatacacatgtacatacatgaagaaactaaatgaaccttacaacatgtgtacattcgcctacatatattatacggcgcctttattgatataaattgcgtacttaattaggacaagatggaccattgatcaatgttgagaatttctcaaccaacagtagtgcagtcgacagtaggagaagcatcaacgggcaagctcgcaccacaattgctagcaagggcttgagccaattcaggcttcacggtaacactattagccactgacttgatgcattgacaagctgccttcttatcggcagatgtggtggttgccgccgctaaactcttaactccgtcgcaacaagtctccggagggtttccacttccgctggtcaagtagctcacacatggctgcaaatcctgtaacacaacactgcaagatatagcggattcagaataacgaggtatgaagaatattccgagaacggaaatgatcgctagacatttcaatacattcatcgttgaagaaattgagaaaaaaataaataaaaatcttaggggtttctttgttgttgctgggggggggggggacctggtgc

SEQ ID NO: 961 - DNA, 1850 bp, Arabidopsis thaliana
  Clone ID: ARATH-23APR03-CLUSTER41056_1
tttttttttgacgaaaccatcaacaatgtatgtagcacaaaacaaataaagtaggtctcacatatgtatcaataactcaacaggcaaaacttacaaagattgagagagcttacgaattagaaaacatctaaaggcttttcaaagacaatcctcatatagaaaaaaaccctaaatgagaaacaattgccttcaaaaaaacccacctgagatttacaatttcgatcacacctctctatcttctccacaacatcaaaaccattatgtcaacaaaactttctttagtaacaccaacacacaaaactgcatctgcttctatctttagggtttttgcttcccttgagattaactgcctctgctatactttaataacttaagacaaaaccgagtaacaacgagctttttacgttgctcctatagctaataataacacctagctgcaaaacttatgggcacgcgatattaagaggagtgggagtagttgttgcgatatgatcaacgaaagcatacttgtcaatggtggttccaatgagaccaagatcgatctccacatctgagaaatcatagtctggaagttcgcttggaccgtcacattcaagaccaatgatgtccagatcatctatgccacagtaatcatccaacatttggttgttgttctcttctgttaagagaaaatcaagctcacaagcatttgggatgaatgagtcatcaatgaagcaacccatttcaggaatctgtagatctgcaaagtcgaaatcaaaactcgctttcttcgattcaccagcttgttgatcaagagtcgaatcaactagcttcttgtcaagatcaatgcttgaccctgaggctgagatcatagaaccagactcatttgacaaaacagaggaagcagcagaagtggctgcagccagagcatcaaactcaagcttcttggtagcataagcatcagctgcttgttcaagcgtctcgtaagtacccaaccaagttcttactttggtgattggatgtctaatctcagcagcccatttaccccatttcctctgcctaacaccaacaggcttcgagacagtagtagaagaacgtccaacgaccggagatgctttgctgcgtaaaacctttttgctacaagctgagattttagtcttgcttacaccattattgttactctcctgacaatatgagctttcagattctgcttgagtagcagcttgagcgaaaggaagatcgatctcacagacataacgtttccttctctgactcctttcttcttcttcgcttgatgagtagtcagtagcgtaaggatcattcacaacgaaacggagttttctcatagtcttcaaatcttcagataaacctgggaggtgatttagctgaaaaggtttcttcttcatgggttttttgttgggtttattggtttgaatagaagagcgtttctttcgttcagccattttatcgaacacttggtgtgcgaaattcaaaaccaaacccccttaaaccctaaaaaacctctcaaaattcccagaaaagcctcaaaatgaactctctcaagaacaagaaaagtcctttaccccagaacaagtccttttaggtcttaaacgcatggaaatcgatgaaactgtgagaaatcaatcactgagagagctagtagatgtagcttgatgaacgagaaaaacagagcagaaagcgattaagaagacgaagaaggaagaagaagagagagaagcgtagagtcaaagacagagctccggttaaacaaattattccggcgacttcaaagatccttttctctctcacactcctctcagctcttcgagcttcccaaaagtgaaaaagaaaagtgagaagataaaagattc

SEQ ID NO: 962 - DNA, 1348 bp, Arabidopsis thaliana
  Clone ID: ARATH-23APR03-CLUSTER41096_1
ggttagaactgatcattgttttgcttttctgtttcataccaaaaaaattgagtacatattacaaggagaaacaaacatgactgaccaaatttggcaacttataaactaaatgtttttctctgcaaatacctattgctcatcttccttatattcctcaacttgtatggcatcttattaccatttgtcggtaagtccaatgtctttcactccttggtgcaatgtgcatctgtcccatgctggctacacttactatatccaacgcttttaagaaaatcacgtatctctttcgagctactattgcttgccgtgagcaatctctcatcttcctcatagattagataaggagcttctgctggtttccttgaaagcaacttcttcgcaccctttaaaacgtggtattcccaaccttgaacgtcgatcttgataagaagaacaggttgagaaggtggaattagtttatcaagaggtatggatttgacttgcactgctatctctttgttggacttgaatgcaagccttgctcccacctccgaaaccgcgctattgtcaagccgtcctaccaacttatggaaggtaatatcccctgttctgtcagaagcagcagcttcaaacacagtaaccaaagaagaaactctattaaaccaaatcccatcacaaatcctctgtaaattctcaaaaacaggctcaaaggcaagaactttaaaccccataaccgcagcagcaaagctagccataccaacattagctccaacatcaacaacaatcccatttttaccactagctctcatactatccaatacctcctgaatcgttgcggagatatctggtttcctaaagggcttacctttaagtagcctaacaatgttcttatgtggtttctccgggagattaccgagatcagcgagagagtaaacaaaagggtacttgagattctcgacgacgtttgcgattatgggttttgattgtggacatttgaagcaatcaaaaggagggatagggtatggggaattgatggagagatttggattggagtattggagagaggagttagagaagaagaagaagagagaagagaggaagataatggaaaggacaagaagtgagattagtgtctttggtgataaaagtttttggttcttgtcttttttccaggcgctcgccatggaaatggatctagatgtgttgttcagagtcttgagttaaaattgggtagcttttgaaatttcagatctggggaaacaagaaggagagatcttgggtgggaaaagatgccacgcgtccgcccacgcgtccgcccacgcgtccgcccacgcgtccgcggacgcgtgggtcgacccgggaattccgg

SEQ ID NO: 963 - DNA, 1734 bp, Arabidopsis thaliana
  Clone ID: ARATH-23APR03-CLUSTER412_1
atcttcattctcacactcaacccctctctctcctttcattctcattctctctcggctttgttttctctttgatctgattcatctattctatttctatcaccacacaaaaagaagaaaaaaaacaaactttactttaagaattttgaagaataaaatcaaaagagaataaccatggttttctcctccatccaagcctatcttgattcatccaactggcaacaggctcctccgagcaattataatcatgacggaacaggcgcctcagcaaatggaggtcatgttcttcgtcctcagctgcagccacagcagcagccacagcagcagccgcatcctaatgggagcgggggcggaggtggaggtggaggcggctcgatccgagcaggatcaatggtggacagagcaagacaagcaaacgtagccttgccagaagcagcactgaaatgtccgagatgcgaatccaccaacaccaagttctgctacttcaacaactacagcctcactcaaccacgccacttctgcaagacctgccggagatactggacacgtggcggagctctccgcaacgtcccagtcggcggtggctgccggagaaacaggcgtaccaaaagcaacagcaacaacaacaataacagcactgctactagcaataacaccagtttctcctccgggaatgcatccaccatcagcacgattctctcctcccactatggaggaaaccaagagagtatcttaagccagattttgtctccggcgaggctaatgaatcctacttacaatcatctcggagatctcacaagtaatacaaaaacagacaacaacatgagcttgttgaactatggaggattgagtcaagacttgaggtcaatccacatgggagcttctggtggctcgcttatgagctgtgttgatgaatggagatcggcgtcttatcatcagcagtcaagtatgggcggtgggaacttggaggattcttctaatcctaatccatccgcaaatgggttttactcttttgagtcgccgaggataacttcagcgtcaatctcttctgctttagcatcgcagttttcttcggttaaagttgaagataatccttacaaatgggttaatgtcaatggtaattgctcttcctggaatgatctttctgctttcggctcttctcgttgagttcaaccacacaacaaaaaggaaacttgagggtatactttggtggggaaaaaactagttaccaggttaattttgtcttatttttcgtttttgattagttaatgttgtttactactttcctcgttctcaatctactatgcttctagttctaggtagcctaagttattggatgtttttgagactatccctttgttatttttgtcgacaatgttctttcgttaaaaaaaaaaaaaaaaaaaaaaaaaaaaaaaaaaaaaagccacaaaaaaaaaaaaaaaaaaaaaaaaaaaaaaaaaaaaaaaaaaaaaaaaaaaaaaaaaagggggggccgttttaaagggtcaaagttaactaccccgggcttgcaaggtaatagtttttttttggggcacccaaattaaaattaccgggccggggtttaacaacgtggggccgggaaaaccccgggggtaccccaatttattggctttggagaaaatccccttttccccagttggcgtaataccaaaaaggcccgacccgatcgcctttccaaaaatttccccaccctgatgggcaattggaaccccc

SEQ ID NO: 964 - DNA, 1231 bp, Arabidopsis thaliana
  Clone ID: ARATH-23APR03-CLUSTER413_1
aataagtccatttcacgacaaagtcaccaatgcttcttttacatgtatatatacttctttccactccctcttctctactcaaatcaaatcttcttccttctctgttttcttaagctttttgaaaattttatcaatggcgactcctaacgaagtatctgcactttggttcatcgagaaacatctactcgacgaggcttctcctgtggctacagatccatggatgaagcacgaatcatcatcagcaacagaatctagctctgactcttcttctatcatcttcggatcatcgtcctcttctttcgccccaattgatttctctgaatccgtatgcaaacctgaaatcatcgatctcgatactcccagatctatggaatttctatcgattccatttgaatttgactcagaagtttctgtttctgatttcgattttaaaccttctaatcaaaatcaaaatcagtttgaaccggagcttaaatctcaaattcgtaaaccgccattgaagatttcgcttccagctaaaacagagtggattcaattcgcagctgaaaacaccaaaccggaagttactaaaccggtttcggaagaagagaagaagcattacagaggagtaagacaaagaccgtgggggaaattcgcggcggagattcgtgacccgaataaacgcggatctcgcgtttggcttgggacgtttgatacagcgattgaagcggctagagcttatgacgaagcagcgtttagactacgaggatcgaaagcgattttgaatttccctcttgaagttgggaagtggaaaccacgcgccgatgaaggtgagaagaaacggaagagagacgatgatgagaaagtgactgtggttgagaaagtgttgaagacggaacagagcgttgacgttaacggtggagagacgtttccgtttgtaacgtcgaatttaacggaattatgtgactgggatttaacggggtttcttaactttccgcttctgtcgccgttatctcctcatccaccgtttggttattcccagttgaccgttgtttgattagttttttttgagtttttgaacgatgtgtatgctgacgtggacgtacacgtaggtgcatgcgatgaaaaaaacatctatttgttcatatttttgcgtttttctatttgttcattctttttcacaattcacaatacattatttcagttaatgattacggataatttagctttaaaaaaaaaaaaaacccaaacc

SEQ ID NO: 965 - DNA, 1215 bp, Arabidopsis thaliana
  Clone ID: ARATH-23APR03-CLUSTER41545_1
tttttttttttttttttgtaaggctacattatattattctgcaatatttcaacatgttatcaccacatttatattacacaaacacgattttgctaggaaaaaaaaaagaaattgtttctttacaaaaaatcaatatcactcaagttggaaagaaaaaaaaatatcaaacgtaaatagagaaaatgaagaagaagtaaatggcaaactaataaagtgttagtgagagctctctcgagaggggtactttagtcattcagatagaaaaaacggctcttcaagccgaaacccagcatcggctccacaaagctgccacgtggacgagtagtagcaaaacgcatcgtttcgtatcatcatctcattctcatcggtaaacaaatccggcaaatcaaacagcttctcttcctcactgtctttgtccgtacacgccgaagtcgaagcacacgaagcttccgaatactcttgactctgagtcgtcgtcgtcgtgcttgtgtccgaagaaaacaactgagccaccacggttcgactcggctcggcttcaactatttcagccacttcagaattactcacatcgttgaccgaatcttgccagttaacggccgctaaagaggcggcggcttgaatgtctttaggagaatttgtgactggacgaggaagctcgccggctaacttgggaaaattgaggtaagccgttgtacctttaatggctaaagccgctacgtcatgagctcgagctgccatctcagccgttggataagtcccgagccagattcttgatttctttctcggctctctaatctccgacacccattttccccaactcctcatcctcactcctctatacgtcggatgtttatctccaccgttggtctttcgccgtttcccacctccaccgttttgatcatcatcgtcttcaacggagactaacgatgacaatgatcttcgagatgcttttcttttagagttgtcttcctcaatgaagttagaatttgttgatgacgaagaagaggaagatgtagtaggtgaagaggacaatgaggcggaagcggtgatggaggaggaggaagatacggcggggatggcggaggagataaaggtaacttgagaaacactactctctatgttgatttgtcttgccattgttatgagagaagaagctttagagagatggttgcacaaaaatagatgtgaagtgggctgtattaatattcctccaca

SEQ ID NO: 966 - DNA, 2763 bp, Arabidopsis thaliana
  Clone ID: ARATH-23APR03-CLUSTER41697_1
tcccttgtgtggcagtgaagaaaatagtattttttcttaatttttttttcccaggaggaaaatgttctatatattacccttttgtccccacccccccaaattacatatcctcttttttgtttttggtttcaccgctattccaatccctaccctattcaacaaagaaacaaaatataaaacacccccacctaatctgacccaaaattcctaaggaaacaaaaagcaagaaaacttggcacccttttgatcttatgctgcattaagtcaaaagaagttaatctataaggagcgttttttatctgttggcttcatcgaactgtgtggtttatggtctcaaagatactttcctgatgacttccatatcctacttcctccaagtgctatcactaatacagcgcaatcatcgtgatactttcttctatctccttgcgggatatcgagaagttcatgaaaatccattcctgtttttaaaacaatcaatcatcaaaccataccgctcggctgttcattctagatcaagagaccaagcaactacagtctaccaaagaaaaaacactgaagagatttcacaaggtcagacttacatcctcgatgcttgtgctgtgatctgttgttagctgcagggcaacttccacattgctcaagtattgatacactttattcgatgagatatcgctactctgatcattctctgttagccggtagtgacgaagggaaggtgtgcatgatatgtattgatccgtaccaatgtattcgtttcgaaacatttccagcaaagcatcgttcaattttggctgctttaagaatcccgctccaaacgctctggtcaccttaagccgtcctttcaccctgtcattcactatgcaatggttgtcatcggggtgctcgttttttattcttgttacctcatcctcgatgcttgtgctgtgatctgttgttagctgcagggcaaccagtttcgtttgcggcaaaggagcttcgttgttcactgtactatcgctactatccacgaccaaaggctctttgtttccatcgtctctgtctaaatcattgcgtctttcttcacgcgtggctgctccctccacactctcacccgtttcttctacctgatattgtgcaacaagagccctactatcccctatgttcattatatacacatcatcatctctcatcagtgcaaccagtaagcacgaacccatcaatgcaagctcaggattggtttcgagaaccttatcagtcatctctaggaatgcttgctctgtggcttcaagaccatttgacattgcctttagaaccaactcatgatcaacggtacccgcctttcgtctcttccttctcttatcaaccccttcttccacaccaacattatctacctcctccgtttcattttcctccacaccagacttccatgggaacaacttcctcccagaaattccttgtttagataaaccctgcttcaattttgacaaaagcaaccatctcttacttcccacagacacagcattgcctgcaccgatagcatcatccaccgaaaatgcaaacctatcagaacctgaaagatctaacgcatcttctgcttgagcctctgccagaagctcccatagccgtttcctctccttgacttcaaccacctctaatgaagacgtcaatctctttcccatctcttcttcttccttctctgttgctggacagctcgaacttgccatttcgtttacatggtcctcaaattcaccttgttgctctaactctctagtgctaatatctgttggattatcatcttcttcctccaattcccagaacaaacccctgtaactcactatgaacagcacggtagagattagccatcagaaactccggcgcgtcgggtccattgaaaccgtcgtagattccagcaaagagccatccttgcttctcaaaaacagctaattgcactctatcctctcctgccttccccaatgcccactgcaaatcgttctctccggaagatgctgccatagcttcaacgtcgggtctcacaatgttctccttcttagcaccgacgacgaaattcgacaccggaagaacccatggccgttgcttcttctccccgccgaaaatcggatgccaggaaaggctcttcttcttctttttccgtctcttcttcgagtaaacaccaccgagcggcgctgagaaatgcacaccggcggaattagatctcgaaatctctccggccggcgggtctaacggacctgaagtggctcctctttcgatcggaccggacatgaagagacccgagcgatccggaccgggctgaagcggaagagcactaaacgacgacgttccttcaaagccattggcattcaccacactcctcctaacgccgccgccgaaactgctctcagtggcatcgtcgtaaatatcttcaagctgaaggacagttttggaattggaagtgttggcgctaacagaagcaccagaaatcgctctaaacccggtgtgaagctgctcggatgatccggaacctcggattcgacccggttcatgcggaggagataaccggaaagaagcagtaggagaaacgaatcgatcggaaggaaaaggagaaatgaagcgattagaagaagaaggaacgtaacagtaagaatggcctaaagtctcatccaacggctcacggaaagagtcaatcagatcggaatgagagggattcgccgccgaggagtgacgacggcggttacggtgaccttgattgaagcaaggtaacaaggaggagaatccacttcccat

SEQ ID NO: 967 - DNA, 1702 bp, Arabidopsis thaliana
  Clone ID: ARATH-23APR03-CLUSTER4179_1
tcactagtccccccccccccccacaaagcgagaaagaaagacgaactgatcagcaatgggaagcttaagggtgagcacagttgttattgcagtagtggcttgtctctccatcctcctcatatctcctacagaagtagatgggcgtttagtgtgtgacactccagcgggtacatgtacctcgagctctacttgcaatgaccaatgcaatacatggggcggcaattatagtggaggcgaatgtgcagattcaagctttcctggtttaagtatatgttattgctgccattatgtagggagcagtgctgaaatggaaagcatgtgattgcagatgatagaaaacgacgccgctttgtgtgcgtatgtgtgtgttttttgctaatcgcatgtttatgctttcatttcacatcctatgttttgagtgtttgcctttgtactttgttgttgtgcttctgtttgttttgcgttgtcaagtatcaaataaagttggagtgtgtttttaacgaatgataaaataaacagccatatgtcgtcaggtccacagtacttgcgaaagatattaaggcttacaagttcccaagctttgacatttcttcctgaattagtctgcaagaactttaatactccacgatgcacatctcggtgattgcaatgaccccaaacaccatagttatcgaatgttattattgtgtggatatagtgattagtgacttcttcttcgatgatctctgttagcaaatcgtggctccataattgcccaaaaccatcctgcaaatttggatggtccagaatctttaactgttgaagcggaaccttgagcaccgcacatgcccgatgcagctcttggtccctaatgcttcccataccatcagcgttacctaatgcttcccataccatcagcgttaccagtggagaagcataagatgtgaagattgcaggcagtggaagtgaagtagtttattgttggagaaaagaacattgactcatcatcaggatgtgcgataacaaacatcacatttttcttcccatcatcaagaatagtggctctggagatagatgtagctcggaagaaaattttgaagaaagaagccacccatataacaacaatcagagatagaaaaacaacaaccatcttccaacataaatgatattggatcaatacaaaattgtcagcataaatggtcagtacccaaaaagaaagtcagatcaagtccaacaattataagtcttaaagtgtttcttgatggatcaacttcatccaaattaacaaaatggtaaaatcatcaatgtggatttgcagaacatagcttctatataagtcgaacttaactcatttcaggtgaccagatcaattaaaaaatgaagagagcaaacaaataaacaaaaagattcaaaatttgtaagccgtcaagctcacattcggaagaaacccttgtttgctcaaattccagattcatgagtccacatttcagataaacataacagaaacattttcacattcggaaggatcaagctaagtaaaatcagagagtggaacagctaaaccaaagaagagaatctatcgacactgagaactgagaaagtaagagcttgatcgatggcaagaatgaggaaggacgtgatggctgtagaagcccatgaaaacggagatttcagcagctgagaatccggaagaatgtagcagaatcgacgattagggtttttt

SEQ ID NO: 968 - DNA, 1149 bp, Arabidopsis thaliana
  Clone ID: ARATH-23APR03-CLUSTER4180_1
ggagaccaacacgaaaccgacgataggaacgccggtgaacgaagcaatgcttgggctttcttacggtgagctcttactcatcgtcggcgccacagctgctcttgtaggacccaaggatcttccgattattgctagagcaggaggaagattattcggacgagccattggttacatcaatatggctcgtggtcacttggatggtgtcatgaaacaacctcagatgcaagagatatcgaaagaagttcaagatttacgagcacaagtagatgcgattagccatggagcaagattttctctatttgattctagtcctttgactcgaagagtggataaccaaaaaactcaagaacctagtccaagcaccaccaatgggattgttacatccgttaatgttgaagaaaaacagaagcctgtagatcattatacaaaggctcaagaatttagtggctcgtcgtcagcttctgttaacctgcacgctcaagcaacatcatttgcacgattatctgagacagtcaatggaaaaactcacagtctaaacagtgattcacctgttcttccagtatcagctgagatggcaaagttgcttcctcaacgcaaagagagtgcaagaggatctgatttaatgttagaggcggttcttgaagcggaagtagcacacaaggcgaaaagctttttcgcacaagccgagaaagaaactccagctttgaaagggaagtttttcagtgacaggaaaggagaaaattgaactcaaaagttttggggaccatcatcgatcacaagacaccggcaaggtacaaaagagtaggccttgttatttaactgtttttttttttatgttcgatgagccaagaatctgagggacctttgtttctgatgcggcaacaagtgagctaaacttggagcgaagtcagttcactctttcatcttgtaattaatgcttccgctttataggtttaggttttgttgtttacttcggaggtttagtgtgagttggatttgcatagagttggttgggtttttttaaagagtagagatctattaaattttataaaattttgtgtatttttacaagtgtagttataaaaatccaatggacatccatggttttctcaaagttttcctttataaaagaaaattaaggttataatt

SEQ ID NO: 969 - DNA, 942 bp, Arabidopsis thaliana
  Clone ID: ARATH-23APR03-CLUSTER41836_1
gttaagttaagacctctttatcattcatcatacatatttatgaagaacaccgaacatgcaaaagaaaacaaaacaaaacataaaactcaaaaagagaaaaaagagagattcgttaatctctatttgtacacctaaaactcaacaccaaaacttgtaattaagaccagccacaaaaaaagaaccattcactcactgcacaccagtccaagctcaatcttacacgtgtcctcatcctcagacgtgccacacctctctaactttcttttcttcatcggtaccaccacgtgatttccacgtgctaaaggctccaaccccaaagtcagctcaagcccgatccaagtctttggttcctccgtcgtcgtctcctcagaagacaccggtgactcgtgactcagtgacgactcatgactcaaagacctcacgtttctctcttccttgcatgcaccacggctccgtctcttaacgttctcgtccctgcttgacacgtgtcttatgtcgcaaagcttgttgttaaaaggaggtgcttgaccagtaaccgctgcgtcgcatgcgatcggagtcacgggtgagcctctcattactgcctcaacggccgcttgacaaagatgccagtttcctgaccacaataaccccacggatccgtatatcggattcacaatcctcccgcatgcttcgtacaacaatgatctaaatatcgcaggacggaggtggtcaggaccggtgttgaggaggttcatgagccccgcacggccataaaacttggcgaggaagacggtggcgttggcttgagattcagcggatttgatccattgaagacaaggtcttatgctacagttttcactgcagccttttcgtagaactcgacatccgttacaactcatacgcattttagatgggaaacaaaaaacaaaatgtgttttgggtttgagggaaagtacagaa

SEQ ID NO: 970 - DNA, 1191 bp, Arabidopsis thaliana
  Clone ID: ARATH-23APR03-CLUSTER4187_1
gatcaaacctcaacaaaaatactctctcttatttcagacttttcagacaaaaacagagagaaactttttgtgtttatgtgttttaagatctgattgataaaaaagatgcaagttatttctccttcgtctccggcgccgagattcgccggaaaagagagattttcagaagtttacggcgaactaaacgacgattttggctctaaactgaagattagttctaaagaggaagaaaacagagatgatgattcatggtggaatcagaacggaactgataaagatgatgaaggaagagaagaagatttctcattcgcaagtgtaaacgcagataattcaccgataaccgcagatgaagcattcgaagacggtcagatccgaccggtttatcctctgtttaaccggaatattttcttcgatgatccagaggaaaaaactttacgttcacctctcaagaaactcttcgttgaatccacaaccacagaagaagaagaagaagagtcagatacggtgggtccatattgttcatggacaaatcgtacggtggagcaagcatcaccagagacttgtcggaaaagtaactcaacagggttctcaaagctatggagatttagagatcttgttttgagaagtaacagtgatggaaaagatgcgtttgtgtttttaagcaacggctcttcatctacatcgtcgacgtcgtctacggcggcgagattgagtggtgtggtgaagtcgtcggagaaagggaaagagaaaacgaagacggataagaagaaggataagatgagaacgaaatcggcacatgagaaattgtatatgagaaacagagcaatgagagaagaagggaaacgaagatcgtatcttccgtataaacatgttgggttcttcactaatgttaatggtttaaccagaaatgttcatccctattgattaaaccgatctgtcgtaccaaaatctctaccgacaaatctttgccttttgtatatatctaaccttttttttggtttctgtgtattataaaaccttctttttgtaagtaaaagtgaaactttacttattaacttttcgtttgtatcatttgattagttttttttcttctttgatgtaaagtattttttgattttgaaagtagtagagaaaagattcacccgatcttttttggaatttaagtttgtcaataatatattttggtatatc

SEQ ID NO: 971 - DNA, 778 bp, Arabidopsis thaliana
  Clone ID: ARATH-23APR03-CLUSTER41930_1
tttttttttttttttttcttacgtaataggtactactcaagatatatatagtgcaaatattttccaaacagataacaaaacgatctccctccagcttcgagagtttcaggaaaagatcttagtagacctttagcgaattcgttttcacaaaaagaaacataactgatacatgaaacaacccttatgcattaaagcttctaatacaaatcatctagaaaacgctagaaaggagattagcagcggtggaaatagctgctccagtgagagcagactgaaccacttgctcatggcttgtcctctcagacgtcgtcatagccattgccgctcctgtcaatgctccagctaccgcgctgttccgccaatcatgagctcctccacgaacctctgtcataccgtaagtgatacctgagtataaccctgccgctagcccccattggagagattcttttcctgtgttcttcaccaatgcatcaagagatttgctgctttcccctctgagattagggaacctatgtttcttgttccctgtaatctccgacggtggacccacgttgttcgagtcaaaacctgccccgtcaaccacggtaaagtaagcttcccttgacacggcttgtaaagctcccactccggcggctttaacgaaggaatctgcgatacggttaagaagaggatgaccaagatcgaacaagtgtgccttctcaaagcttcttatctcatccattacaattcttcctccactcttctccatttttttctttctttcttcacttgttgcttc

SEQ ID NO: 972 - DNA, 1356 bp, Arabidopsis thaliana
  unsure (1)..(1356): unsure at all n locations
  Clone ID: ARATH-23APR03-CLUSTER4212_1
atttcactcatttacgtttgtctctttccccgctctctcgctctcgccgccgtctgcgtaacggtctccggccacattacgccgatcagcctattcactccaccgtcggttcgatatcgtttctctccaagtcaatttgaagtattccgattcgattacattctcattcactttccgaaagcttcttctactcagaaaggtgtgcaaaatgattggatcgtttctaacaagaggactagtaatggtatttggatatgcgtatcctgcttatgaatgttacaaagcggttgaaaagaataagcctgagatgcaacagcttcgattctggtgccaatactggattttggtggctgctttgacaattttcgaaagagttggcgatgctcttgcttcatgggttccactatactgtgaggcaaaactggcatttttcatatatctttggttccccaagaccagaggaactacatacgtgtacgattcattctttcagccatatgttgcaaagcatgaaaatgaaatcgaccgcagcttgattgagctaaggaccaaagctggggatctggcagtgatatactgcagaaaagcagtgagctatggacaaacaagaatcgtagagatcctgcattttgtagctctccagtcaacaccaaaacctaagcctaaggaaaagaagcaggcagcagcaccagaagaggaagaacagaaacaaccggatcttaaggcgacgagccaagcagcttcttctaatcctcaagtgcgtctgcaatcgaagaaaccacagcttgtaaccaaagaacctatatcaccaaagcctctttcatccccacgtaagcaacaacaactacaaacagagaccaaggaagcaaaagcaagcgtgtcacaaaccaaactcactactctaactccaccaggaccaccaccaccaccaccaccaccgccaccatcgcccacaaccgccgcgaaacgaaacgctgatccagcacagccatcaccaacagaggcagaagaagcgtcacagactgtcgcagctttaccagaaccagcgtctgagattcagcgagcgtcatcgtcgaaagagactataatggaggaaacactaaggatcactcgtgggagtctgagaaaagctcgttctgcgggagcaccgcgctaagagaatgattaaaaaagaaaaggggaacacataattttaaatctctaaccccttttgattggtttctctttaaaacagcaataatggtttttatttggttatttgttgtttttagtccgatgtaaatttcagacttcagactaatattggatgttgatctgtccttagctgagtaaaaccacaaaaaaagtttttataan

SEQ ID NO: 973 - DNA, 2092 bp, Arabidopsis thaliana
  Clone ID: ARATH-23APR03-CLUSTER4217_1
ggtcatcaccaacttcttcaccatcatcatgaatgttaaaacttccataaacaaatccttccttgtccccttgtatttttctatctaaatccctaaaaccactcaaaatcatccctctttctctcctccccattttccccaacgcttgattcgaattcgtctctctcgttttctgttgttctaccaattgagcaaccctagaatcattcttgtgtacctaccggaaccgagtcttctcttcttccgtggcacatctttcaaagttttaaaccccttttcccctaacttcttttcatttttctgtttttttcccgggaaattttctctctctctctctattttttgtttctctcgtcatgatcattacttgtcaagtatgatcctttattaggtttctttggggccgatctcactttttctgtttctcaccctcttctcttcgaaggcccttgtaaaccctagaatctcctcttttcaaatttatatgttctgtttcttcatcttcaggtttaatcattcaatctatctctagggtttaccgggtcaagtcttaggatctgtctctatccatacttcatcaaagtttccgtctttggttctaatccatggcgtatcattcgattccgagctctgggtttcattacttgaattctccttttggtgacacaacctttactaaagtctttgttggtggccttgcctgggagactcaaagcgagactcttcgtcggcatttcgatcaatatggtgatatccttgaggctgtcgttattactgataagaacactggtcgatccaaaggttatggctttgtgactttccgagatccagaggctgctaggagagcctgtgtcgatccaacacctattatagatggcagacgagcgaattgtaatctcgcttctcttgggagatctaggcctccaatgcaatatgcagtgataccccatgctcctggacgggtaagacctcattccccatatgttggaagtgtgcagagtcctcgcggtttgcattttggaagccatccgtatcaccaaccccctacttataactaccaacaaggagtggtgtacccttatggggttacaccatatggacctgactacatgtactcacagtctcagggtttctatggtccttacatgggtcaacagtaccttcaggtttatggagtacctggggcagttaactcaccgggttatcaatatgggcaactgagccatactattcctggtgctcacggttatacagcgggtcaaggttattcacatccaggaagtcatgttctacagcttggtgccacttcacctatgtctgctattcaatctccatacccttctccttcagctccaacgcaccaacgtgtcatcgtccagactcctcctcagtatatacagagtagcggttctgatcagacaacagggtgatcaacttagtaatccttaaagattgcagaaaagggaagaagtccaggacaaatgctactctggcaggcttcctgtttaagcttagcacattatttattttcgcattctagaggtattaagtagtcttgctcactgaagaagtcaaaaaagggggaaaggagaatggaagtttcagggtttgtgcttctgttatctttaaccctctcatcctatgtatatagcccacaacaagcttgatggcataaactatatgaatagtttcaccccggaaacaagggttttcgcggtaaactggtaggaataagtttggtgtacaaagaaagttcatatatatataaacacatacataaatgcatatagaatggtggaatcaacatctgattcttttgggtggtaaaagtagtcttcttactacacactctcttaaggcatatgagtgttggtaatattactaggtagattctcacgtcctcttgagtcaagtcctctgcattgtaagtaaaaaattaatgactatggagctcacttcagcttctttgtctgtgcataaattttagctccaggattcttctcttttctatgtctgtacagtttctagactgataaattgttcttctcaattgtttctgtctatgactcctatcttctactctgattcctct

SEQ ID NO: 974 - DNA, 924 bp, Arabidopsis thaliana
  Clone ID: ARATH-23APR03-CLUSTER42217_1
tttttttttttttttgggaaacaaaatccgaacctatgatatgaaagtagtcaaacgtacatagatcattgatgtaacgaaaaaagtcaaaatcccgaacacataggaccgtgggaaatgtcattctccttgattcaccaaaggacaccttaaagttcacaaattcactcacttacttccattccatctcaaacaatccaaaataaaacactctagtcaacgtttatgtgacgaatattgttacgctcatcctctttaatctttggaatcaccactttcaacacaccattcttcatttccgccttaatctcatcagtcttgtatactttctccggtaactcaatcctactcgtaaacctccgtccatctccagaaacatcttctccctcctctgtttccccttctcctctaatcaccaatgtgttctgttccaaagccaatttcacatcctctctgcttagtcccggcatatctatccttagatgcaacgcgtcgtctttctctttcacgttccaaccacgtctaactccagaagctcccattccacgagtagctgataccaaagggatttcgcttacctggtccatgaaattcagcatctggctcaagcttctcgttggagtaaacggatcgagtatatgtgagaagaaatcgccgccgtggcgagaaacatgtcggtttgagtgatggttcctatcgacaccgtcttcatagtttctggcggcgttggtattgaagaggcgagatgaagcagccaccggacgaacggctcttaaggcgcgagggacggcgacggtggaagaagagagaagtctcctgagagctaaagccgatgatgacgccatttttggaaagagaagaagcttagaattagcaagtgattaattattttcaagctcgatgagatattttttatactctttg

SEQ ID NO: 975 - DNA, 839 bp, Arabidopsis thaliana
  Clone ID: ARATH-23APR03-CLUSTER42221_1
tttttttttttttttttgtggatcactttcctttattacaaatttacaatgagcaacatacaggttttgagaaagtctatacattacagatagtattataccatgacaattgacacagcaaaagcacttaaaatcttcaaaggaagggaatgaagttatcttccatctcatgtgcttgaaccagaggatcaatgattttcttccatcctccaaaatttgaaggggaagcagcatcagacaatacaaacccgttaacgtagaaggttggtgtaccataaacccctcttgaagcgctatacttgaaggaaactctggttgcacgatccgattttttgtcgctgaagccggatttaagaaccgattgatatgagttccccaacgagactgttccaagttcgactattttctccacaactgcaggtcttgaaaggagttgtgtttgcgcgttgtaaaacaatgactgatgcttgaagaacccttccagcaaactgaaggtagcattggcgtgtacggtattcacaatgtgtaaggcccgtgatgttacataggcattgtcatggtagggtaaaggaaggagatggaggagaagggcaacgcgagatccatagtgatgaagagcttgcttcagtggcggccaagagtctctactgtccgggcaaaccgggtcaaaatacgcctcaattagtatagtatccgggtcgaaacgatgacccggtgggtaaacgaaaccatcttgcctcaccggcggcactagctgcgcttgtactctcgtctcaacgacgaagacaaggaacaggagaaccgctcgaatcattattctctgactcacactttttctc

SEQ ID NO: 976 - DNA, 2420 bp, Arabidopsis thaliana
  Clone ID: ARATH-23APR03-CLUSTER4226_1
ggctctaagcactggaaaaaaaaaaagcgtaaagggagccaaacataaaagcagtaccaaaaatttccacttttctttaaccttttttgcttgtctaagaaacttctcctctgaaatcatcgtagattaatctgttttcttagacatgattaagtctccgacgctttgaggtaaccggaaagtgtaatcaatcgcttgttgctgtatttgtcactctccggcgacaaaacttgatttccggtgatagtgtgttcctaagttagatttgcgatgggaactgtggttggaactgttgaggaccgcagagatatgtttgagggcaatgctcagacaaggatcacaccattttcttcaacaaatcagattggaaatcctgttgcctacaagcttgtccgggtttcaggagatgggagtctagtgcctgcaaccgatgaagaaattttggaagtcaatgacaccgatatgcatattccatcagatacttgtcagactataggctaccttgcaaccgatgaagaaaatgtggaggtcgatgagacggatatgcatattgcatcagatgcttgtcagactataggttaccttccagctgaagggataccttctcggttgtcccagattgaaagttcagaagctatcaattcaggtttattgcattctgataatgtgcaaccatatacagaccagtataacgaggagatgttgcaaaaggttgaacaggaagagaggcttgagaatgtacatggatctcagatgccttccactcctgcagatgccaatatccagtgttctaatgaaaacaacttttttgaggaggatcaagtccaccatgaagctttactgcaggatgaatgcaagatgaatgaatctgatatgatggaacgatgctcaaacgcagttgctagtccaaaagaaactgcattgtctgctgctgctcaaaaacctgatttttctagagttagaggtgagatctgcttggataatttaccgattaaagcactgcaagaaacattcagggcaacttttggccgtgatacgactgttaaggacaagacgtggcttaaaaggaggattgcaatgggacttattaattcttgtgatgtaccaacaactaacttgagggtgaaagataacaagttaattggaaatcaagagaagtccaacgatgtgacgaatgccattagaaaggagatgggagatgacgtaagagctactaaaatgaaagatgctccatcgagtactgatcatgtgaatggacattcaaacggtggcaaccactattacgctagtgaggattattccagtgaacagagggctgcaaaacgagttaggaagcctacacgaagatacattgaagaactttcggaaacagatgataaacagcaaaatgacaagtcagtgattccttctaaagatcagaggttgtccgaaaaatctgaggtcaggtctatcagtgtctcctcagggaagagagttactgtcaccaggatggtatcccttgctggatctgaaattgaggttccttatgtttctcatgtccggagaagccgtccaagagagaacattatggctcttttgggatgtcattccagttacttggaagataaagctagtgcagcagagagtaacctcaatctgagtccatcccagttaagcagtgaggttgtgaaccgagattcggtggaaaagtctgcttctcgaccggtccaaaacgaatttgctacaagtgacgagaacaatgtggagcatattctctctgaggttgatcaagagatggagccagagcacatagactcatctggaaatagctcggatgagaataacattggtgtgccaatcatgcaaggtggtgcgcttagaaggaagcatcatcgagcttggactctgtctgagatagcaaaactagttgagggtgtatcaaaatatggagccgggaagtggtctgaaatcaaaaagcatttgttttcatcacactcctatcgtacctctgtagatctcaaggacaaatggcgaaaccttttgaagacaagctttgctcagagtccctcaaacagcgtgggaagtctcaagaaacatgggtcgatgcatattcctacgcagattctgttacgggtaagggagcttgcggagaagcaatctcagtaagcaagtttgttggagatagcaacagaaaggaaatggaaacaaggtccgacttcttgtagctgagttttttttgtaaaatagcaactcaagtaagggagacgagaaatgtgagataagataacagtttctgtagtagacttgtaactttctaaggaggctttgtgggttatatatatttatgagaaaagtattaagtagtgtctgtgtcctgaattggtatgaatgattctctataatatccatggaagtttgactcgcaaaaaaaaaaaaaaaaa

SEQ ID NO: 977 - DNA, 857 bp, Arabidopsis thaliana
  Clone ID: ARATH-23APR03-CLUSTER42347_1
tttttttttttttttttgactaggaacaaacaatctcacactgaataagtatagctagtaatgacacttgacatatgtggctttaacactcaggttccacgtaaaagcttcacaaaagtataatacaagttccagggagttagttagctgatctattaatgggaggtacattcttcagcagatagcgtcgtctcttagaccgagcacgactcctaagcatccataagatcactaagaaaccgataaaaaccatctgaagagcgaaaacaagcttcataccttgtagattcttgaccatgtcctgaagatttcctatagtataaaactcctttggatgaggcgttgaaccgagttgcaagtgtatagatttaaggttggctctaggtttgtagatgtagttaacgttaccacccattatacaagtgttgggacaatgaatgctactttcgtactcgtcgcttccatcgcagcaatcacagattcgatcattcacacgagaagagtaaacgaactttggagaacttccaatgttcctacagtaaaatttgccatttggacatgccgaagttccaggctcatcggtgccgtcgagacaatcgcagaagttgtcgttgagacgatctcttgtgaaagatttggagccatctttgcatttgataacatctgagtcgaaatacttttcatctaaagggtgaacaccaacgaggggagaggtcgaagcgacggagatgacgacgacggcgagtgacgaacacaacacgacgcattgcagcagcatccgttgactcgcatttggttaaaccgacgtcgttttaagattcgagtggattattccgaccagattctctctttacgat

SEQ ID NO: 978 - DNA, 1006 bp, Arabidopsis thaliana
  Clone ID: ARATH-23APR03-CLUSTER4249_1
ggacggtgttatcttaccgccggagccggagtttcccactctattgtaataacagatatttcgaccggagtttctaagtgaatccaaatttgttgttcttcgttgcggctccatctctcgctgtgtatttatagtcaggtcttttgagttatcccattttgcgcgatcccgtcttcaccgtttccatcttccagcgagcacatctctgttgatcgataattttgtacctagttcagttgtaggaaagatgaacaagctgttggaatatgggagaaaagctatgttctatgtgagagttctctccggctatgaagaaaggagaatccggagttacaggttgcaactcgaaaagcgtatccagcaggctaaccaaaggaaagtagagataaacagacttccagagcagattgtattatctgaagtccgccgtatggttgaggagatgcagaatttgaataagcagattgagaatacggaggctcaaattgaagactacttcaaaccgatagacaagcatgctagtaccataatggaaattcagctcgaaggagagaagaaaacgatggggacaatgatgaacgcaacacaacaggaagctatacgaaagattgaagaagctgagaaactcgctcgggcacgtggaaatgcaaatgtgactacagatgcaaacatgggagataagatccaggattcagagtcctcagccaacgaaaaatctcaagcaaaatgaagtcagatcttgtcttcatgttgacacagaatagattcagcgtctctgaatacatcctcttagttgattaaactgagattgtagcctcgcatttgctgaggttttaataattttgaaatttggtcaactgaatagaatcaaaaccgagattgtgttctgtctagcgtacaagaaattatagaggtgaccctggttggaccatccccaacgaccacgttttgtcaatatatgttgtttcaaacttaacttcgcctaataaagtatattgtgatttgc

SEQ ID NO: 979 - DNA, 876 bp, Arabidopsis thaliana
  Clone ID: ARATH-23APR03-CLUSTER42543_1
aaacacatactcttctcttttctttttgaatccagacaacgactttattacaatgacccccacgttaaaataaaaccaaaaaactttctacgtaccaataaccaatttacaaaaatgaaagtaaaaaacccctagagaaagcttttgcattccaaaagggttctactaaaaagaaccgcccaaaaaaagaaaaacaacagttaacaaaaaaaataaaaagacaaacattggttcttggtatcttatatcaccacttggctgatttacatttagcagctcttcctgtgtcgtttaagaacgaaccaaaagtcttgatgacttcttcataggttggccttttgtaatccactgcttgctctaccacttcttctggcttcgcccatttccactccgcaaactctgaatccgcttcgttgttcgctagattgatctctttctcgtcctcatcgttcctcagtctcactaaataccatttctgagcttgaccatgccattcaccgccccaaagacggttaacttttgcttttactgctggtggaaaatcatatgtcaaccaatttgggacctctgagacgatttcagctgaaacaacaccagtttcttcttgtaactctctcatggctgctgactttggatcctccccatcttcaatgcctccctgtggcatctgccatgctcctggaacattcaatctagaagctacaaataccagattatccgagttgattagacaaacaccaacattgggacgataaccaggtggtagattctccatttttcttatttatttgttatctttgactttacaaaaagcaagaaacaaaaaaaaagtttttaacccaacgaagcagcaacgaagaacatgtgtgtgtgtgt

SEQ ID NO: 980 - DNA, 1458 bp, Arabidopsis thaliana
  Clone ID: ARATH-23APR03-CLUSTER4276_1
actcttcttctcctttttgtccttttggctctctccttctctcctttctctcactctctcttttccaccggcgaccattcattctctctcctcctcctcctcctcctcagcttcctccattgctccttaaccctcattcctcgatttgttcttctcttcaccatttcccctttttaccctttttctactcagacgtgacggcgactttttattactgtgtctcccacctttgactcgccctggggggatttttttttgctccagaggcgaaagaaacaaaaaaaagcaatggggtttctccgttgtctccagctgctgctgcttctgtttctatctcttcgtctacaaaagctctctgctcaatcttcttcacccaatgcttcttcttcttcttcactcgatgctcttcttcaagattactcttttagagccttgcttcgtcctcgtaccggcattctctacgaggctactactgttccttccaatttgactgggatcaaactcgctgctatgagactcagaagcggaagctttagaaaacgtggagtcactccttttaatgagttctcaattcccagcggcgttatcgtcaagccgtatgtgacaaggcttgttttggtttatcaaaacctagctaatttctctcacttgtattaccctttgtctggttatgattatgtcgctcctgtcttgggtcttctcgcttacgatgctaagaatctctctgcgcttaatttgcctcagcttgatttaagggtgtctaatgatcctatcagaatcgatttctctgatctggaacgaatcccgcaagggtctagtgctaagtgtgttagattcgattctaaaggtgaagcgagtttcagcgattcgattcagcctggaaacacatgcgagactgagcatcagggacatttctctgtggtggtgaaatctgtggcttctgctccgagtctagctcctcctgggattgagagtaagaagaagaagaagagctctgattccaattccaagacttggatcattgttgggtcggtggttggtggattgatactgttggggcttttactgtttctggttttgagatgtcgaaattacaagaagcaagagaaaatgagggagatggagagagctggagagacaggggaagctctgaggatgactcaggttggtgaaacaagagcaccaactgctactacgactcgtacacaaccaatgcttgaaaccgaatacgcagcttaggatacttttgtgtacatcatcatcatcatcacatcttcttgatcatctgttactgtctttttctttttttcttctacaattattcttcttttggtaaagtgtttctttttctgattattttttctttgtggtaagcaagttgatacttccacattcatcttgtttctctgctggtgataaggaaataagtaatattgttttcttaaaaaaaaaaaaaaa

SEQ ID NO: 981 - DNA, 3591 bp, Arabidopsis thaliana
  Clone ID: ARATH-23APR03-CLUSTER4278_1
agacttttctgatgatggtctagtcaaaaccactcagttcggcttaagccattcagaagaagagtgccaattcatggcgcaatttctgcttactgtactacaagtcctactttgcattgaccttctggatcggaatcggatcaggctcgtcgaaccattataatgccggcgatcatgtccctttgttcgtcaacaaagtgggtcctctccacaatccgaggttgttctcaaattcaaatcttttggtaattcttatgcattttgctttttattggcttatgatgacgggtgagtaatctaagaggaggagatcaagttagagaatgtgtaagatatgtttttgttctagctttagtttgaccatggaactcaaagatggcacattttcttaaaccccattttaaagtttggtgttttgttttgtttgcagtgagacctatcaatactatgatttgccgttctgccgtcgagggcctgtgattgagaaacaggaaactcttggggaagttcttaatggtgatcgtttaatgagctctttatataagctgaaatttagggaggacaaaactcattttgtattgtgccggaagagattaacatcgagtgatattgccaggttcagagatattattgctcaagattactactttcaaatgtactacgatgatctccctttgtggggatttgttggaaaagtagagggagattattttggtcaaggggagaagcatactaagtattatatattcagtcacttaaagttcaatgttctgtacaatgcagacaaagttattgagatcaacagttttagtgatccgagttatatggttgatatatccgagaacactgagattgatgttcaatttacatactcggttggttggaatctgacttcagaacgctctgagacaagaatgaataagtactcccgggcgtcgtttcatcctatcagccagaagattcacttcttctcatttctcaactcgataactgttgttgttttgttaattggacttatatcttttctcttcatgcgccatctcaagaatgaactaagaagttactctatcggagatgaagaagagagaaaggaagcaggttggaaactcgtacatagtgatgtatttcgatgtcctcggaacatcagctggctttgtgcaatcttaggaactggtactcagttgctaatcttgattattgctctatttgcattggccttcaccggttttctctacccatacaatcgtggaatgctgttgacttctctcgtcatcatgtacactctaacatcaatagtggctggttacacatctacttctttccatagccaattcgagggaaataaacagaaaaggagtgttcgtcttgctgggatcctctatccggttcctttcttcataatactttcggttctcaacactgtggcaattacttatggggcaacagctgcactcccctttggcacaatagtcatcatcatactcattttcactcttttgaatatcccatttctcatgttgggaggagtgttaggtaaccgatttggattattagagtttcaacccccatccgctgttaaaagaaacccccgagaaattccaccacagaattggtaccgtagaaagctgtatcaggtgtttcttggaggctttgtacctttcagtgcagttgttctcgaatggcaccaactctatgcaagcttgtggggatttaagatatatacctcgcctggaataatgctttttacattcattgtgcttatcttcttgagttcgagtgtcggtattatcttgacctacattcagctatccggtgaagatcatgaatggtggtggagatcgatattgtgcggaggattcacagcggtgttcatgtatgggtatggagtattgttctatctcaggtcagacatgactggatttctgcagctgagcttttacttaggatacactgctttgttatgttacgccctcttcttggttcttggaaccataagtttcttggcttctttgatgtttattcgccacatctatcgttctgtcaagcttgaataactcccaagaactaaagggtcctcttcctttcatcatgcgactcatctctgtattagtatctttttgattttagttgttaactctttcatgtttcttttaaggaatggaaatgatcttactagatatgaaaagcagagatacattatgttgttcatcccacagagttagtcttcatttcatatcaccattcaacaacaaactacatcacttagaagttacatatgcattatgcaatcaaataaagcaatccaaaacacacagtaaactaaaaagaaaaaaagcatcaacttcacttgcttcctacgggttcgagctgcaaatgggtggctgcacaactccattatctccctttgaatccgtagcactagatccctcaaactcactctttatgcttcctgacttgtgttcatcagcaaccacttttattatctctgatgcttcttcctccttaattatgtacacaccatctccttcttcttcttcatcttcatcttcatcttcttcttcttcctcctcttcttcatcttcttcttcctcttcattggctttttctttctcgccatcttcggcttctttgctacatcttctgtcaaccacagaagaggaagcttccctttctctcacagtcttctctgtgaggctcttgagcaacttcatcacttggaccgcatacatcaatgcagttaaaagggtctgccatctgagacatgttgggggcaaagactaaagcaaggttacgagagttcatcttattaacatgctcaaactgaataacatcagccatgagattgatggcccaattgagaagagaagcttctgtttgaggtaaaagtctcacaactttgacaaaatcctcatctgactcacactgcatcacttgctccgatggcagaggatccagtacccctctcggcagctctctgaaccaagccttaataagaccggctaaacaatggacatcaatcccatcaggtatgatccctttattaagctgctccctaacaaactcttcctcgctgttctctccagtgattctgaatactccttctgcctgcaagcctccttgatcataaagccggctctgcaatagcaacagtatcacaggaacacagttccctctcgagtcgtatgataactgcattgactctgtcgataccccaaacaccgttgcacttgcactgggagcttttctggggacatcaggctcgaactcagagggaaggccgaggaagccatcgaagcgatcgaaggtaacgtgagccacgtggcggatattggttggaccgccaatgtccatggctggtcggtcgttgtcttccacctccgccgtcgagaaacaacgggcgagctccaggacgactcgacctacagacgacgtagagccgccgaaccaccaaagttcggacttaccgagctttctaagtctctctatctctcctctcgcaaaacctgagtcttcttctcgctctgtgttgagactttttggggaatgtgatggaagaaggaagcagagaagagacgcgtccgtaaaggaatt

SEQ ID NO: 982 - DNA, 1540 bp, Arabidopsis thaliana
  Clone ID: ARATH-23APR03-CLUSTER4298_1
ttaaccggctcgactggcaactacgtaattaacgtgaaatcgattagagtcaacggggaaaagctctccgtgattcacaataaaccagcgtcggcccaccgcatcccaaaccaaaactcatcacagacacttctaatggcttcttcttcttgtttgaatcacctcctcacacacacttctaatggcttcttcttcttgtttgaatctcttcttcttctcttttctctccgctctaatcatttctaaatctcagatctctgattccgttaacggggtcgttttccctgttgttaaagaccttccaaccggtcaatacctcgcacagattcgactcggtgactcaccggatccagtcaagctcgtagtcgatctggccggctcaattctctggtttgattgttcctcaagacatgtttcctcgtcaaggaacctaatatccggtagctctagcggctgcttaaaggcaaaagttggaaatgaacgagtatcatcatcatcatcatcgcgtaaagaccaaaacgccgattgcgaattacttgttaaaaacgacgcctttgggattacggcgagaggagagcttttcagtgacgtcatgtcggttggctctgttacttctccgggaaccgttgatctacttttcgcttgtactccaccgtggctgttacgtgggctcgctagtggagcccaaggagtaatgggcttaggaagggcccaaatctcactcccttcacaactcgccgcggaaactaacgaacgtcgtcggttaactgtttacctgtcgccgttgaacggtgtcgtatcaacgagttcggtggaggaggtttttggagtggctgcgtctagatcgctggtttacacgcctttgttaaccggttcgagtggcaactacgtaattaacgtgaaatcgattagagtcaacggggaaaagctctccgtggaaggtccgttggcggtggagctgagcacggtggttccttacacgattttagagagctcgatctacaaggtgttcgcggaagcttacgccaaagctgcgggtgaagctacatcggtgcctcctgtcgcaccgtttgggctctgcttcactagtgacgtagattttccggcggtagatctagcgttgcagagtgagatggtgcggtggaggattcatgggaagaatctgatggtggatgttggtggtggagtccgatgctcggggattgttgacggcgggtcaagtcgagtcaacccgattgtaatgggtgggctacaattagaaggctttatattggactttgatttgggtaactcaatgatgggctttggacaaagaacacgctctgattcaacttcgttgtaatacagaaacctttgtaattgtaaccttctaattatctggtagatatcctcaattttgatctcttttgagtgtactcttttcttacaatacctgctacaagcaatcatgcatttgtacaactaatagatctaatttaagaaaaaaaaaaaaaaaaaaaaaaaaaaaaaaacagggcttgggccgcgtgcagcgacgatc

SEQ ID NO: 983 - DNA, 1764 bp, Arabidopsis thaliana
  Clone ID: ARATH-23APR03-CLUSTER4306_1
ggagaacacatttggacaaaaagaaaagataaaataaaataaaaaacaaaacccccaaatttgtgtctcctccggaaaaaaaattcgaaattccggatccaccgccatcaatccctagctttctctctctttctctatcttcgccggcgaaaccagtagggttgctcaattcgttggtagagtactgtggcaatgaagaaaggagcgaagagaaagggtgtttcgaaagcaggtcgcaaagctgctgttgcggagactcagaacgatgaggtgatagaggagacgacgaagacgacgcaggaggagagtcaacagcatgaggaagaagtcgtcgacgaggtgaaggagaatggggaagaagaggaggctaagggagatcaagaggaagaagaggatgcgaaacctgattccttagaggaggatgaggagaatcaggaagatgaggtcaaagctgaggaagtaaaggaagaagttgagaagaaacctgttgctcgtcgtggtggtaaacgaaagagggctacgaagaaggatactgagattaaagatgagaagaaacctgttccgaaagctaagaaaccgagagcggccaaagttaaggaagagcctgtctacttcgaggagaagcgtagtctggaggatttgtggaaggttgcatttccagtgggaactgagtgggatcaattagatgcactttatgaattcaattgggatttccaaaatcttgaagaagcattggaggaaggaggaaagctctatgggaagaaggttatgtctttggctgtacagaacctcaactagtcccctacaaaggcgcaaacaagattgtccatgtcccagctgttgttgttattgaatcaccctttccgccttctgataagataggaatcacatctgttcagagagaagtggaggaaatcattccaatgaagaagatgaaaatggactggcttccatacattccgattgagaaaagagatagacaagtggataagatgaattctcaaatttttactttgggttgtacgcagagaagatctgctctcagacatatgaaggaagatcaacttaagaagtttgagtattgccttccttatttctatcaaccctttaaggaagatgaacttgaacagagtactgaggtccaaataatgttcccctctgaacccccggttgtatgtgaatttgactgggagtttgatgaacttcaggaatttgtcgataaactggttgaagaggaagcattacctgctgaacaagcggatgaattcaaagaatatgtcaaagagcaagttcgagcagcaaagaaagcaaatcgagaggccaaagatgctcgaaagaaagcaatagaagaaatgagcgaagatactaagcaagcctttcaaaagatgaagttctacaaattctaccctcagccttcaccagatacaccagacgtctctggtgtccagtccccattcattaaccgatactatggaaaggctcatgaagtcctttgagatcagatgatcagatgtttgagaagccagaaagcttttcttggaagcttcagcagaaatcaaagttatttttaatcacaggtgctctcagaaactctttgagcttttatagttattaagccaagtttgtaggacaaaatgtcttttacttttatgagtttgtattctcctcgggagtacttgagatcttagaagagtcacgggaacccaattctttttgcggaaaatcgagacagctttttattaaaaaaaaaaaaaaaattttctt

SEQ ID NO: 984 - DNA, 2571 bp, Arabidopsis thaliana
  Clone ID: ARATH-23APR03-CLUSTER4307_1
ggttgtaaaatcattccatttcatcgcaggtcgtgcgctcgaaaaactcaacacgaaattcattatttcgaaacagatctctttttaagcttcaaagatcaaaactttatcctgataaagagaatatgaacacgaaccacattcaatctctcaatctgctctaagggatttgttttgtcttgattctgcggagaaatcgattagaaaaaatgtctagttacgttggtgttcttgtctctgatccttggttacagagccaatttacacaagtggaattgcgtacccttaaatctaagtttgtttcgaacaaaactcaattaggacgtttcactgtcggagatttaccacctgttttcgaaaagttgaaagcttttaacggtaccattgatgaggatgagatcaaatctgtattggacaagtcttatcccaatgctgatgatgaagtcgattttgagttctttcttcgggcctttttaagtgtgcaagcacgaggagttgagaaatcaggagggtcaaaaggtgcttcttcattcctcaaaaccagtactacaacggtgcaccatgcgatcaatgaatccgagaaggcttcttatgtttcgcatgttaataattacttgagagatgatcctttcttgaagagctatcttcctattgatcccgcaacaaatgctttctttgatcttgttaaagatggtgttcttttgtgtaagcttataaatgttgctgttcctgggaccatcgacgaacgagctatcaacacaaagaaaacgcttaacccatgggagaggaatgagaaccttactttaggtctcaattctgccaaagctattggctgcacagtggtcaacattggaacacaggacatagctgaaggaagaccatatctcgtacttgggttgatatctcagattataaagatccaaatgttggctgatctcaattttaagaaaactccttcgctttttcaactggtggacgacactcaggatgcagaggagctcatgggattggctcctgaaaaagttttgctaaaatggatgaatttccatctgaagaaagctggttatgaaaagcaggttacgaatttttcttctgatttgaaggacggtgaggcatatgcgtacctgcttaatgcccttgctccagaacacagtacacatgtggcattagagaccaaagaccccacagaaagagcgaaaaaggttcttgagcaggctgagaagctggattgtaaacgatacctttctcccaaagacatagtggacggctcagcaaatcttaaccttgcatttgtggcgcaaatatttcagcacaggaatggattgactgttgacgattcaaagacatcatttgctgagatgatgacagatgatgtggaaacttcacgagaagaaagatgtttccgcctctggattaacagtcttggcacagccacttatgtcaataatgtttttgaggatcttaggaatgggtgggttcttcttgaagttctcgacaaagtttcacctggctcggtcaactggaaacacgcaaataaacctcccataaaaatgccattcaaaaaggttgagaactgcaatgaagttataaagattgggaaggaactgcgcttttcccttgtcaatgtagctgggaatgacattgtgcaaggaaataagaaacttcttctcgcatttttgtggcaactaatgagatatacaatgctccaacttctgaggaacttgagatcacactcgcaaggtaaagaaattacagatgcagatattcttaactgggcgaataggaaagtgaagagaggtggccgaactagtcaggctgatagcttcagggacaagaatctgtctagtggaatgttctttctggaacttcttagtgcggtagagccaagagttgtcaactggagcctcgttaccaatggagaaacagaggaggataagaagttgaatgccacatacatcatcagtgttgcacgaaagcttggatgttccatattcttgttgcctgaagatatcatagaggtgaaccagaagatgatgcttatcttggcagccagcatcatgtactggagcctccaacaacaatcagacacagagtctactgtctcagaagacgccactgatgatggcgacgcaaactctgtagcgggtgaaatctccaatttgtccattgatggagcttccgagtccagtcccactgtccaagatcaagaattgctgacgaaggcagacaatgatgaggatgaggttgatggtgagaataataaagatgcatgacgcgtttgaatgtttattttgatcgttgttttttggtttattgcgtgaagttttgattggcacaaaggaaacacaaagaaagaagaacaaggtttgatatgtatacaaacaaagagggttttggtacacaagttttacattgtgtacgtaaacctcatttttgaattgttaaagttctactttaaaaaaaagaaaaaaaaaaaaaaaatttttttcatttccaatttcatttttgtttatcaccggtctaaactcgaaattgtataattgtttaggcagaaaacaataacatttagct

SEQ ID NO: 985 - DNA, 947 bp, Arabidopsis thaliana
  Clone ID: ARATH-23APR03-CLUSTER4310_1
gatgattggaggagagaatgagttggtctctctgcagcacccatggggtctcctcttccatagctctcacttatggctttcgccatagaagaagatccaccttccgtattttcgccacctctgacggattagaacccaaggacgacccgccggaatctcctctcccttcctcatcctctgctctcggtaaagacttgaaaaaggttgttaacaagactgctgcaacctttgcccctagagcttccaccgccagtaaaaaccctgctctccctggaactactctttacaaagtttttgaggttcaaggctatgcatcgatgttcctcggaggtgtcctttctttcaacctcctctttccctccagcgaacctgatttatggaggttgatgggcatgtggtccatttggatgttcactattccttctcttcgggcacgagactgtccaagtaaagagaaagaggctcttaactacctctttctcatcgtccccttgctcaatgttgctattcccttcttttggaaatcatttgctcttgtctggtctgctgacacggttgccttctttgctatgtatgcctggaagcttggatggctggaaagaacagagtagggactactcgtgaatcatgatgggattagagcatgaagattctttgtcttttcttccttagaatggtacttcattcagcttatcgtgttaggtacgtgggtttaaggcaaatgaatgtgaacattgctctagaatgatatatgaactagccccttaaggaatatttcttgtaaatcttaaagttctgagatgaattattgttcaaaatacaagtgggagtacatatacgttttgttagcaaaaaaaaaaaaaaaaattctggacttgacgaggcaggggaattgttatcctccgagtcttctaattgcttgaaatgaatagtgatgtcagacattg

SEQ ID NO: 986 - DNA, 1381 bp, Arabidopsis thaliana
  Clone ID: ARATH-23APR03-CLUSTER4315_1
tcggctaatccttggtccgtgctaagatcttagatcgatttctaaagtcttcgtcttcttcttcttctgataactagatttttcaatcttctgaagctttaattttttcatagccatggctaatcgttatgatccaaatcctttcgctgaggaagaagaagtcaatccttagatcttagatcgatttctaaagtcttcgtcttcttcttcttctgataactagctttttcaatcttctgaagctttaattttttcatacccatggctaatcgttatgatccaaatcctttcgctgaggaagaagaagtcaatcctttcgctaatgctagaggagttccacctgcgtcgaattcgagactttcgcctttgcctccagagcctgttggtttcgattatggtcgaaccgtagacattcctcttgacagagctggtacacaggatttgaagaagaaagagaaggaactccaagccaaagaagctgagctaaaacgacgagagcaggacctcaaacggaaagaagatgctgctgcacgagctggaatcgttattgaagtgaaaaactggccgcctttcttcccacttatccaccatgacatcgcaaacgaaattccggttcatctccaaagactacagtatgttacctttgcaacgtatttggggttggttctttgtcttttctggaatatcatcgccgttactacagcttggatcaaaggagaaggagtgacgatatggcttcttgccttaatttacttcatagcgggtgttccaggaggctatgtgttatggtatcgaccactctaccgtgccttcagaactgatagtgcattgagctttggatggtttttcttgttctatatgctccacattgctttctgcgtctttgctgcagttgctccacctgtcgtcttcaaaggaaaatctcttgctgggatcttacctgcaatagatgtcttaagtggtcaagcaattgttgggatattctacttcattgggtttgcatttttctgcctcgaatcagtggttagcatctgggttattcagcaagtgtatatgtacttccgaggcagcgggaaacaagatcaaatgagacgggaagcagcgagaggagccttgagagccgctgtttgagagttctccttgtaacattctggtttgtgtatgcactgtttcttttttcagattttcttgaagtctctctctctctctctctctctctctgctctataaacaaaaaaaaaaagatttaatttttcctttgtacctttatgtcatgtaaatttgtttgttcaaaaatcagagttcagattcatacgtattttgaaatcaaaaaaaaagggcggccgctctacttttttttataagaactcatcttacatcc

SEQ ID NO: 987 - DNA, 1238 bp, Arabidopsis thaliana
  Clone ID: ARATH-23APR03-CLUSTER4319_1
ggaggatttggttaccgagagtttgtttgaacggtcctcagaaattcggagcttgtagcttctcggtgcggtgccttcactttaatggcggcaatatcccctgttcaatgcttattctcttgcaattctcatcatcatcatcaacaacgcgagcagagtgggtcgctttggagattgggttctagggttttagtatcttcgagtctatggaagctttctctgttctctggactccatttgaaccgaaggagaactttgatctgtgcagtcaagggagatccagaagatgcctttaagaagactgtcgaaatcgatcggatgattgatgctcttagagatgcaaaccctagacaagttgagaagattgttgttgaaaatatccttgcttttgatgaggttttttggataagactagcagctaggtcggatacttgtaaatcagaagatgacaagaaggactatgaggagttagctacaactgtgatgactatagttgactgtgttgtgaataagactcgggaaaagatagagacgtctactgatattctgaaagggattttaagacctgctatagatggagtggaagagatttcatggccgccaagagatcctgaagccatcaatctaatgaaaaaggaaattatacaacgggaaaaagaagggcaattagatgaaggatttctttcagaagttaatgctcagctccggcaggcaaaagaagataaagacaaaccagggttattggctatgctgcaaaaagttcttcaactctattctgctactatcctctccaagcgtagctacgcaaagaaagggaacgaagttgtaaaagccgagcattttcttgaaactctgatcaaagctcctgaggaacaatggaacaagcttttcgtagacgggttaacaatcggaaaaggagatatcacacctgatgagctatctgctgttatcaagaaacgaatcgagcgcacactgattcgaactgaagggggttcataccagcagcgaattttgaccgagtatctcaaaggaatcgagtccagggctaatgaaattatgaaattactccagggttaatgtcgtaaatcatgtatttatctatacatttttgtgtaatatcagttcaataaccccaattaatatattgttttctctcatgtaataattttttgattgagcaaatgaagtgatatctgatttaaaaatatgaagctctgtagccaaaaaaaaaaaaaaaa

SEQ ID NO: 988 - DNA, 1486 bp, Arabidopsis thaliana
  Clone ID: ARATH-23APR03-CLUSTER4328_1
acaaatccagtttcggctccgtcttccccacacgcgtgcgtgaccgtctccgtcgacgaactggagagagatggcggaaaatctattctcagggctgccacctccttcttcatctcagcagcaagagctaccaatttctccaataccagacgagtcaaagattgaaacttcctctccagctccgattctggttctcaagagtgccctaaagcgatcgaagccagaagaatctgcacccaatctttcagctcctcctgttctcaagagcgcactaaagcggtcaaaaccatcagaatctactccggaaccagtaccagaaccggaagctcctaaaaagcgtctacagtttaagacatcaaccgatgcatcagaggaacaagtgatagaagctatgcagaagataacatctcatatcaagaacccttccaaattctccaaagcctcgaagcttgctatacggctgatccaagctggtagtgtgaagccagaaacaagcagctattttattgcgatacttgaagctgccatgtcgtctaaaactccttgtacagatcgctcggttcgagcagactatcatgcattgttctcggcagctcaggatgtagccgagtgccttgataaaagccagaagaatctgttgaccatatggacattcaaagcagttgtggctaatgacctcttcactgatgacagctttatgttttccaagactgctactcgtataaaggaggctatatctgatcttccggtttcaaccgaggaggatgatgtggaagaagcagctgctcttgaagaagcagcggtgaaagacaatggagatggccagacaacgcaggacgtggctgaagctgcttcagctggagataatgaggctgtcgagtctgatccatttggactagatgcctggattcccagttctggaaagaaaaatggtaaaacaaagataaagagaacaaatgaagatccagatgccgaagagaataagaggtttctcaggtcaaaaagagaagctttgattacatgcttggagattgctgcacgccgttacaaagttccatggtgccaaacagttatagacatattggtgaaacatgcctttgagaacgtgtcaaggttcacatcacagcagagacaagcagtggagaaactctgggcttctgttcgagaacaacatctccgtaggaagcaaggcaaatcagtcacaggaaaactagacgttacagcttttgaatcgcttcaggataaatacgccaacgagaaaatgagcatccgaagctcagttggagccagcggtgaacgccgtgcacagcaatggctcggttaataaaacagtttccaaaaaggtctgattggtaggatttgttcactaagacatgaactagaaaagcaaatagagaaaaatattgctctgtttctgattgtatcttagaacaaaaagttaccacctttatccaaaatttttacatgaccgaaaaaaaaaaaaaaa

SEQ ID NO: 989 - DNA, 1331 bp, Arabidopsis thaliana
  Clone ID: ARATH-23APR03-CLUSTER43364_1
agttaagaatttgttcttttttttttggcataaatcttgattcttatggcattgtattgtcaaacatctacgaaacgaatattgcatttccatctttatcaacggcagccaaagccgtaatataaactctaatccctttacttaatcttacaagtttcaatgtttctatacgttccctgaagaaccaaagcaacaagttaaaagtaacatatgtaaagctttttaatctctgtttgttcttgtgggattatgaatcctaaccattagacgcgaaagctgatctctttagcagcttcttgacagtttcgaaccgtggtaaaattctcaagacaaatacactacgaagggtaatagtagaaacaccattagcattaaggaaacaataaacttgatcgggtgattaaacggtaagcgtatcggattttgaaagcaaccggtcttgtcaaagagctgattatgatcaggaagtctctgcatccacaatacagacttagttcctttaactttaggcgtcgcttctatttgtgccaccaatgtctccttttcttcttcattatcaccaccaggaactataattctcaaagaattgaaatttggtgaactccatattcttctcagcccaactgatttctctgcttggccaggtgtcactctttcttcaatgtctatgacacactcagagccatcaccataaactttagctttcttgaatgttactttagctgaaacttccataacgttttcaactagagaactattagtagactctctcgacttgatgctgctctcaccactaaaactctgtgaagttcgagaagatccagagagaaacattgctaagtcatcacgctcttcttcattaagatcaacccaacggagaggctttttcccattttcactataagcttcttgcagagaagtttctacgcgatgaatctggttttcaatagcggtaacaaactgtttatgccgtgtggatgaagaatcatcatccccacaccgtttatgactcaatctcactgccttctcaaactcctccaactgccatttagctgtacctaaagctgcttgaagttccttacaaatctcatctttcttctctctaatccacaatctataagcagactccattatatctgtagatttttgaacctcttcagctgcagagaagaaaacatctttttgccatagatcaaagctgttcactaccatcatcttcttcttcttcaggagctatccacaaaacagagtcaaagagaatcaaaagaagcttttacgagcaagagaatcgaaatttttctcgaactcttgtttcagctttttttttgtgt

SEQ ID NO: 990 - DNA, 702 bp, Arabidopsis thaliana
  Clone ID: ARATH-23APR03-CLUSTER4336_1
gatctcactttctccatcttaaaactctttcttgtatttattttcctcccaaaaaacatctttaagagtcctcatggcgatgtctttatcaggagctgttctcagtggcatgggttcttctttccacaacgtaggagcaaagcagagtggtgttggtaccgtcagagttggccggaagagtgagctcgtcgtcgttgctcagcgcaagaagtcgttgatatacgccgttaaaagtgacggcaacatcctcgatgacctcaacgaagccacaaagaaagcttctgatttcgtgacggataagacgaaggaggccttggcggatggcgagaaaacaaaagactacattgtcgagaaaaccattgaagccaatgaaactgcgactgaggaagctaagaaagctttggattatgtgactgagaaaggaaaagaagccggaaacaaggcggctgagttcgtagagggtaaagcagaagaggctaagaatgccacaaagtcctgattcaaccactcatgtagtcatgttcaatagtttacaataagatcagtttgttgtaatttctttttcaccatttgaaatgaagagctgttaattacacaaaaaaaaaaaaaaaatacgtatcaaatgatttaaatataaactacattttagcacctaaaaaaaaaaaaaaaaaaaaaaaaaaaaaaaaaaaaaaaaaactcgag

SEQ ID NO: 991 - DNA, 1406 bp, Arabidopsis thaliana
  Clone ID: ARATH-23APR03-CLUSTER4343_1
agtttactgactacagagaggatttgaactgagaatcgaagaaagtctctgagggttcatctatggaaccggttataatcggtgcgctgattttggatgttcacgccaagccttcgaccacaccaatctcaggaaccactgtccctggccaggtcttatttgcgccgggtggtgtagcaagaaatgtagctgattgcatcttcaagcttggaattacaccttttatgattggtactttagggcttgatggtccagccaatgttttattgaaagagtggaagctctctatgaaaggaatcttgagacgtgaagacattagtactcccattgtgtcccttgtatatgacactaatggagaagttgccgctggtgttgctggcgtggatgccgttgaaaattttttaacacctgagtggatccagcggtttgaatacaacataagctctgctcgtcttcttatggtagatgcaaatcttagctctcttgctttggaagcatcttgcaaattggctgcagagtccagtgttcctgtatggtttgagccagtgtcagtcactaagtcacagaggatcgcctcaattgccaagtatgtaacaatagtgtccccaaaccaagacgaactcatagcaatggcaaacgctctctgcgccaagaatttgtttcatccctttagatcagacgaaaataagctttctattgaagatatgttccgtgcactaaagccagctattttggttctccttaaaaatggtgttaaagtagttatcgtaactctcggctccaatggagctctcctatgttccaagggaaacccgaaaaaggctctgaacatagacagaaagtttctaagaagtggagaggtcttcaaaagagtacagtctgtatgttcaccaaaccggttttctgaattgggatcgaatcgcagcccgagtcttttcgcaatgcatttcccaaccatcccagccaaagtcaagaagctgactggtgcaggtgattgtctggtaggcgggacagttgcatcgctaagcgatgggttagatctaatccagagtttagcggttggcattgcgtcggcgaaagcagcggttgagtcagatgataatgtgcctcctgagttcaagttggatcttatatctggtgatgcagagttggtatacaatggcgctaagatgttgatggttcaccagtcgatgctatgaactgtgaaggagtttagtggtttacctagtagtctagtcttatcaaataaagtattgctagcaaaaaaaaataatgtccaaaatattccctagtgtttagaaatcaatttagagattttatttttggtgcgcaagggtacaactaaatagttgcaagggtttttcaaataaagtaagggttacagttgttcaaaaaaaaaaaaaaaa

SEQ ID NO: 992 - DNA, 2431 bp, Arabidopsis thaliana
  Clone ID: ARATH-23APR03-CLUSTER4349_1
gattgtcgaccttcacaaaataactatctctctctgtgttgcatgcgttagtactttcaatggccacagaacaagaattcacacgcgcatcacgcttctcacgtgactcaagcagcgttggatattactcagaagaagataacacggaggaggaagatgaagaagaagaagagatggaagaaatcgaagaagaggaggaagaagaggaagaagaagacccacgtatagggctcacgtgcggaggaagaagaaacgggtcaagtaataacaacaaatggatgatgttgggtcgaatacttgacccgagatccaaatgggttcgagaatggaacaaagtctttctccttgtatgcgcaacgggtctattcgtagacccactttttctctataccctatcagtgagcgacacgtgtatgtgtctcctcgtcgacggttggcttgctcttaccgtcactgccttacgctccatgaccgatcttttgcacctttggaacatttggattcagttcaagattgctcgccggtggccttatcccggcggagatagcgacggcgataccaacaaaggaggagggacacgtggctctacgagggttgctccaccttacgttaagaagaatgggttcttcttcgatctcttcgtcatattaccattacctcaggtggtgttgtgggtagtgataccttctcttctaaagagaggctctgtgactttagtggtgtcagttttgcttgtaacattcctcttccaatatctaccgaaaatatatcactcaatccgccatctccgccgcaatgctactctctcgggttacatcttcggcaccgtttggtggggcattgcactcaacatgatcgcttatttcgtcgcggctcatgcggcaggagcgtgttggtacttgttaggagttcaaaggtcagcgaaatgtcttaaggaacaatgtgaaaacacgataggatgcgacttaaggatgttgtcatgtaaggaaccggtgtactatggaacgaccgtgatggtccttgacagagctagacttgcttgggcacaaaaccatcaagctcgatctgtttgcttagatattaacaccaattacacatatggtgcttatcaatggaccattcaacttgtgagcagtgagagtcggttggagaaaatcctttttcctatcttttggggtctcatgactctcagcacatttgggaatttggagagcacaacagaatggtcggaggttgtcttcaatatcatagttctaacaagtggtcttcttctcgttaccatgttgattggtaacatcaaggtatttctgcacgctacaacttcaaagaagcaagcaatgcacttgaaaatgaggaacatagagtggtggatgaagaagagacatttgccaatagggtttagacagcgagtccgcaactatgagcggcaaagatgggctgctatgcgcggtgtagacgagtgtgaaatggttcagaaccttccagaaggtcttaggagagacatcaagtaccacctctgtctagacttagtccggcaggttccattgtttcagcatatggatgatttggtgcttgagaatatatgcgaccgtgtgaagtctctcattttcaccaaaggagaaacaattcagaaagaaggagatgcagtacagagaatgttattcgtagtgagaggtcatcttcaaagcagtcagttactaagagacggtgtcaagagctgttgcatgttaggtccgggaaatttcagcggcgacgagcttctctcgtggtgtctccgacgacccttcgtggagaggctaccgccttcttcttcaacgcttgtaacactcgagaccaccgaagcgtttggcctcgacgccgaagacgttaagtacgtgacgcagcattttcgttacacttttgttaacgagaaagtcaaacgtagtgctcgctattattctcccggatggcggacttgggccgcggttgcggttcagctagcttggcgaaggtacaagcataggctaacgttgacatcactgtcgttcataaggccgagaagaccattgtcaagatgtgcgtccttaggagaagacaaattgaggctctatgcagcaatattaacctctcctaaacccaatcccgacgattttgatgattattgattgaactatttttttgttacgtttgatatacctcaattctggaacacttaagtggtaactatttcctcttctcatagttcatgtggatatttttttctcctgccgcctttttatttaggtttaacaagtcaggtaatttttttccaagttcacttcacactgctgcaaattctagcagcactcatataatcaaacctttaattattttctaattcacaactagaggatagtctctcagcttggtgatgaattgcttgactccctaatagtaaagcatatttttcacg

SEQ ID NO: 993 - DNA, 10681 bp, Arabidopsis thaliana
  Clone ID: ARATH-23APR03-CLUSTER4350_1
atgcttgaaggatatgtgcaaggatttgtgaacctgttgttagggtacttaggtcgttacattaaagacatccagaaagaccagctcaagatctcactctggaatggagaagtcttattggagaacgtggaattgaatcctgaggcgtttgagtatttgcagcttccaattgctctcaagcaaggccgtgttgggaaattgagcattaaaattccatggaagaaacttcatagggatcctgtaaccattatgattgaagatgtctttatatgtgcatcgcaacgcaatgatcaagagtggagttcagatgtcgttgagaaaagagagtttgctggtaagaaagctaaacttgcttctgcagaactggcaaaattgtccaggcgtgtcttcgacaatccaggcggaaattcttatatgtcatatattactgccaagattcttgatagcgttcaagtgtccatcaaaaattttcacatcttatactcagatgcacaacctgaatcggggcaagttgtattaggattgcggttttcaagcttgacagttactaaacaaaactcagttgggccatcagttggtagggtgagaggggggcaagtgaatatacttgtggaggttgaaggtttggaaatatattgtgacatgtatgagggaaacatggactttccaagtgttaatgaaaaaataggttttgacaattggtgccagtcaagattgcaaagcaatagatttggttatttactgaagccagtccatgtttctgtaacgctattggtcaatcgatctggagagctttatgacgatcttcctcagtattctatcagcgctgagttgactgatgtgcagattcttattctgttagattatttgcaaaccagccagttgcgtgagaggtatgggcggtatcgtccctgctccacttctttatcgaggaaaccacctggatggcagaaactttggtggcactatgcccaaaattcagttttatctgatgtacggaagaaactgtggaaaacttcatggagatttcttgaacagcgaatacaaatactcctggaatgtattcaagcggtctgctcacttttagatttttgtttcggcgaaaaaatacaggagaatccgcaggagtcaatcgataagtccatccgtttgggtttggaagaattggagaagaagtctgatattgatgatatcttaagttataggtctgcagcggaaggtgagatgcaggaagcttgctcagaattgacagtaaacatgggagcgactggtgccactagatccgaaaaggaacagagtgcccctgaaaaggaaccgagtgacgatcctacattaaataagtcgcgtgggtggttgaactggttgtcacggggaatgcttggtgccggaggcacagaggattcaagtcagttttctggtgttgtttctgatgaagttgtcaaggatatacacaaggcaacaaagttttaccctctttcttcatctcctagaaatacaagtgcaactggtaagatctgtacgtgctccattcgactcaacgtacgcaaattttctgctactttgcaacatataagtggaagttcttctcaagttattacagagttggacattttgggggtgattgttgaatgcaagtcttggaaagattctacagccatgattttatctgttatttctggaaggctggtctatcctcacaatgggaaagaaattttaaccatgaaaagggtctgttctcagagtgatacactagaaacgaaaccctcatatggagcgcggttggagttgtctaaagatcatgatgttgcattgtcattaaaggccacccttcaaccacttgaagccgcttatgatggaggcttcattctagctgtcagtaattttttctcgggttcaagatacttcaaactccaacatgaaaggattttatcatcactcaatggccttgaaagtgaaacgcgattggcagcgaaagctgaatacctcttatcaagccgaaataaagttaagtgggatctggacataaaagatcttaccttaagtttccctggacgattggttgaatcagaaagctataatctggttctggtattggaatctctttctatcacatctagtagcacagatgctcttagccaaattccaagattgcagtctgatgtggaccatgtggtcaatagcttacaaagttccgttgaagctttggatgcttttcaagtcaaagatctctacgaccattttgatatcaaaatctgtaaccttgagatgaagctcatgaagattcatcctttccaagaacttccccttgtggagaaatcatctttacttatcaagtttgcgtcttgtataattccggaggagtcgattttgaagcagttggaggttgaagctactctgcctatgttcaatgtccatttctctccgtcaatatttaaaggagtcatgtctgtgattgaatatcttgatattcaggatcatggaactcgaaatcctccaccttcccctgctcccatctttcacttcaccatcaaaaccgacttggcatttttaaggttgcacgtcaatctcgaaaataaaggagaaaatagcacagtgcttgttctttctatacagcagcttgatctctggtattcacgtgctatatttgaagagtggtcagtccgtgcgaaaacattggaaataacagcttgctcctctaaagatgcagctgacagtcatattttatgttcatctggaaatctactcaaatcgtcttcccatggacatgggatggatgctcatactagcgatgaaaccaacattattgactacagaacaactcctgaagctgctatcagcttaaattgcaaggtttctcaaagtaaaagttttatttttcacaagtatacagtctattggaggagcgccgagctccattgctacccatacatatttggtttgctgacaaattttttggataagatagcttcctataagatctcgtctagctatacaaatccatctagccttgctacagataccattgctccaacagaaatacctcagtttgattttgaaaggtttggattctcaaacttcactgaaagtagatcttgtggctgcattcctcttgacaaatttccatttgtaaccattaacaattcgggttctcttcatagcctagaaagttctctgtgttattcgacttctgactggaggaagttatttatattaaagaatagaaaggatggggcacaaataggtttgaactgcgaatgtaacagctgtacttttcaacttaaacgtgattgccctctgaatgggcttgcgtcctccagggatcttggtcagaccaatcactttacagttgatatgcatgtcttcaacaccaatgtacattttcatgattcttcaagtgtttttggaactattatactgccagtatccagatactttcttaacatttcagatgatcttctcgatttggttgcctctgctgaagacttgatgctggtgtcatctttgttcaccaactattctggcgggtttctttggaaacaatcatcaacagatgtctcacaggtcttgaacctacgtgtaaggaagaggggtttggagccttctggttctcaacttgaagtgagcataggtattcaacacacatactgcattttaccgccggaatatctagccattataattggctatttctctctttctgactggacttcaaagtctggcctgcagtcattgccacaagctactgagttgaccaaggctcattctgagtttgccattagttataaaattgagatactggactcctctattgttcttcctgtggaaggtgatgaccgccggcaactgaaagttgacattcagcagttatatattagctttattccagagtgtgcgttgagcaatgtggtgcagcacataccacaggaatgtgttattccacttaatcaagtactagggcgagccgactgtttaaacatatttgggcgggacttatcagtatcattgctgctttctgagagtgacatatcaacattcaagaagaacgccgtgtgcagaagtatcactctggctgctagcattattgctgatacttggattagattcccttgtgatcacaatccgttaacggaattggcatgtgttatgtcaagggttgacgtttgtgaaattgttgtcgatgattcagatgccttggatgggtttaaggcatttcttgatgtggttgatcagctttctttagtcgatgaggaatcaaaacttttcgtgtctgatgttcctcagtttcttcatacgaagatgcgcctaaagcaagagttgtcagttgcacccctggaaccttccacaagctttataaaattcagaatttttgtcaatcttttgacgtcaaaactgcatcggttaaggaaagctcctggaacactgctatccgaaccagtgctccaagctgatatgaaatttgtttgctctggagaacttaaaaataatttccctatgagcttggatgttcagtttttcaaaatcgggctttattcattactgagctcagtcatgttagctagatgcatcaatgcagatggggatccttctgcactgagagtcagatttacggagcaggctgaaaatgaatacgatctctgtttttctcttccatccctagacatctggttacacttttttgattggattgaagttattgaacttctgaaatcttattcccagaaactggaagacagtagtgaagaccgttttttctcaaaaggttcaaaattggatatggatgaatctattggagtggtaaggactatttgtgacaatactgatcgggttttgaatgttctgcaaactgaggtatcagagaactctagtgaggtaatgtcatttgccgcaagatcagagaatattggtgtcaaaatccatattcctctttgcacaagccatacagaatttccagggttcatggcaactgatgttcatgagatatctgaggaagagcacacaaattgttttaaagggaattactgtaaatatgtttctgttacagcgtgtagtagaagtggcgaactctctattcttgggagagatgtcaaactgagctataagattgaaaagctcaatgggattcttgcaatatctggggttgacactgtcaggtcttgctctctatttggggcggcacaactacttgtagaaactagtattcagatggatcagaacaaaatcatgagcatagatgtggggatactgtctgacaaagtagagatgcatgcatctcatcaagtattatctttttggcatggaattacgtttgatgcacctgagacaccatcttcacaaaattcggaaggaaacatgagcataaaagtccagataagagatgtgtctcttcttatatcagatggaaagtggggatgtagcggtatgcttcttgaagttcttatgagaaactttctcctgcaagctaatctggccgaaaaaaatatggagagtttggtttcatgtgatcttgaagtgaattataataatatgcacaaggtcttgtgggagccttttattgagccctggaattttgatatcaaattatcccgaaaatttgatgcaaattctttgctgaacaatgctgggctcactgaagtaattgttgcatcatcaaatcagctcaatttgaacttaacagaatctctttttgagcagcagagcaagttgatacgagtatactctactgttataattttgaactccacatccatgccattggaacttcgctttgatattccgtttggcatctccccaaagatcctagatcctatttttcctggtcaagaatttccactgcctctacacttggctaaatctggccggctacggtggcgtcccctcggagattcttatttgtggagtgaagctcatagcatctccaaagttctttctcaagatagcgggataggatttcgccgatcttttgcttgttatccatgtcaccctagccatgaaccatttcggtgttgcatatctgttcagagcaccagcttgccggcatcgtttcatattaatgatttgtcagctggaaattttggtcagcagttgcacaatcttgaccaatcaagagagcaattcattcatcaagtaactttaagcactccatttgttgtgagcaactgtcttccagatccaatatcactttctatcgaaagtggtggcatcactcaaactgcatcccttcctgagggggagacgccattccatcatattgatccttcacatgacctggtccttgagttcaaattaaatggctgtagaacatcatctttaaagttttcacgctcagaaacttttagcacagaggctaagttcagtggagggaagttctctcagattgaaactatttcctttgattcacacgttggtggtggttctgtttatgtatcgtgtgagaaaacaatggatgcaacatgtggggctcgggaagtattaatctttgtcccatttttactgtataactgcactggaactcctctgattgtttcggactgcaccaatgaaactaaagggatttacagcgtaataccgtcttgctacaacctgattgagcagcattttgttcaaagtcgaaaagttggtcttggcattttgacctctgagaaagatttgctagataaagctgtaatggaggacattccttgtagtccttcctcatcggagtgcagcaacactgcttccagtactgagagatttatagataagcatgcgactcagtcaactcgccaagtcccttttgcagcatatccaaaagactcagcaattgttcgcaagaggagcctttcttcaaaaagtttaagagaggtgtgcttccaaggtaatgatgagtctggcaaagtaaaggcatgcatttattcaccttgccctatttccagagtcagtgacaccatgatccgagtcaaaagggacctgccagggtgggttaattcaagtagcccataccctctgtggtctgctccatttcctctcgttccacccagtggttctacaaatgtagttgtcccacaaccatcgcctggtgaatcatctttattatctgttacatgttctattcttggtggtgcattagcagggagaacgcaagcaattactttccaacctagatatatcatctgtaattcatgcagccataacctgtgttacaagcagaagggaaccaatttagtttctcatctggctgttggacagcattctcagcttcaatggacagatactactagggagctgctagtttcaatccgtttaaatgagcctggatggcaatggtcaggcagcttcttgccagatcatttaggggatacgcaactgaagatttggaactatgttaacaaagctttcaacatggtgcgggtggaagttcagaatgccaatatgtcaagcggagatgaaaagattgtagggagtgttcatggacatgtcgggacaaactttattctattatcagatgacgacatgggctatatgccttacaggattgataatttctcaaatgagagacttagggtttatcaacaaaaatgtgaaacttttgataccatagttcatccttacacatcttgcccttatgcttgggatgaaccctgttatcggacgcgtgggcggacgcgtgtacccggagatcgtgttctaggctcttatgcatttgagataacaaaacaacctattgcagtgcacttgcgctccacctctgagaaacctgaaaggacattgttgctatctatctgtgctgaaggagctacaaaggttttcagtgttgtagattcaggttatcacgccataaaagatataaaggaaacatttgactccagattccatgagaagggaaagaaaaagcttcaaactgacaatatcatccgttacacagaaacgttcttgcttgtcctgccaagcattggtatatctttggttaattctcatccacaggaattggtttatgcttgtgcatcaaatgttgtgttagagttaagtcagagtgtagatcagcagaagctttcctttcagatctcttcactacagatagacaacccacttcaaaattcttcgtatcctgtcatattgtcattcaatcatgaccacgaagtcattcctcctgattggggaatgaagaacaacaaagcaatacttttaagtgaaattgttcagcaagttaggggtaattcctgtgatgctgtagtctacgttgacctagcaaagtggcggaaaaaagatgtttcactagtttcttttgagtacataaatattaggattggtgaatttggacttgagctggagctacaaacacttttatccttactggagttcgtaaaagcagtgcttcccaattctcaggctagactcctgccgctctcagatccaacgctacgtcctctgatttatgacactggttccaaggatataagttcagaagatactccacatgcaagaaacattcctgtatttaacaaaaaccagagaagcattgtagctctgcctatagtggttccaataggagctccttggcagcatattcacttgttggctcgaagacgcaggaaaatttatgttgaaacatttgacttggcccctattcagtttactttaaggataactatacttttggtaacctatctacatgtagattcacatgggtcctttgtgtgtcacaatattgacagcttctgcagtgctccctggatgcttaggaacggcattcttacttcaggagagtcccttatccatagaggtcttatggctcttgccgatgtcgagggtgctcgaatacatctcaaacaattgacaattgctcatcaaattactagttgggaatcatttcaggagatccttgttgggcactatacccgccaaattcttcatgagatttacaaggttttcggctctgctggtgttattggaaatcccatggggtttgcgaggaatgttgcatttggaattacagatttcctgtcagctcccagcaggagtatctcaaagaagcccagcagggattattcaacgaatggctcacggaaccaccagtctcttcagtagcactatttatgctttaagtgatgctgccactcaatttagtaaagctgcacacaagggtattgttgcatttacattcaatgaccatgatgttgcaacgatggagaaccaccaattggggcaaggatcccgtagcaaacggagttataggtgacgtgtttgagggactcactggcctccttcaatcaccaatcaggggggctgcgaaccatggccttcccggcgttttccccggagcgcgccagggggattacgggacttgtggccaccccaacccctagtttccctgggggccctcggaaaacccccccccgtttaagaaaccgaagcaggattcataacataagatcccaaaggcataggcttcgtcttccgaggcctctgagtagagaacaacctctcaggccttactcatgggaagaagcggtcgggacagcagtacttatggaggttggagattccctgaagttcaagggcgagaagctggtgaagtgcaaagccctgaaacaagaaggagctttcgttgtaatcacagggagactggtattggttctaagcagcctgagcttggtagatttcagaaaacagggatttctcggagttccaatagatttggtatggaatatcgaaagagaaatcggtttggagagtgtaatacatacagattgcagcggtggagtagtccgcatcataggaagcaattcagatggtgtatggaactggagacaggaccagcaaaagaagagcagcccgaccaaaaaacgatggaacaatccttcagcacagccgcttcttcagactaacttagagtttccatcggaggaagaagcagaggacttgttgagtgtgttgttatcgactattgaaactgggaaaagccggagctggcacagtcgatttgttttaagtcgaagattcattggtttctcccgatccggctttagttcccagttctgggttccccgctcgacctttcgcctcttccgtaatcagtgtgggccgaggcccatcttttatttttggaattctctttaaaagtttagtgatcggaggcttctcgattttctctctcttctctcacttgaatttttcagagaaagaaaaagcgattcatggcaagactccgtccaacatcgttcggcttctttaacgacgatggttggttcgtttccagcatcaattggcttctttagtggtggtggctggcttttgtatccggacgtggtccggctttgccgtcttatctcgccatcgttgctgttctggagaaatttagatcaaatataaactctggatattgtggagcagagagtcagatttacaagcgtgatgagattgtcgtagaggaaatggtgggttatcggatttgatggtggtgctgggagataacgatgaaacaatcatcggcgtaagagaaaagtcacatccacgtgtcgtatgttgctttgacttgttttattagcgctgtactctttactacaaggtgtttagttgtaccctttatggatttgtgaaatactttgatgactgggctttagtgatgtttgtaaacccataatttgaataaaaaagaaacttatgaacaaaaaaaaaaaaaaaaggcggccgccataagggccat

SEQ ID NO: 994 - DNA, 2287 bp, Arabidopsis thaliana
  Clone ID: ARATH-23APR03-CLUSTER43606_1
cttttttttttttttttgttgcactcgtatctgtattaatctctctatttacttgcatcttcagtcaacgtcaagtctggtagattatatacaaaatggacaccaaacatgtttcttatatgtttcatgacacccgtttgcagatttacctgctgcttctgtctcttatgtaatcaatcaggttttgatcagctttcacttggcacctccttttgattcaatctaccgtacaaagaatcttgggcatccacgtcctctattcgccagttacgttcattgctcttcgggtctgccgttgagatttgtaagatcttgttatggaatttcgttaaagtccggcggcggccaatgcttatatatgtaatgccagccgaatggatttggaggtgcaggaaagcctcaatagcttcatcctccgccaacgcactggtggattgatccaggagcgccagctttggctgagacagcaataaccgtgcaaaggcaaggcgctgctgctcaccaagtgagagaacactggaccactcgtgtatcgaatcaagaccaccaaagcgatccgctatatgtccaagacaaaccttctctagagtccgcatcagatcatctgttgtcggcttttcatttccgtcctctctaatcagcagaggtgcgtcaccattactgccaccaggcgtaggcgtcgtctcctccacagttgcactccaggtaggataaagcaattgctgacgcaaagatcccagaaccatataaggcctttgtggaaggaacaatacgtctcctcttttccctgaattttcctgagtatcagatttctcctgtgtaaaatctacctcaggatcgaggtagaacgtgatttttcctttccctgacctccaaagaccagccattgctcttagcagcgaagtttttccactcccactaggacccattatctgttaaatggcatttttaagtaacttccaatctaccagtcacatgctttaaacacaagtagtcaaagtgaactaaccagtaggtgatccttgtcatatacatctgcagataagttgtgaaccaatgtggttccgtttgttggtgtctgaagagtaagctcctcgatctccagacgcttttggttcggttgggacttgattgaaccattggtgtccagcagtgaagagttcatctcactctgatatgtcagctcaatctcgtccacagtgtcagatggatctctgaagatgttgttatccaaaagatcatcaaattcacctgtgttggaagaagtcttgatattgttagatgcgtaaaaggagaatcccaacctacagcaaatgcagtttttcatttagccgtagaagttgatttgcagaaacaatgaaactttgtgaatatgttgtacataagacataatttagacccaattttaagcaggaaagtgaacagccaaaaaaaaaaaaaaaaagaaagcaatagattcagcattttccctcactcgtacaaggctgtaacgaaagtcagcctctttcttctcttgtagaaagttgagattcactagtcccttgccaagaaagacactgatggctgtaccgccaaaggagtagagcaagagaacgagaaagagaggaggataaatggtgaagaggatgttgctaaaagagatgagatcaatggtggcattaacaagcgtcaaagagaaagacaaggcagttccagtgaaggaactcaaatcgtcaacaaggcgctgatcaggattgtcgatgatagactgagactggatcttgtaaaaggtttgatctttgagatagcgctgcaggtaatatttggtcatccatgatctccatctcagtgataaagtctcttttgtataatctcgtagcacaaagaacggaatgccgccggcgaaagcacagaggtaatagaacaactgcttggtgaattgctcttggtctttgttggcgagagaattgtagaaatcacggccgaggaaattgaagccgacgctaatgccggtggtggcgagagtaagggcgaagacggcggcgagacgaagcctggcttggtctttgtcctcggaaaaccaataaggcgacgcgactttgtagaatttcttccacagagtcttcaactccgatgccttatccggacgaaccgacggttgcggcaacaaagaagaacatgatacggttctgaaacgtggatttttcttccgatgaaagtttccgatcgatgattcatggcgaagcaaagaagaatggcgtaggagaaggtgaggaggacaaacgggagctgttatcatcaaaatcat

SEQ ID NO: 995 - DNA, 1094 bp, Arabidopsis thaliana
  Clone ID: ARATH-23APR03-CLUSTER43609_1
tttttttttttttttttcatctaagtgtatgtataaattatatagacttcatctttgtagaactagacaagaagaaccacagagttcctgacaacaaggtcgattaattcgcagaagaggttttgtaatccgtagctttaaaatatacagaagtctacattttattcgaaattatacatattctcagaactactgattttcaggttccacggagggcccgaacacgttcttgaatcaacttcctttcccaatctgcaatgtcctcgaatgcgttctcagggagactctcaaagggctctttccagggatcattcttagccagatcatatgttgcaccacggatggctcctttgttaggcccacatggacgctttgataccaaagtgtcataagccgtgttaagattcatgtcacagaaccaatacatataagcaatggaaacccctggagctcttcccaatccggctgagcaatgcacatagactcttcctttaccttctgaaaccgcccattccaaagaagaaacagcttttggaagttggcttctcaacgaaagtggatcaaaatctttagcaggccttctcatgtgacggattccaagctccttacatcttctaacaatggaatccaaatcgattccccaatactcaatgtccttatcctgctgcaagttaagtatgtaagcaacattctgttcctgcttcaagtgatctatgtcctcaggtttctgtggctgtgacccaactataagttcatctcttatcaatgtatagttcatacctagatcatgatgatattcataagggcttctcatcaatctcttcatagctgtattgtaatcctccattttgttcttggagctaagagaaaccccatttgttcctggattttctccagagaatttgcaggaaactcccgccagatttctgggaagactcagatcaagcgaagatttcttgttgatagaagtgaagcaagaagatttctcattttctcgggtgtatctagccacagagaaaatacagctcttgcttccaatcacactcatcgttctctatctctcgttcttcacctgatgcaacattgatatctgt

SEQ ID NO: 996 - DNA, 1942 bp, Arabidopsis thaliana
  Clone ID: ARATH-23APR03-CLUSTER4377_1
aaacctgaggaagctgaccggagaagacgaaagcaaacttttttctgtgagttttacttcctttgactcatctctcatatatttaccgctttattttcttcatcccgattcctctctgcttcattctctcctaaagtttcgatctttaatattcccctaagatccagttgtcatatacagtgagagaagagaaacctgaggaagctgaccggagaagacgaaagcaaacttttttctgaagaaatttgatccaaaaatggatgggaattttccacaaggaggtgtagttcgtagtggagcttcatcttatggaggatttgatttacaaggttctatgagagttcatcaccaagactccatgaatcagcagcatcgacacaatcctaattctagaccacttcatgaaggtcttccctttactatggttacaggtcaaacctgtgatcatcatcagaatcagaacatgtctatgtctgagcaacagaaagctgaaagagagaagaattcagtgagtgatgatgatgaaccaagtttcacagaggaaggtggtgatggtgttcataatgaagctaatagatcaactaaaggatctccatggcaacgagtgaaatggactgataagatggtgaagttgttgattactgctgtttcttatataggagatgattcgagtatagatagtagtagtagaagaaagtttgctgttttgcagaagaaagggaagtggaaatctgtttctaaagttatggctgagagaggttatcatgtttcgccgcagcaatgtgaggataagttcaatgatttgaataaacggtataagaagcttaatgatatgcttggtagaggaacatcttgtcaagttgttgagaatcctgcgcttttggattcgattggttacttgaatgataaagagaaggatgatgttaggaagattatgagttctaaacatcttttttatgaagagatgtgttcgtatcataatgggaataggttgcatttgcctcatgaccttgctttgcagcgttcgttacagttggcgcttagaagcagagatgatcatgataatgatgattctaggaaacatcaaatggaggatcttgatgatgaggatcatgatggtgatggtgatgaacatgatgagtatgaggagcaacattatgcgtatggagattgtagggtaaatcattatggaggtggtggtggtcctttgaagaagataagaccaagccttagccatgaagatggagatcatccgagtcatgtgaattctctggagtgtaataaagtctctttacctcaaataccgttttctcaagctgatgtgaatcaaggtggggcggagagtggaagagcaggttcggtgcagaagcagtggatggagtcgcggactctccagctagaagagcagaagcttcagatccaagttgaattgctggaattggagaaacagagattcaggtggcagaggtttagcaagaaaagggatcaagaactcgagagaatgagaatggagaatgaaaggatgaaacttgagaatgatcggatgggattggagttgaaacaaagggaattgggtgttgaattataacggaattggcttcacttctcttgattggtatatagctttgctaaatgaagtctcattttctgcttttgtaagcttgctttgattggaatgatctcgagactttgatgtgagagatctttgtggttgcatcagtgatgaagtttgtgaatgtagtgagaaaggagtggttaatataagcagctctctaaggtttgttttaactctacttctcagtactcaactggttaaggttattttcattgttctgctgtattgttttcgacatcttaatccaatgtgtaacaaatatctcattgttaagccagtttgagaatgagttgttgctaactaaaaaaacaaaaaaaaaaaaaaaaa

SEQ ID NO: 997 - DNA, 1589 bp, Arabidopsis thaliana
  Clone ID: ARATH-23APR03-CLUSTER43836_1
ccactacctcccgattttgctcccgaagcgctgctatattttttattttaaaagctctaaagttttacactgaacattttacacccaccaaaatgtagcaaatactgaatctgttaacagtttgaaaaactcgtcgatattcatttttagccaaagaccaaacccatcaaagacaaacatcaacatctataccaaaaactatgtaatgtattaaccaacactatctcatacaagtgaacctgcttgttcttcatccttgtggtgataatatgtaatgatcttatttccaaatgatatcgcccaagaagcgcagagcagggacacctctgatctccatatcaaccagcggagcctccatcagtgtcaaagcagagagttctgaatcctcccggatcatatcaagagcccggcatttggtcctttctcttaatagagcaaaatttgcaatctgaggaggatggcgggagaagctgattaacaatgagtcttttgacgggaacactttccttcttcaaggaagcacttaacctagaagactcgctgacagccattaccgttgggatagtgacaatgacgaattctgttgactctgtgtcacggaaaagctcgcgaactttaaccatcctttctcttagtttttccaatttgtcggcagcatcaggccccttttcttctttcccaaaaactgatttgatcgctgaagtagccgaggttattttctgtctaagcttcaagattttaccaatggatgcatccaagaatccaggtaaagagagtagccttagcgtatgacccgttggtgcagtatcaaatacgattctggtgaccatgttatactctggtgattccaagaattgaatgaccttagaaatggccatggcttcatccactccaggaggcggtgtgtcgagcaattctccaagtttaagctcccccaactgttctacaagcattccaagtcccataccatccataaaatctttcaccccagttcctccattcatctgcgaggcactacgaaactcttccctagccttctcagggtttatttctaaagcaaataaaggagcttcgggtccttctacagggacaagcattcctccagtcaagtcctgagcaaaagaatcgctcaaggaatgtgctggatctgtagatacaaccagagttgggtgtccattgttggcgaatctcacagctaaagaagcagcacaactagttttgcccactcctcctttcccaccgagcatgtaatactttcgtttcgtgccggagaccatctcatcgaattctgaaatcgtctccgttgggctagctactgatttcacttgaagcgagtttctccggcgattatgtttaacggaaagagaaagaatcgccggcaagacagtggatgacgaggagagagttgttcgaggagagaaagagatgaaatcaattcctgagacgagacttgttgccgagaatcgggatttgcatagaggaggagaagataacagataggaagacagagtcgccatttttttcgtctgcttgctcttcacttctgtgctatacaaagaagcggtgccgagaaactatttatctccctc

SEQ ID NO: 998 - DNA, 2669 bp, Arabidopsis thaliana
  Clone ID: ARATH-23APR03-CLUSTER4393_1
gcgttacacaacaactcactatctctctctcttcttttctgctcatttttaggtaatttttattgtttgattttcttgatcctaagacttactcaccgacagccaacgcaaagctatctttgaccattcataatagattctcttagtaacttgttcgttttcaagtgcatagataacctaatctatttcctcttcgaggttttatacatgttactccataaaccttcgtgcttccagcaactttcgcttctctgttgtgaattattgcttattatatcctcaacacgaaatcaaaatgccaagaccaagagtttcagagttgtctcagaggcaagctccaaggctgaggtcaccgtctccctcctcttaccaagaaatcatcgtcttcttcttcatctattcaggatcgatccggcttgagatttattacaaattcgtccttctatttgctccaaaagttcgacaatttcgtaggggcaaagatggacgctgattccaagagatttctagctacgcttcgatcccgatctgaaatgttaatgggctttgaagaaatagatggagatgatgatttccaggaggagtttgcttgcccgttctgtgcagaatcgtatgatatcatcgggttgtgctgtcacatagatgatgaacatactttagagtcgaagaacgcggtatgccctgtttgttctcttaaagtgggagttgatatcgtagcacacataacgcttcaccatgggagtttatttaagttgcagcgaaagagaaagtcacgaaaaagcggtaccaattcgacactttcacttcttcggaaagaactaagagaaggagatctacaaaggttgttaggatttacttctcgtaatggttctgttgcgtcaagtgtaactcctgatcctctcctgtcgtcatttatctcacctacacgatcacagagttctcctgcgccacgccaaaccaaaaacgtatccgaggataaacagatagagcgcaagagacaagtgttcatctcaccggtctcgttaaaagatcgggaagagaggaggcacaaatcagagtttgttcagaggctcttgtcatcagccattttcgatgaagtctaatgcacatacaaagattgagaacatggaggaactaattcgaatcagacttgagagaatctggtttcgagaaaaacaatggttgggatgagaagaagacggagaagagcgagatgcagctatgttatcaatatctatatctatctatgtattgtgtctgtttggtgctactaaatacattgcgtagaaatgtgttttcttaagtttattaagcaattgaaaagtaagatataggaagaagaataagtcctcttgtctgtagcataaaccctattggtgttcttgtgttgtgtgtcttatgaaatgaaaaatgttcactcttgtaagctagtaaaagagtgataaaagagtggttgagaaaccacgtacgaagtcatctgtttaagaataattcaacaatattgttactactaccataattctggaataaagaggctaaactggtgttagccgcaccatcactcttcttctcctctggttttgcaggagccggagttgacgatgaagttggttgaggttgcttcttgatgacttttatgtgaacggatttaaagggttgtttgctgatagcttgtttcttgggctccttcggattttctgcagaagaactagtcaaaatatctgtggggttgcttggacttacttctgttgccttcctcttctttgaaagatctgacgatgatcctttcttctccttctgaaggctgggataatcatcgatatcatcatcatcataatcatcatcaatttcttcatctgcaattctcctaattcctaatttctctttaccaaatatcgactttataactgcttcatcttcttcttctattcgttttaccttctcagcgccggttctttgcaaggcctccaacattgcatctacactcacagtagcatgtctagacttcattgatttcatttcatcaagtgcagctataatgtccatttctcttttagaatccaaagttctgttctccaaggacttcatcgcgtcccccatctcctcagcatctcttttctgtttatccttatcaacctcctcatcttctgcacgccagggttcataatttcgagatgccccagattcgacaatgtaatcagaattttgtggatccgtcttcatagtcagctctgcagagcacttggtgcacttgaagtagaatctaaatatttgaatcccgagatacgtctcgccaatgacgtcttctttacgggaattgaacttggttcccttgtagatatagtttccgcaggtaccgcatcggacactcattggaagcatcatacgaaccttgatctgctggttcttcggccgccggagccgttgaagcttcgcaggatcgaagtccggcggataatacttgtttagcaccttccgttctcccatgtcgcctgtttcttcttcctcctcgagattcttcttcttctcagcaaaatcacaggaataaggaaatttctcgctatgattttacgctttggattttaacctcggcttctccctcgggcggacgcgtgggcggaagtaagggctctcgctctctcctggtgcgtggggtggaatcccgaatt

SEQ ID NO: 999 - DNA, 2584 bp, Arabidopsis thaliana
  Clone ID: ARATH-23APR03-CLUSTER4405_1
agattcttacgaacacgaacatgttctctatttaagaattttcaagttttgttttttttgtctagattcttacgaacacgaacatgttctctatttaagaattttcaagttttgttttttttgtctcgttacagtcttcaaatacgacccagatccgaaaattagtggatcacttggatctcgaatccttccggctactcaaagatcatccccatcggagaatcttctcctccataggaaaatgtcgtctaattccctgaggcatgtcgagtccatgtcccagctaccctcaggtgccggaaagatctctcaattaaacgccgtcgtgttaggagaatcccttgcatcggaggagaatgatctcgtctttcccagcaaggaattctccggccaggctcttgtttcctcccctcaacagtacatggaaatgcataagaggtcgatggatgaccctgctgctttttggtctgatattgcgtctgagttttactggaagcagaaatggggtgaccaagtgttttccgagaatctcgatgtcaggaagggtcctattagcatcgagtggtttaaagggggaatcaccaatatttgctacaactgtttggacaaaaacgttgaagctggtttgggtgataaaacagccatacactgggaaggaaatgaacttggggtagatgcttccttaacttattctgagttgctccaacgagtttgccagcttgctaattacttgaaagataatggagtgaagaagggtgatgctgttgtaatttatttacctatgttgatggaacttcccatcgctatgcttgcatgtgcaaggatcggagctgttcattcggtcgtttttgctggattttctgcggactctcttgcccaaagaatcgttgattgcaagccaaatgtaatactgacttgcaatgctgttaaaagaggccctaagaccataaaccttaaagctattgttgatgctgcacttgaccaatcttctaaagatggagtctctgtaggcatatgcttgacctatgacaactcattagcgacaacaagggaaaacactaaatggcagaatggaagagatgtgtggtggcaggatgttatttctcaatatccaacatcgtgtgaggtggaatgggttgatgcagaagatcccctgtttttgctctacaccagtggaagtactgggaagccaaagggtgtcctacacacaactggagggtatatgatctacactgctacaacgttcaaatatgcatttgactacaaatcaacagatgtatactggtgtacagcagattgtggttggataactggccatagctatgttacttatggaccaatgcttaatggagccactgttgttgtctttgagggggctccaaactaccctgaccctggacgctgttgggatattgttgacaaatacaaggtttcaatattttatactgccccaacattggtgaggtctctcatgcgcgatgacgataagtttgtaacacgtcactcgcgcaaatcgctgcgggtccttggaagtgttggtgagcccatcaatcctagtgcctggagatggttcttcaatgtagtcggtgattcaaggtgtcccatttcagatacgtggtggcaaactgaaactggtggcttcatgataaccccattgccaggtgcttggccccagaaacctggttcagccactttccctttctttggtgttcagcctgtcatagttgatgaaaagggcaatgaaatcgaaggcgagtgtagtggttatctttgtgtcaaaggttcatggcccggggcgtttcgaactctgtttggggatcatgaaagatacgaaaccacatactttaaaccttttgccggatattatttcagtggtgatggttgcagcagagacaaggatggttactactggcttacagggagggttgatgatgttatcaacgtcagtggccatcgaatcggaactgctgaagtagaatctgctctggttttacaccctcaatgtgcagaagcagctgttgtaggcatagaacatgaggtaaaaggtcagggaatttatgcgtttgtcactcttctggaaggtgttccttacagcgaggagcttcgtaaaagcctagtactaatggtccgaaatcagattggggcttttgcagcaccggacagaatacattgggcaccagggttgccaaagacgagaagcggaaagataatgaggagaatcttgagaaagattgcttcgaggcaattagaagaactcggagatactagcacactcgcggatcctagtgtagttgatcagcttattgcacttgccgatgtgtgatgactaaccatagcatatgagccaatggagagtaatggagttttgtgcatctatatatgttttcaggtgtcttatagagggaatggtacaaaaatctgaaacaagattcaggtgttttggagggaataaagtaagcagactatattgttgtgtttttgaataaagaaatttcagtctcatgaatttggttttggataagatggtcataggattatcaaattaattaaaagttacaaaaatataaaaaaaaaaaaaaatgtt

SEQ ID NO: 1000 - DNA, 1610 bp, Arabidopsis thaliana
  Clone ID: ARATH-23APR03-CLUSTER4426_1
ttcagtgagcattgtgcaaaatgcatttccttctaccaccaaatcgttctcttctacccttcctcgccaatcttcatcttcctcatgttttctctaattctccatggaagaaagtctgtggaattacagaaatggcgtaatttaagagttacagtgagcattgtgcaaaatgcatttccttttaccaccaaatcgttctcttctacaatagctaaagattcgagtccaaagggaagtactttcacagtctcttatctcgttgaatcattgggtttgactaaaaaacttgcagaaacaatctcaaagaaagtcaccttcgaagaccagatgactcaaaatttttttctgaagctccaacgatgttatataagaaaggagaagaatctgttagtttatactatgatttcgctaaggacattatgcaagatggtaaaaatttgtgtatttcttgtccagagggaaagaaaggtaacagaattcgaaatatatcggttttgagagaattgggagtacctcagaagttgttgttttcattgcttatatctagatatcaacctgtttgtggtaaagagaagtttgaagaaagtttaaagaaagttgttgatatgggttttgatccggctaaatccaagtttgtggaagctttgcatgtagtttacgaaatgagcgagaaaacgatagaagagaaagtgaatgtgtataagaggttaggctttagtgaagccgagatatgggcgattttcaagaagtggccttactttttaaaattctctgagaagaagataattctgatgtttgaaacactgaagaagtgtggtttggtagaggaagagattatttcggtgtgaaagagtcgtccactaagaggttaggctttagtgaagccgagatatgggcgattttcaagaagtggccttactttttaaaattctctgagaagaagataattctgatgtttgaaacactgaagaagtgtggtttggtagaggaagagattatttcggtgttgaagagtcgtccacaatgcatacgatcttctgagcagaagatattagactctattgaaatgttcttaggcttaggattcagtagagatgatttcaagatgatggttaagcgatatccttgttgcactgcatattctggcgagacgctgaggaagaagtttgaggttttggtgaagatgatgaattggccgctagaggctgtggtcatgatccctacggtacttggatacagcttggagaagaggatagtgccaaggtctaacgtgatcaaagctctcatgtcgaaaggattgatcggaagtgaaaaccctccgatttcatctgtcttggtatgtactgatcaggagttcttgaaaaggtatgtgatgaagcatgacaagctagtgcctaagttgatggctatcttcaacagaggtcgtgtttcatagttaatcttttaacgcgtgaatagaactgaggaagaggagtttttatttactagtgtctgttaatgtctaaactgaaatccatttctgtaatagtcgtaacgaaaaatttaactactatatttgtggacatgtttagtgatttgaatttcaagttaagcgaaaaaaaaaaaaaaaa

SEQ ID NO: 1001 - DNA, 3455 bp, Arabidopsis thaliana
  Clone ID: ARATH-23APR03-CLUSTER4446_1
attttttttgacttctgtgtatgtcgttcgtgttcctcgcacttcgccgtgttctctctctctctcacaaactcactcatcttctccgacccaacattttccgatcttcttcgctctaatttcatttctaaactcaaatttttcatctgtaatctcgaaacgattttggatttcaaaatccaaactctattgtggatgttttaagtaacgaaactcagttatagaaaatcgaacccgaattgatcgtggtaatgtcgaaaccctaatttcgtgggtttagggttttatagcacagttttcgcaaaaaaatgaagaagaaacaagaagagagttcgttggagaagctaagtacttggtatcaagatggagagcaagacggtggagatagaagtgagaagagaagaatgagtcttaaagcatcagactttgagagtagttctcgaagtggtggaagtaaaagcaaagaagataataagtctgttgttgatgttgagcatcaagatcgtgattccaagagagaaagagatgggagagaacgaacacatggatcttcttctgattcgagtaagaggaagagatgggatgaagcaggtggtcttgttaatgatggtgatcataaaagtagtaagctttctgattctagacatgatagtggtggagaaagagttagtgttagtaatgaacatggtgagagtaggagagatttgaagtctgataggagtttgaagactagtagtagagatgagaagagtaagagtcgtggtgtgaaagatgatgatagaggtagtcctttgaagaaaactagtggtaaggatggttctgaggtagttagagaagtgggtcgatctaataggtcgaaaacaccggatgcggattatgagaaggagaagtatagtcgaaaagatgagaggtctagaggtagggatgatgggtggtctgatagggatagagatcaagaaggtttgaaggataattggaagagaaggcattctagtagtggtgataaagatcagaaagatggggacttgctttatgatcgtggtagggaacgggaatttcctaggcaaggacgtgaaaggagtgaaggagagaggtctcatggtcgtttgggtgggaggaaagatggaaacaggggggaagctgttaaagctttgtccagtggtggcgtttcaaatgagaattatgatgtgattgagatacaaaccaagccacatgattatgtcaggggagaatcaggacccaactttgctcgtatgactgaatctggtcagcaacctcctaaaaaacctagtaataatgaggaagagtgggctcacaaccaggaaggtagacagagaagtgaaacttttggttttgggtcttatggggaagattcgagagatgaagctggtgaagccagttctgattactcaggggctaaagcaagaaaccagagaggttcaacacctggtagaactaattttgtgcaaacccctaatcgtggttatcagactccacaaggcactagagggaacagacccttaaggggtgggaaaggaagacctgccggtggcagagaaaaccaacaaggtgccattccaatgcctatcatggggtcaccatttgcaaaccttggaatgccaccacccagtcccattcattctcttactcctggcatgtcgccaattccgggcacttctgtcacccctgtcttcatgcctccatttgccccaactcttatatggcctggggcccgaggtgttgatggtaatatgctacctgttcctcctgttctttcacctcttcctcccggaccatcaggcccaagatttccttcaatcggcacaccaccaaacccgaatatgttctttactccaccaggttctgatagaggagggcctcctaactttcctgggtccaatatttctggacaaatgggacgtggaatgccatctgataagacttcagggggatgggttcctcctcgaggtggtggacctcctggtaaagctccttctaggggagagcaaaatgactattcccagaactttgtggatactggaatgcggccccagaatttcattcgggagctggagcttaccaatgtggaagactaccccaagcttagagagctcatacagaagaaggatgagattgtatctaattctgcttctgcaccaatgtatctgaaaggcgacttgcatgaagttgagttatctcccgagttatttggaacaaagtttgatgttattcttgttgacccaccatgggaggaatatgtccatagagctcctggtgtttctgatagtatggagtattggacatttgaggacattatcaatctcaagattgaggcaatagctgacactccatccttcctcttcctctgggttggtgatggtgttgggcttgagcaagggcgccaatgcctgaaaaagtggggtttcagaaggtgtgaagacatttgctgggtgaaaaccaacaaaagtaatgcagcaccaacattgcgacatgattctcgtactgtgtttcagcgttccaaggagcactgcttgatggggataaagggtactgttcgacgtagcactgatggccatataatccatgctaacatcgacactgacgtaattattgctgaagagcctccttatggttagtaaaatgttcgactcagaagcctgaagatatgtataggataatagagcattttgcacttggtcgccggaggcttgagcttttcggtgaagaccacaatattcgagctggctggcttactgttggaaaaggcctttcgtcctcaaactttgagccacaggcttatgtgaggaacttcgcagacaaggagggtaaagtgtggctaggaggaggaggaagaaatccacctccagacgcaccgcatcttgttgtgactactcccgatatagaatcgctgcggcccaaatcaccaatgaagaatcagcaacaacaatcgtatccatcgtctctagcttctgcaaattcctcaaaccgaagaaccacaggaaactcaccacaagcaaatcctaatgttgttgtcttacatcaagaggcttctggatctaacttctctgttcctaccaccccgcattgggtgccaccaacggcaccagctgccgcagggccacctccaatggacagctttagagtacctgaaggtggcaacaacacaagaccacctgacgacaagagttttgacatgtacggctttaattgagcctctcccaaaattgcagagtttccagaaccgtttctattgaatggatattttacccctttgctttgagaaactctgctgcgcacggttttggttctctttttgtaattctttcattttttcacttccgtagagccaatactttatattcatttcattatcaatcaagcttttacctaataaaaaaaaaaaaaaaacattcaactgtgatgtatccaaatcaaatcgcatttaaccacccttt

SEQ ID NO: 1002 - DNA, 801 bp, Arabidopsis thaliana
  Clone ID: ARATH-23APR03-CLUSTER4496_1
gaaaagagttgggcaaccagcggacgcaagcttgatggctggccttgatggtccatgaagaattgaatctgtagtcgaaagaaaagagttgggaaaaaaatggacgcaagcatgatggctggacttgatggtcttcctgaagaagacaaagccaaaatggcctccatgatcgataaagagttgggaaaaaaatggacgcaagcatgatggctggacttgatggtcttcctgaagaagacaaagccaaaatggcctccatgatcgatcagcttcagctccgtgatagtttgaggatgtacaattcattggtggagaggtgtttcgtggactgtgttgatagcttcacacgcaaatctctgcagaaacaagaggagacttgtgtgatgcgttgcgctgagaagttccttaagcatacgatgcgtgttggtatgcggtttgctgagctcaatcagaacgcaccaacccaagactgatatagtctgctttttctgtttggttttttcgtacggtttacgagtccgaaaccagaataaaccggttgttgagttgttcaggttactactccgatactgttttttgaacatcttgtactgtgaaattattttgactgtatccagttctgatattgatattgacttgtattccaaaaaaaaaaaaaaaagcgcccccccccctcccactttccgcttccctcctccccctctccccccgggtttttccccccccccctccccttccttctcccccccttcccctgccctcgcccctttttctcccccctcttttcctctctccccctct

SEQ ID NO: 1003 - DNA, 2264 bp, Arabidopsis thaliana
  Clone ID: ARATH-23APR03-CLUSTER4509_2
acaacattattaatttaatcaaagagcttttaaactctaaaaacccttattgcggctagaactcgagagttctcaacggagtaagaagacatagattcttgggcattcttagactaaacaagtttctttgtgttatctatcttggtttacattacagagcgtctttacaccattaatcatagctcctccacacctttgtccattaatctagacacaaattccagctcaagtgttataagatacatgccaggtacctatcttcaagactctttcatttagtaacgactatttacctcactcttctattcattctactcctgcttgctcttggccttggctgcttactctgtggttatttaatctctttattgcttcagaacatgtctgttattggattcgatatcgaccctgaatctcttgaaacagcaacactaaatgcagaggaacttgaggttttttttgaaatgaaatgagttttcttttggttgtatagcaaacaccattgctataattggtttgttttgtaggtgcagatagatttcgttcagtgtgacagtacaaagctagagttaaaaggtactatcctcctttcatttttggtacaatcctactcgtaacttttttgtggctctatgaatttttttaggtacaattgttgccttattcttttgtataagagcttcgtgatggtttgaaacctctgagtgaagaagaagcgccatggctgggattaccagcagcaccgttggattcaacgccgtcttcaccggaataaccaaaacagtatcatcacattcactcttctctgttgattccaaactctgtagtcttcgtctctccaaaaccgaactgtctttcactaatctcactccttctcctcgccgtgctttcgccgtcacttgccgcttcggcggtggtggtggaggttatcgattctctggagacaatagaagaggtaggccgaaagaagctgaaattgatgaagctcttgatatctcctcaattaggtcagctactgttaggcttatcgatgggcaacaaaacatgcttggtttagtgtctaaagacgaagccgttcgaatggctgatgatgctgaacttgatctggttatactatcgcctgatgcagatcctccggttgttaaaatgatggactacagtaaatacagatacgaacagcaaaagaggaaaaaagatcagcaaaagaaaacaactcgcatggatttaaaggagcttaaaatgggttataatattgatcagcatgattattccgttcgtctaagggctgcccaaaagttcttgcaagatggtgacaaggttaaggtgattgtgagcatgaaaggacgagaaaacgagttcagaaatatcgctattgaactcctcagacgtttccaaaccgaaataggggagcttgcaactgaagagagcaaaaacttcagggacagaaatatgttcattatcttggtcccaaacaaagaaatgattcggaaaccacaagaaccacccacaagaaagaagaaaaaaacagcggaaaacgaagcttcagcttcagctgcagaaataacagctgagcctgagcctgagcctgagcctgagcctgaacctgagcctgagcctgagcctgagcctgagccagagcctctacagatcgattcttgagtttaaaatcttgtggtaggattttcagagctaaagtaaagttttgtatatttacttttctaccatgtctcaagagagccaagagctgtataacaaatagagttagtcctatttgaatgatgttcttcgtttgtagatcttttctctaatctatttttttgtttaactggcttcagcaatggcggtacttcaatcatggttagaccaactagagatggcacgtcagacatcagtgaacgctcaacatacacgatcactaacagagatcagctggggaaaccagatacgaacttatgttctccatcaatacagaatggtgaaggatctgagaacaaactacgaggtctctgatcctgactcggttcttgaaggagacttagatggtttcatctctaagcttcttatcttcttctttagacaaagatgatcctgaccattagtttagagatgttgacatgattgtctcaagagagtttctacttatgtttacttgaaacgtcttttattactaaactccgaaaggactttagaatgacattcattgtttttaaaatggtttaaataaaatctttacacagtaaaaaaaaagaaaaaaaaaaaaaaaa

SEQ ID NO: 1004 - DNA, 1883 bp, Arabidopsis thaliana
  unsure (1)..(1883): unsure at all n locations
  Clone ID: ARATH-23APR03-CLUSTER4539_2
cggcacccagtttctgtnggaccagttccaactgctactgtgaagttgagcctagcaccgtactttctatggcaccagttcctagttttccccatatcccggctgtagctcggcntgctacacaagcaattccttcgattcaaacatcttcagcatcaccagtttctcaggatatggtcagcacgcganngaatgcaccagatattaagcctgtggtggtcagtggaatgacgccaccattgcgtactggtcctcctggtggagccaatgtaaatctgcttaataatctttctcaagtccgacaagtcatgagctctgcagctctggcaggtgcagcctcatcggttgggcaaagtgcggttgcaatgcatatgtcaaatatgatatcaacaggaatggctacatctttgcctccttcacaaactgtgttttcaactggacagcagggaattacttcaatggctggttcgggtgcactaatgggatctgcacaaacgggacaaagcccgggtcctaataatgcctttagtcctcaaacaacgtcaaatgtcgcttcaaaccttggtgtttcacaaccaatgcaagggatgaaccaaggaagtcattctggagcaatgatgcaaggtggaatttccatgaaccaaaacatgatgagtggtcttggtcaaggaaatgtctcctctggaacaggtggaatgatgcctactccaggagttggccaacaagcgcaatcaggaatacaacaacttggtggcagtaacagctcagctcctaatatgcagctatcacagccatcatcgggggctatgcagacttcacaatccaaatatgtgaaagtctgggagggaaatttatctgggcaaaggcaagggcagcctgttcttatcaccagacttgagggttaccgaagtgcttctgcctctgattcgttggcagcaaactggccaccaactatgcagattgttcgtctcatatcccaggaccatatgaataacaagcaatatgttggcaaagctgacttccttgtgtttcgggccatgagtcaacatgggttcttaggacaacttcaggataaaaagctttgtgcagtcatccagttgccatcacagacgcttcttctctctgtctctgacaaggcttgccgcttgattggaatgcttttcccaggggatatggttgtgtttaaaccacaaattccaaatcagcaacagcagcagcaacaacaactccaccagcaacaacaacaacaacagcagatccagcagcagcagcaacaacaacaacacctccaacagcaacagatgccacaactccagcaacaacaacaacaacaccagcagcaacagcaacagcagcatcaattgtcacagctccaacatcatcagcagcaacaacaacaacagcagcaacaacagcagcagcatcaattgacacagcttcaacaccatcatcagcagcagcagcaggcgtcgccgctgaatcagatgcagcagcagacttcgccgctcaatcagatgcagcaacagacttcgcctctgaatcagatgcagcagcaacagcagcctcaacagatggtaatgggtggtcaagcttttgcacaagcccctggaagatcacaacaaggtggtggtggagggcagcctaacatgcctggagctggcttcatgggataaataaaaatatcagcttcagtgctaattaattagatttatcataacttaacattctttctttcttctttggtcaactcgatcgtcgccatggttttagactctgtttagttgtcctttctgttcttttgagcctgaaaatggcatgtcctattctgtatgggtctgaccatttagctacggcaccaaactattttgtcattttcttaagat

SEQ ID NO: 1005 - DNA, 1038 bp, Arabidopsis thaliana
  unsure (1)..(1038): unsure at all n locations
  Clone ID: ARATH-23APR03-CLUSTER4541_1
gnaggtncccggctgaggattcggcagagagagagagagagagagagcccccattatcctcaaaatcgctcgagagtgagaactctactcttcttcttcttcctccgccatagctacaatgcttagtctctcaatagctacgccggggacggcggcgatttttcgtagaggaactgcttcggcgacttcaacttcgtcttcattccatggtgtcagaatccagcaccaggtttctgctcgcgtccccgcggcggcgacgatatcgtcgtcgtcctcttcattatcctcaaaatcgctcgagagtgagaactctactcttcttcttcttcctccgccatagctacaatgcttagtctctcaatagctacgccggggacggcggcgatttttcgtagaggaactgcttcggcgacttcaacttcgtcttcattccatggtgtcagaatccagcaccaggtttctgctcgcgtccccgcggcggcgacgatatcgtcgtcgtctcctaaaccgtcggtggtgatgatgtcgaaaagagaggcggaattgaaagagataagatcgaagacgacggagcagttacaagaggaggttgttgaccttaaaggtgagctctttatgcttcgtctccagaaatcggcaaggaatgagttcaaatctagcgactttcgtcgtatgaagaaacaagttgctcggatgttgacggttaaaagagagagggagatcaaagaagggataaagaaaaggttgtcgaggaaacttgacagacaatggaagaaaagcatagtaccaagaccacctccgtctctgaagaaacttcaagaagaagaagctgcagaagaagcagctgaagctgctaaatctgcttgaaaaaacccgctattgatttatggtctcttccttgttgtttcctcgagatgttgttaatctctgttatttgttgctgaaccatcttgtatttgtttttcttttggtgtaaacactttccttatcaagtagtttacatgaatcccttaaagattgaaaaaaaaaaaaaaaaac

SEQ ID NO: 1006 - DNA, 2396 bp, Arabidopsis thaliana
  Clone ID: ARATH-23APR03-CLUSTER4561_1
cgggggggggcgtgcgtgggggggtggcgggtttggggggtcggggggtcgcggcgggggtgttctccgggggagatgctttgtttcggggggggggcgggcggcgtcgtcttcggcggggggggggggcgggaagtcgtccgcgggtccgggggggggcggggggaacggggagagaggggcgggggggggtgctctgggccgagtgccggggggctatgtttgttggataccgccgaggggaaccgcggcggcgtacggggcgggggggtgggacgtgaacaggggggcaggggggggggctgggaaaggggtgggcaggggagaagaatgcattatagggcgggggggtggggccgcaggggagcggggcgcgcgggcatttcgaagagagggactacacacacctaacgcgaaacctctacgtttcttcgtcttcgcgactcgtgagattgttgtaatcacagttcgggaaagacttaacatttaagatttacgggtttgtttgatcgattagtctcatctgggtttttctccaagttaaattctttgtttctgagatggatcaagcttcgtcttcttcgactatggaggaagacaagaagtcttccactgatcctgtgaatgtcgatgataacgaggagagagaagctatagagattgctctgttccaagtgcctgaatgctatgtttatttgatacctccaaggaaaaccgcagcttcgtacagagcagatgagtgggacgtgaacaaatgggcatgggaaggagctttgaaagtggtgagcaaaggagaagaatgcattataaaactagtagataaaaccacaggggaactttacgctcaggcatttctaagagagggggaacttcatcctgtagaagcagtaatcgacagtagcagatattttgttctccgtgttgaagaaaagatagatggtcgtgttcgacatgcttttatcggactcggattccgggaaagaacagaagcatatgatttccaagcagcactacatgaccatatgaagtatttgaacaagaagaaaacagcagaagaaatggaacaacactatcagaacacttcatccgttgattacagcttaaaggaaggagaaaccattgttctccaactcaaaaatagaagcgataaagacagcaagtcaaaaacggtagagaagagtctgggcaatctctcgttggaggataaaggcaagtcaatagaaaccaccattccttcaatcatcctgccacctccacctccgggaccgctttcccctgtcacaactgctcagaagtccccgtcaagtctgccgccaagcctcagcctccaaagatcgtctgaacaacaagatttagatacaaagcgagaagaagaagaagaagagaagaaagaagacctaaaagccaaagatggaggggttgaagatgcaccagatgatgactttggagatttccaagctgcgggttgatttaaacttataatcttttttaccatacacaaagatcgttttataagtaatgtgactgatcaaagtttggattgtttgctactgagagcttatcttctgtacaattccaaaatacaagcctatttctctgaacttgtgattagatagacaaaactctaaaggtttcattttctccatatacagatatgagctttgcaagagaaacatcagataaatatcaaaaaattcgcacaacccctacaattctactttcttcaactactgaaaagagacgacattgagagtgtttctctgttcttctgcaaatctattgcaaccatcaagaaatgtacgccatacaggcgcatctgcagggaaaggcatttcccgaatcagatgctcagcttccttcaggtaaccatttcttgccaaaagatcaacggcgcaacgataatgatccattcctggttcaacaccgtaatccttcattttctgaaacaaacccattccttcttttaccataccaccatgtctgcaagcagttagaatagagatgaacgagacacgatctggcttaaaacccaaagacagtgtttccttaaacttttcaagtgcctcctgtccatatccatggatgccaagacacgaaatcaatgccgtccatgtaatgaggtttttctctcttgtttcttcaaagactttcattacactcctaatgcttccgcatttcccatacatgtcaattagtacgttacatacaaatgtgtcagcgcagctgaaatctgttttggtgatcaaaccatgaatagaactcccaagagtaaggtcacagagcttagaacacaaacttaagatactaacgaatgtgtacttatcagggcggatgtttgattgaagcatgtgtttgaaaagttcgataacctcttcatggtaatcagaacgagacgc

SEQ ID NO: 1007 - DNA, 1636 bp, Arabidopsis thaliana
  Clone ID: ARATH-23APR03-CLUSTER4582_1
acccaaaaacaaaaactaaatagagagaaataagtagatatggcaacccttaagtgcattgattggcaattcagcggaagcgaggcggccaaagatgctgctgcggcctccttaggctcatatacctctgcactctatgccctgtgcgatcctcatggcaaacccattttgcccccacgaaatgagatcctggagaccagcaatacagccgaaaaagcagttgttaaagctgttctttatggctcgggaaacgcctatgctcctagcttaggcctcgcggccgccaaaagtgccgtagcagagtatctaaaccaaggtcttccaaagaagcttaccgcagatgacgtgtttatgactctgggatgcaaacaagctattgagctcgcggtagacattctcgctaaaccgaaagccaacgttttgcttccgagtcccggcttcccatgggacctagtccgctccatctacaagaaccttgaggtccgccactataatttccttccagaaaagaactttgaaatcgactttgatagcgtccgagcgctcgtggacgagaacacatttgccatatttataatcaacccccacaaccccaatggtaacacctactccgaggctcatctcaaacagctggctgaactggctaaggaactcaagattatggtggtttctgacgaggtttttagatggacactctttggtagtaacccttttgttcctatgggaaaattctcgtcgatcgtaccagtggttacactcggatccatatcaaagggatggaaagtcccaggatggcgaactggttggctcacgctacatgatctagacggtgtcttcagaaacaccaaggtcttacaagctgctcaagattttctccagataaacaataaccctccgacagttatccaggcggctattcctgacatcttggagaaaactcctcaagagttttttgataagaggcagagttttctgaaagataaagtagaatttggttattctaagctcaagtacattcctagcctcacttgctacatgaaacccgaagcctgcgacttcttatggaccgagcttgatttatcgagctttgtggacatcgaagacgatcaagacttttgcaataagcttgctaaagaagaaaacctcgtcgttttaccagggattgcattcagtcagaagaactggttgaggcattctatcgatatggagactccggtattggaggatgcattggaaagattgaagagcttctgcgatcgccattccaacaaaaaagctcccctcaaagacgtcaatggtgttaagtaaagggtcaatatggttatttgcctaagtcatttacgtatgctataatgataaataaatgagtgtttcttggtttgaggtaaatcatgaacactttagtgtatttgtaacaaataaaatgggtgcacttaatatcaatcgtgtgtaatgttttctcatagtttgctatatctttgtgtatatctatctacttttcggaaataaaatagattgtctgcatttaccattggaatacatatacatatatacatctcttaactacttcaaaatactttggacttgtcgtgtcgtgtatttttagaaaaattatgaagaaacccagttttacctg

SEQ ID NO: 1008 - DNA, 2082 bp, Arabidopsis thaliana
  Clone ID: ARATH-23APR03-CLUSTER45949_1
tttttttttttttttttgatcttactatacaccattaaaacgagagtcagtaaagaagaattttactaactctctcttgttttttgacaccgaagtaaaaaagatacgacaaattggtttaagctcaaaaccatgaatcgaagaataagaataaattacactgtgctctcatgttaagagctctctctatcgtattgccttgtttcctcagcaacctttgtccacacattggcgatcttctctgcatatccaacctgattagcaacaaaccctttcatcatattcaagaagtctgcacgcctttccctatccagcctttcaacctcactccagttattttccttgatctgctcgtactccctgatggcaacatttttagagtcttcagtgaccttgatggtttcttttaactcttctatcttcttaatccttgatttgtcaccgccaaagacctttgatgatgcaacttctagcttttctgctcttgcttccagtgaagaaagttcagatagaagcgtctgcactgtcaataaagcactagatctatctgcaaaggcgccctggactgccatcattaggccaaggtaatcgtggagtgtgtccaaatgcttgaccgtctgggaattcaactctctgtaaaatctgcttgctttcacagctgaagtggctaaattcttcatatcattggcacgagctctttgagaattgaagacagcttcttcgttctcgaatttcgtcagtttaatgaatgctaatcccaattcccccatagtctcccccatgtcttgctgtgccttcacgagggattcagcctgctgtgaagcattaatgatctgttgctcaagatcatacattttctccttcttctccaaaaactctttatcttcttccacaacaggtggttttgatccaccccagtcattagaaactgactgtctaagttctttaaacattctcagaaaatctctacctcctctacccggctgaaccacctcaaccgaagaagctccaccgccttcaccaaacaactgtttcggcagcttcacagcaccatccaacatcctagaagccacatctgtgctcgtagcaagcggtaacttcccttgcgcttgaagaaaaaccttcaattcatcactgttcctgatcacaggatgtgcaacaagcctacgcaaatacttctccaatgcaactcttctctgctccacaaactcttgcttttgcatcacttgactctcaactacactcttatctggcctcggtggaatgcagaaacctctataagactcagctaatctatcagccaatgtaacaatgtctctgaatcttctcctcacgctaaactccgatccaccgtagtcagagagattcgttctagttgtaatctggtaagtgatgtaagtacttcctccaggaatcattgaatttgtggcctcttgctctttctgagggttagaaacagtgatcttgatgtaatcagagctcaaagaagacggagatctagataatgaatctgacgactgactatgaccatcttctgagccattgatctcggagatatcatcgaaagggctgaagataacatccgcgtaagacggaggctcgaggtaagagctgactctgtcgccgccgtttggtttagaacgaggactccgagattcgctgtagtaagacggtggcgcaaaaagtggatcggaatcagctggagttacgacaatcgacgggtgacgcgagtcgaagagagttgacatagcgctgcgataattagagttggatttatcgccgttgacattgcttttggtcaagggatcgccatcttcgcggagaaagagtttctccatctcttctttggatgagtggagatgggactcttcgtcattctctgagcccatcatctctggtaaatctataaggtgagctaattttagtaataaattcacaggaatttagggatttttcgattcggttcgagataacggagattacgaggatacggtggtcgtgaactgcaataaataagcggagtggctaagtcacggcggtgttggctccagatattgattagtagcgtcaagtctcgtcaat

SEQ ID NO: 1009 - DNA, 901 bp, Arabidopsis thaliana
  Clone ID: ARATH-23APR03-CLUSTER4603_1
gaagcagaggaacgaagagtcatggcgatgctttttcgacctcctccttcacaatgtagaagcttctctccttttgtcttcaactacagctccagagaagtttcttcgtcgtctcgtctctccttgaaaacctccggcgacgaagaaaactgggtttcacgtttccggtcgaaatctctcagtttggtgttctctggagctcttgctctcggtttatctctatcaggcgtggggtttgcagatgcaaaagttggtgttaacaaaccagaattgcttcctaaagagttcacttctgttatagatgttgctgatttcctctctaatggtcaggagaagagaattgctcaagaaatcgctaatcttgagaaagatacaggattcaagttgagagtcttggctcaaaactatcccgttacccctggactagcaatcaaagatttctggcaggtggatgatagcacaattgtgtttgtcgctgacccgacttttgggaacatattgaatttcaatgttggagctacggttgatttagacatacctcgtagtttctggagtcgactggctgggaaatacggcaatatgttttactggaaagagaagggagaagatgcatctattgaagctgcagtgatggcgatatcaagttgcttacgagaaccagttggtcgaaacaactgtgcagagatccaatgaagtatatgaccccatcaagcgtatatgttattatcataatatcattgtatagattggcaccaaagagatacagaatttgtaagaatgaatccacgtctagtagtaacctctctccatttctcagcttcacctactcaaacaaacagtttcaattggttacttgtatcttttaaaacaaacaaatagagaaaccaaaatcaataaaccg

SEQ ID NO: 1010 - DNA, 1195 bp, Arabidopsis thaliana
  unsure (1)..(1195): unsure at all n locations
  Clone ID: ARATH-23APR03-CLUSTER4624_1
aaccatcgcatggagttgctctcttcttcaccaaccatcgcatggagttgctctcttcttcaccggctcagcttctgagaccaaatctcagctctagggctttgcttcctccacgaacatcaatcgcttcttctcatcctcctcctcctcgattcctggtaatgaattctcaatctcagcatcgtccatctatctcctgcgcttcgcctcctcccggagataacggttttccggcgattaccacggcttcacccatcgaatcagctcgaataggtgaagtgaagagagaaacaaaggaaacaaatgtatcagtgaagattaatttggatggtcatggagtttcagatagctccactggaatccctttccttgatcatatgttagatcaacttgcttcacatggcttgttcgatgtacacgtaagagctactggtgatactcacattgatgatcatcatactaatgaagatgttgctcttgccattggaactgctttgttaaaggcacttggggaacggaaagggattaatcgttttggcaattttacagctcctcttgatgaagcactcatacatgtttccctggatctatctggtagaccatatcttggatacaacttagagattccaacgcagagagtaggaacatacgacactcagttggtggaacacttcttccagtcattggtgaatacttctggtatgactcttcacatccgacagcttgctggtaaaaactcgcatcacataatagaagcgacctttaaggcctttgcaagagctctccgacaagcaacagagtctgatccacgccgcggtgggacaataccaagctcgaaaggagtcttgtcacgttcataaaaggccttgatgagcatgggtcagttgtctgaatgtcttatgtacaatgtcaaacatgctggatctttgttcatttgcaaaggtcaatgaatctaatctaactaattgattattgttggtcaccaggatctttttgctctctctagttctagactttgttcaccttaagccagagctctttaatcaggagttactcgcaatcatttntgttttggtcaangtgtgcaccatttacgngtgtcatgctcgtggttcatagngctttctcngnattggtgggnatgttaaaactggcaatnggccatgtcgtngtttnttaaagggttgccctttng

SEQ ID NO: 1011 - DNA, 1314 bp, Arabidopsis thaliana
  Clone ID: ARATH-23APR03-CLUSTER46632_1
tttttttttttttttttaacacgtataacatattgtgaataaatgacatactataaggttttagggtggaatcttcatctattctttgatgtataaaagatctaatagaagaataaaactcaaaaacaaattgattaagatgagaaatgacaccaaaatttaaaaagtgatgaccacaaatgagaaaaatccctgttttagtctttgattatcggtttcatacgacaaaaaaaaaaaaagaattatcggcatcatctaccggattcatcagaggacatacacaacaaatatatcctttgagaagcctgacatttatatgtatatttatatttgtgaataatgcagttgtgagctttcattccattgcttgaggtggtgattcaacgtcttaggttctccacgacgtagtctgcatagagatccatggaatgctgaactgcgtcgtaggctgcagttgccggaaggaagtcgttaacggctacttccttgttctcgtttttcttatagtcttcaaagaaacggcggatctcagccatacgatgaggcggaagctcactgatgtcgttgtaatggcgatactctggatcgtcagcgcagacagcaatgatcttgtcgtctttctcaccctgatcaatcattggcatcagaccaatagctttggcccgaagaaagcatgctgggatcaccggttcctgcataatgacaagaacatcaatagggtcactgtcctcacaaagggtacgcggaatgaacccatagttgtgtgggtatacgacagatgagtaaagaatacggtcgaccttaatgagacccgtagttttgtcgagttcatatttcaccttgctcccttttcctatctcaaccacacaattgaagataattggggcttcaggtcctatctcgagatcatgccatgggtgtgcagctactgatctgtgactcatggacgaaagtatcctctcattaagagtaggaagtgaaacatgtttctcaacgtagcttttggtagaaacctcaatcggtggcgccattgctgaacaaatcgacaaatctgaaatctcccgagataaagtgtcgtcgaatgaagaagaaacgcaagcacagatctcaagaaggataacccaaaggagagagagagagagaagcaagtgtagagagaaaagctaaaggagaagaaagctgtgactaaacgcgttcccgctctatgtctctgcttctgtgctatttgaagactccattttttagtttagaaagaatattaatatttttctggaaggaaaacaataaattaaattctctttaattttggaatat

SEQ ID NO: 1012 - DNA, 1945 bp, Arabidopsis thaliana
  Clone ID: ARATH-23APR03-CLUSTER4681_1
cgcggtttggtctgcgtcgtcgtgtctctcggtccaggtcgcatccctcaccacctcgttgccgtctctcctcggctacctcactcactatatcgcccgcctctggatcacgaactctctccatcaaaattcaaaaccaacaccatggataagacagcgacattactttccactctcttgttcttgttcacattcctcacgacctgtttgtctaaagatctctgtaaccaaaatgacaaaaacaccctccgtcaagatcaagaattctctaaacaacccttatcacctcgcttcatgggaccctcaaaccgactgttgctcctggtactgccttgagtgcggcgacccctccctgagccaccgtggggccgcctccaccgtcttctcccgccccttcgccggtcggctccccccggttgtccgggccttgcccgatcttgtggcccttgtcgcccgcacccgctcggtcctttttgttttttttctacctacatgatatgtattgactattattacggtcctcgggctcaccgggaccaatctgactccgcctctccctgtctttataactcagctcatggttcgcgtgtgcttcgctctctccttccatcaaaattcaaaaccaacaccatggataagacagcgacattgctgtccactcttgttcttgttcacattcctcacgacctgtttgtctaaagatctctgtaaccaaaatgacaaaaacaccctcctcaagatcaagaaatctctaaacaacccttatcacctcgcttcatgggaccctcaaaccgactgttgctcctggtactgccttgagtgcggcgacgccaccgttaaccaccgtgttaccgccttaaccatattctccggccagatctccggtcagatcccggctgaagtcggtgacttgccgtatcttgagacccttgtcttccgcaaactctctaacctcaccggtacaatccaacccaccatcgccaaactcaagaacctccgaatgctcaggctcagctggacgaatctgacaggtccaattcctgactttataagtcagctcaagaatctcgagttcttagaactttccttcaatgatctctctggttccattccaagttctctctctacgttacctaaaatcttggctcttgaacttagcaggaacaaacttacaggttccataccagagtcatttgggtcgtttccaggaacagtccctgaccttcgcctatcacataaccagctctccggtccaatacccaaatcattaggcaacatcgactttaaccggatcgatttatcccgcaacaagctccaaggtgatgcttcgatgttgtttggttccaacaaaacaacctggtctattgacttatcaagaaacatgttccagttcgatatctcaaaggttgatatccctaaaacacttggtatcttggacttgaaccacaatgggatcactgggaatattccggtgcagtggactgaagctcctcttcagttcttcaatgttagctacaacaaactgtgtggacacatcccaactggagggaaacttcagacatttgattcttattcctattttcacaacaagtgtttgtgtggtgctcctcttgaaatttgcaagtaaaccaagcttatctctaggattacgaaaaaatatatttgagtcaataatatagacaaatatgtaatgttattcggattgattaataaaacatgaaccaaacctctcatttgatgtattcatagcacattttcaaaatgttttatttgatggattaatcctaccttaatggaaaaacaggggaaatatggataacggaatctctgagtggtttggtatggtttctcgattcgatttgggtttatatccaaacttgaaaagtaaaaccagattggtttaaacaaaaaaaaaaaaagaagagaaaaaccctgatttccttat

SEQ ID NO: 1013 - DNA, 1983 bp, Arabidopsis thaliana
  Clone ID: ARATH-23APR03-CLUSTER4683_1
cctttggcacgtttctcaatatagattgctgcaccagaaaaagacaattttttctgtttgaagagatacaatgtccacaagtctggggatttgacatgaagcagagaaccgcatttttgttaccattctcatagatcggtcacagggaagaaaagaaattggaggaccaaattcggaaagcacgaggctgagcagttcttgtaaaacttcgagatggacgaaaagccagctggcatatgagtaatgttggttacagttacagctcaacgccatatctatcaggtaatttttcttgcaaaaacacttcacttgaagggattctcagaaaaaatcgctaggagaaggttcatttagtttagctcttcagcagacttcactgtttttccaatggtcaccattccagaaagcttacaatagtctgatttttagaatctcgtgccaaaaaatattctgcataagctcaacaaagagtgtgaggtgagtttcgaagactgtttgggtaagatgttgctacaccaaggtaatgagatagcctgtgatgtctacgacgagttcatgtactttgctgaagctgcagccaaagagtttaagcttccaaacgtcattttcagcaccacaagtgccacggcttttgtttgccgctctgcattcgacaaactttatgcaaacagtatcctgactcccttgaaagaacccaaaggacaacaaaacgagctagtgccagagtttcatcccctgagatgcaaagactttccggtttcacattgggcatcattagaaagcatgatggagctgtataggaatacagttgacaaacggacagcttcctcggtgataatcaacacagcgagctgtctagagagctcatctctgtctcgtctgcagcaacagctacaaattccagtttatcctataggccctcttcacctggtggcatcagcttctacgagtcttcttgaagagaacaagagctgtattgaatggttgaacaaacaaaagaaaaactctgtgatattcgtaagcttgggaagcttagctttgatggaaatcaatgaggtgatagaaactgctttgggattggatagtagcaagcaacagttcttgtgggtcattcggccagggtcagtacgtggttcggaatggatagagaacttgcctaaggagtttagtaagataatttcgggtcgaggttacattgtgaaatgggctccacagaaggaagtactttctcgtcctgtagtatggttccgagtggatagagtccatgcctgcagagtttagtaagatggttttggaccgaggttacattgtgaaatgggctccacagaaggaagtactttctcatcctgcagtaggagggttttggagccattgtggatggaactcgacactagaaagcatcggccaaggagttccaatgatctgcaggccattttcgggtgatcaaaaggtgaacgctagatacttggagtgtgtatggaaaattgggattcaagtggagggtgagctagacagaggagtggtcgagagagctgtgaagaggttaatggttgacgaagaaggagaggagatgaggaagagagctttcagtttaaaagagcaacttagagcctctgttaaaagtggaggctcttcacacaactcgctagaagagtttgtacacttcataaggactctatgaagacagttgtgtctactaaaacacacaaagcatcaagattcctttttcaaccattccaagtttgtttgcatagagtttatctgaacatcacttaaaaactcacctgcagaataacaaactataaaaattaatactttaccgctcttttatctctttcggagtctttgactgagattctctccggcttaattttgctacgacgatacaaaaccaccgcaaactgccgcatctgagtctggttagctgaaaaccgataaaggagggatcttggaggaagacgaagagaaaaaaaccaatacaac

SEQ ID NO: 1014 - DNA, 2850 bp, Arabidopsis thaliana
  Clone ID: ARATH-23APR03-CLUSTER4685_1
tcactagtcccccccccccgatcgcgacgactctttgaagcttccgttgctgacgtggatcactcctctccgccacaaaaacaaaacagaaaaacaaactcagacatgagcaagagctagccgtcactctcactctctgatgtctcacgaattccgatttcaattctaacttaaaccatatttctccgatcaaacatggcgtccgtatctccatctccgtcgtgttccactatacccataccacttcgacgaacatctttcgccgttgctgagttgagacgattaaaacaaagaagagcgatcccacctgtgtccgtcggtctcggacacttcgctgatgttgtacgcaatgacgttgatttcctgaagaacaaaatcggtatcggactccgttgggctaacgaggcttttcgtgtaccggaagtgactaaatccgctgaggaactgttttggcttaggcatcttgaggatcatacttctcagaatttgaagtcacaatcttggcctcagccttcctactcagggctcactggggtggatttgttcatggctgatgtcaaagccttggagacatatgctggttacttttacagtctttctaagatgtggtcaagaccacttcctgaagtttatgattcacaagctgttgcagattactttaattgcaggcctcatgtcgttgcctttaggcttctcgaggtattttctgcgttcacgattgctgccatcagattacgaacatcagcatcagttaagggcaaaagtttagaagcttcagagcagatttttgggatggtgttgaaagaaaccatgctacatttgggcccaacttttatcaaagttggtcaatcgctttccacgaggccagatatcattgggactgaaatctccaaggcactatctgaactgcatgaccgaatccctccctttccctggcctgaggctgtaaaaatccttgaaggggaattaggtggtcctgtcgaatcattctttagtcagttttcgcaagaaactgtagcagcagcatcctttggtcaggtctaccgaggaaggaccctcgatggtgcagatgttgcagtgaaagttcagcgccctgatctgagacatgcagtgctacgcgacatctacattctgcgacttgggttaggtgtattgcgaaaggtagcaaagagagaaaatgacattcgtgtatatgctgatgagcttggaatgggtttggctggagaattggactttactttagaggctgccaatgcctctgaatttcagctcacgcacgattttcctatatccgggttccaaaagtatatcagcatctaacgcgcaaaagagttttgaccatggaatggatggttggtgaaagcccaaccgatctactcgcaatatcttctggttactctgatcatgacaatgagagtcatgagaaacaaaaaattgaagcgagaaggcgtcttcttgatctggtgaacaaaggggtagaggcaactctagttcaactccttgatacaggtattttgcatgcagatccgcatcctggaaaccttcgttacacaacatcaagacaaatagggtttttggactttggtttagtttgtcggatgcaaagaaaacatcagcttgccatgctcgcatcaattgtgcatatcgtaaatggtgattgggcctgtcttgttgaatcgttgattgatatggatgtcatcacgccaggcgttaatacccgtcgttttactctggatctggaatatgcattgggagaggttaaacttataaacgggattcctgatatcgagttcaccaaggtgcttagtaaaatagtcaatgtggccctgaagtatcagctacgcatgccaccatacttcacacttgtcctccgttctcttgcttgcttggaaggtctggctgcagctggagatccaaattttaagacatttgaggcagcatacccttttgtggttcaaaagctcatcactgaaaattcagctgcaacaaggaagattcttcattcgtccttaaccgaaagaaggaattccgatgggaaagggttgctcttttcctgagtaaaagttctacgaggaaacaatcgccactgctaaagttatcaagggatgaaacttctgttgatagtagttccaatctaacggacaaagatgctgacaatgtaagtttggtcttgagacttttggcatccaaaaatggtgtggttcttagaagactcttgatggctgcgaacgggacttcactgatccggacatttatttcaagagaggcacttgtcatacgccagaaactttgcatgacgattgcaactacgatgtaccaatggatggttggaagccttggaattgaatcccttaaattcatttctctttcagacccaccaccatcttcaggaatcaacattacagtcaaagacttcaagattctaatcaatgacaagcgggtcagagtaatactgagaaagatactggagtctgcaaagagtgaccgagttttgatgctcagattctgctggacttcctttgtcatgtctctcaccaccactgcgcttgcttgccatcggtttgtgatctcggtctctgaaggttacgtcaactacttatctctgtctgctccagtcgcacttcgtacctgattacctgaacatcctacaccaacacagaaccagaatcactaatgtatattgttgtcaagacccaaagcaaagggttccttagtaagagggatagattctacagaaagactaaatattttcgtgtatagagtcgttccatatctaatcctatcagacgatcaatgcctgtcgtaacgatatatgactaatcataatatccgagacctcaaggaatcctt

SEQ ID NO: 1015 - DNA, 3182 bp, Arabidopsis thaliana
  Clone ID: ARATH-23APR03-CLUSTER4696_1
ggtcttcatcactttcctcaaatcccatcactctctttctttcgtttggtccctcaaaaactatataaaatcccaatttcccagctctattaaaaaaaccatatacgtacacacatacaaatactctctgattattttttgtatgtgtgtacgaaaacgcatagctctttgttgtctttgatcgagatttttgctgaatctatcttcgcagtgagatcgattttgttatttgatttcgtttactcgtcaatcggaagttcgatcggaaattgaatgcgtggatctgattacgatcaaatgacctccagcttaagggctactgacattaaggaaattggcaatgggagagacgggagatgatgctgggccatcagagcaaggaccttctaatcaaacctggtggccttcagaatttgtggagaaatttggttctgtttatctgggatcgcaagaagagacatctagtactaaagactcacctagaaatcttgggcaagatgggctgccatctagtactgcttcgaatattctttggagtactggttcactttctgagcccatcccaaatggcttctactctgtgatcccggataatagattgaagcagctatttaataacattcctacattggaagatcttcatgctctgggtgacgaaggtcttaaggctgatgtgattctagttgattttcagaaagataaaaagcttttcaggcagaagcagttgattaccaaacttgtcagtggattgaactcaaagccagctactattattaagaaaattgctggactggtagcagatgtttataagcaatcaactctgcagagtccagcaaaaagtacgcagtcatttgaaaactgtggtattcaactgctaggacagatcaagcatggttcttgtcgtcctcgagcaatcttgttcaaagtcttagctgatactgttggcctgcaaagtcgacttgtagtgggtttgccaagtgatggagctgctgagagtgtggactcatatagtcatatttctgtcactgttttgctgaattctgtggaaatgctggttgacctaatgcgatttcctggtcagcttattcctctatcaaccaaagcaatttttatgagtcatatctcagcggcaggggaaagtgattctgcagagaatgactcttgtgattcacctttggagccaaacagtcccatgtttggttatccagagaaatttgaccatgaaaatgcagaaaaagatgaaaacctttcgttgcacaggaaactggatgggtctccaaatacgtctggtccaccatcaaggaatatgctgttacgatctgcctctgcgctagagaggaaattaagtttctcacagagcgagtcaaacatggctaacgagttttggcggcagagccggaggaaggtcattgctgatcagcggactgctagttccagtcccgaacatctttccttccgagcccgtacaaagtccatgctaagtggcgacaagaacttggcacgagatttcaccggggatgttgccacatcaagctgcaaatctgttggaggagcaaaaatggaaactaagagaataaggaggagaagcatcagtataactcctgagattggcgatgatattgtcagggcagtacgagcgatgaatgaagccttgaagcagaatcgcctctcaaaagagcaaggggatgatgattcatctcctaactctccaaatgacagaaccgagagctctcatctccagaaaaatgtctctggttttcatcttgatgcccatgaccaagtttctggtggaaggtcgacactttcaagggaaccactagatccgcagaaggcaatctcactaccttcttctccccagaactaccgaagccaatatgaacagagtggatcgtcacatcgcaatataagccacatctgggataaagtattgggatctcccatgttccagaataagccattattaccttatgaagaatggaacatagacttctctgagctgactgttgggacacgtgtcggaattggatttttcggagaagtattccgtgggatctggaacgggacagacgttgctatcaaagtgttccttgagcaagaccttacagctgagaacatggaggatttctgcaatgagatatcaattcttagccgacttagacatcccaatgttatactgttccttggagcatgcacaaagcctccacgattatcactgatcactgagtacatggaaatgggatctttgtattacttgctccacttgagtggacaaaaaaagaggttaagctggcggaggaagctaaagatgctgcgggacatttgcaggggattgatgtgtatacaccggatggggatagtacaccgtgatataaagagtgcaaactgtcttttgagcaacaaatggacagtcaagatctgtgattttgggctgtcgagaataatgacagggacaacaatgagagacacagtctctgcaggaactccagagtggatggctcctgaacttatccgcaatgagcccttctcagaaaagtgtgatatcttcagtttaggtgtaataatgtgggagctatgcactttaaccagaccttgggaaggagtaccgcctgaacgggttgtttatgctattgcttacgagggagctcggcttgagattcctgaaggaccactgggaaagcttattgcagattgttggacagaaccggaacaaagaccgagttgcaatgagatactctctcgtttgctggattgtgagtattcgctttgctaactttctctcaatcatattttccttctgtgaatataaaactttgcagcgagagaggtttttgttttcttcgtttcttttttttgaatattgttggctttctcctttgagtttgtacaaaagaactttggcgctttcacatccacaaaaagctttgtggaactcttttccgtttaatcatttgcaaattcgtaaatttcaaaacctctgaaacaaaaaagtaagtcttataaattttacaaaaggtgagaagagttgctcattctttcagtttaaatgatcaagcttgctactctttttcgtaccataaggtttgttccctgctttgcatttgctataagaaaattacggacaaatacatgtacttttcgtttatatttcgtgccttaagaaatgaaaaggagctttgattgac

SEQ ID NO: 1016 - DNA, 2679 bp, Arabidopsis thaliana
  Clone ID: ARATH-23APR03-CLUSTER4705_1
tttccgccctcccgtgcgaggaggggcggacctatacactgcgttttcttcaagggcaatgtccagacgctttcggcgtttaaaagccggacttctcggacagattcaagcaacaagtcatgccctcggagagagagaccaggataatcgtgcagtttctattgcagctcgtggagaaactccaggcttgagagtgctggatcttgctttgcgggaacagaagtcgtaacgccacacgatctcttttcttctctctctctctgttatatctcttctgtttccttccctcactctccctggtctatcttctcctataatctcttctctctccctcttcacctaaagaataagaagaaaaataattcacatctttatgcaaactactttcttgtagggttttaggagctatctctattgtcttggttctgatacaaagttttgtaattttcatggtatgagaaaatttgcctttctattttgtttattggttctttttaactttttcttggagatgggttcttgtagatcttaatgaaacttctgtttttgtcccaaaaagagttttcttttttcttctcttctttttgggttttcaattcttcagagacatggcaagagatcagttctatggtcacaataaccatcatcatcaagagcaacaacatcaaatgattaatcagatccaagggtttgatgagacaaaccaaaacccaaccgatcatcatcattacaatcatcagatctttggctcaaactccaacatgggtatgatgatagacttctctaagcaacaacagattaggatgacaagtggttcggatcatcatcatcatcatcatcagacaagtggtggtactgatcagaatcaacttctggaagattcttcatctgccatgagactatgcaatgttaataatgatttcccaagtgaagtaaatgatgagagaccaccacaaagaccaagccaaggtctttccctttctctctcctcttcaaatcctacaagcatcagtctccaatctttcgaactcagaccccaacaacaacaacaagggtattccggtaataaatcaacacaacatcagaatctccaacacacgcagatgatgatgatgatgatgaatagtcaccaccaaaacaacaacaataacaatcatcagcatcataatcatcatcagtttcagattgggagttccaagtatttgagtccagctcaagagctactgagtgagttttgcagtcttggagtaaaggaaagcgatgaagaagtgatgatgatgaagcataagaagaagcaaaagggtaaacaacaagaagagtgggacacaagtcaccacagcaacaatgatcaacatgaccaatctgcgactacttcttcaaagaaacatgttccaccacttcactctcttgagttcatggaacttcagaaaagaaaagccaagttgctctccatgctcgaagagcttaaaagaagatatggacattaccgagagcaaatgagagttgcggcggcagcctttgaagcggcggttggactaggaggggcagagatatacactgcgttagcgtcaagggcaatgtcaagacactttcggtgtttaaaagacggacttgtgggacagattcaagcaacaagtcaagctttgggagagagagaagaggataatcgtgcggtttctattgcagcacgtggagaaactccacggttgagattgctcgatcaagctttgcggcaacagaaatcgtatcgccaaatgactcttgttgacgctcatccttggcgtccacaacgcggcttgcctgaacgcgcagtcacaacgttgagagcttggctctttgaacactttcttcacccatatccgagcgatgttgataagcatatattggcccgacaaactggtttatcaagaagtcaggtatcaaattggttcattaatgcaagagttaggctatggaaaccaatgattgaagaaatgtactgtgaagaaacaagaagtgaacaaatggagattacaaacccgatgatgatcgatactaaaccggacccggaccagttgatccgtgtcgaaccggaatctttatcctcaatagtgacaaaccctacatccaaatccggtcacaactcaacccatggaacgatgtcgttagggtcaacgtttgacttttccttgtacggtaaccaagctgtgacatacgctggtgaaggagggccacgtggtgacgtttccttgacgcttgggttacaacgtaacgatggtaacggtggtgtgagtttagcgttgtctccagtgacggctcaaggtggccaacttttctacggtagagaccacattgaagaaggaccggttcaatattcagcgtcgatgttagatgatgatcaagttcagaatttgccttataggaatttgatgggagctcaattacttcatgatattgtttgagattaaaagattaggacaaaagttatcgatacatattttccaaaaccgattcggttatgtaacggtttagttagataaaaaccaaattagatatttatatataccgttgtctgattggattggaggattggtggacaaggagatattattaatgtatgagttagttggttcgtcaaaaaaaaaaaaaagatattttcattttgttttttaaaatatattattgagaggtttttttctc

SEQ ID NO: 1017 - DNA, 1237 bp, Arabidopsis thaliana
  unsure (1)..(1237): unsure at all n locations
  Clone ID: ARATH-23APR03-CLUSTER4727_2
actcactattttcacattcttcttctctctcgatatcatctaaatctctctcttgatctcaatttcgcaaaatggctgacaagaagatcagaatcggaatcaacggtttcggaagaatcggtcgtttggttgctagagttgttcttcagagggatgatgttgagctcgtcgctgttaacgatcctttcatcaccaccgagtacatgacatacatgtttaagtatgacagtgttcacggtcagtggaagcaccatgagcttaaggtgaaggatgacaaaactcttctcttcggtgagaagccagtcactgttttcggcatcaggaaccctgaggacatcccatggggtgaggctggagctgactttgttgttgagtctactggtgtcttcactgacaaagacaaggctgctgctcacttgaagggtggtgctaaaaaggttgtcatctctgccccaagcaaagatgcgcccatgttcgttgttggtgtcaacgagcacgagtttggcattgttgagggactcatgaccactgtccactctatcactgctactcagaagacagttgatggtccatcaatgaaggactggagaggtggaagagctgcttccttcaacattattcctagcagcactggtgccgccaaggttgttgggaaagtggtgccatccctcaatggaaaattgaccggaatgtctttccgtgttccaaccgttgatgtctcagttgttgatctcacngttagacttgagaaagctgcaacatacgacgaaatcaagaaggccatcaaggaggaatctgaaggcaaaatgaagggaattttgggatacactgaggatgatgttgtgtctaccgactttgttggtgacaacaggtcaagcattttcgatgccaaggctgggattgcattgagcgacaagtttgtgaagttggtgtcatggtacgacaacgaatggggttaccagttctcgtgtcgttgaccttatcgtttcacatgtcaaaggcctaagcttacaccggcgagagtttgtgtgtggttgagttcgtactgttctgaataaaaaaaaggagaaaagaaaactcgagttgttatgttttttcactgattccatgcgcagtcatgagagtttgtagcttttgtctttttgctttctcttaatgtttccctgctttatttactgaaaccattggtttggttttttatgttaattaagtttttagttcaaaaaaaaaaaaaaaa

SEQ ID NO: 1018 - DNA, 1652 bp, Arabidopsis thaliana
  Clone ID: ARATH-23APR03-CLUSTER4742_1
gccgttcgtatttgttcttgcttgctaaagtttttttgctctgtacggtgacaagaccagagagatgaagttattgagcaatagtctaatgttccttcctctgctggctttggctttaaccgcagtttcgtcgcttaaatacagcagaaatgacttccctccaggctttgtctttggctctggcacatcagcttatcaggtggaaggagctgctgacgaagatgggagaactcctagcatttgggatgtttttgctcatgccggacactccggagtagcagctggaaatgttgcatgtgaccagtatcacaaatacaaggaagatgtgaagctcatggcagacatgggattggaggcttacagattctctatatcctggtcaaggcttttaccaagtggaagaggaccaatcaatcccaaggggctacaatactacaacaatcttattgatgaattgatcactcatggaatccagccacatgttacattgcaccactttgatctcccacaggccttagaagatgagtatggaggttggctcagccaagaaatcgtgagagacttcacagcttatgcagatacttgcttcaaggagtttggagatagagtgtcacattggactactataaacgaggtcaatgtgtttgcccttggagggtatgaccagggaataacaccgcctgctcgatgctctcctccatttggacttaattgtaccaaaggaaactcttccattgagccttacattgccgtacacaacatgttgctcgcacacgcttctgcaacaatcttatacaagcaacagtacaaggcaacagctagagtgaatgacttctatattggttggattttacatccgttggtgtttggtgattatcctgagacgatgaagaccaatgttgggtctagattgccagcttttacagaggaggagtcagaacaagttaaaggcgcatttgatttcgttggagtgataaattacatggcgctttatgtcaaagacaactcttcctctctgaaacctaatctccaggatttcaacacagatatagccgtggaaatgaccttggttggaaacacatcaatcgagaatgagtatgcaaatacaccatggagtctgcaacagatacttttgtatgtcaaagaaacttatggaaaccctcctgtctatatcctagagaatggacaaatgactcctcacagctcatcacttgtggacacaacaagggtgaagtatctgagctcgtacattaaagcagtgcttcattcactcaggaaaggatcggacgtaaaagggtattttcagtggtcgttgatggatgtgtttgagctatttggtgggtacgagaggagctttggattattgtacgtggacttcaaggatccttctcttaagaggagccctaaactctctgctcactggtactcttccttcctcaagggaacactgcaccatccatcatatgcttcgtcttgatcatttgatttcaatggttataatgcttagttgtcggaaatgcaaaccattactatgttttatttttgctaaataaaatcattactatgtttttttctttatcatctttacaataaatcaagatataaacattgtatgttagaaaaagccaaataggtattagtctgttattgct

SEQ ID NO: 1019 - DNA, 1021 bp, Arabidopsis thaliana
  Clone ID: ARATH-23APR03-CLUSTER47589_1
tttttttttttttttttggaataaaattatcattttataagatttatagtaaaagaagtttgtaaagaaacatctaaaatcatgagctaaacggtaaggcctagcaaaaaactacatatgttgccgcaaagcatctctcaaagtataagcagtagtgtaacataatatctccgggaagaaaaaggtcagtatctgagtgacaacaaggtttctgctttgagcctccgcaacatcagcaacttctcctcactgggttcttcatctgcactgtatcaacccgcacaagttaggcgatttcgttgattccggcagatttcttgatggattcaagaagatgctcaattctgtatttcattacaggctgaccatgtcgagtcttcctcaacattttcccctttgcttctttcctcctagattcagcctcttctttcgcttccttcttcgcctgaaacattgcctctctctccttccttactctctccatctcttctcttgtctgcttgtacaaatcctctacaccaattctcttattagatttacccttccgcttatcatcatcatcatcatcacctaccttactagtctctccagtctcattcttatcaggaatgttctgctgcttcaacgacttcctaaacttgctcacatactttgcattcttgtagaactctttttgctttttgatcaaagaagggttatagcgattattttccgatttcatgttggcaaaagtttggagagaaagaccaccgcctcctaatctcctcatgttcttcctcttcttcgtctccgccgatttggatttatcagtctcatgatcagcattttgatagaatttcttcattatcgcgagactcttcaaggtgtataactccacagtaagcagatttgatcaagttacgagaaaggagaagaaagtaggaaccctaattgaaattggaggcgacactctgaagtctgaagtgggaatcgccgaccttattttaaattgttattatacccttatagtttcatctttttc

SEQ ID NO: 1020 - DNA, 1864 bp, Arabidopsis thaliana
  Clone ID: ARATH-23APR03-CLUSTER47_1
aggtaacgtctctctctctctgtgactctctcaattagtttgaaccagtcaactcgtaaagcccttgtttcctgtaattttccgaattgggtcttcccttaatttatcatttctcgccggaaaaactttgagaatttccttgtatttcacggcgatgctataatcctcctgaaagcgacttactgatatatattagtttattaggcaatgaatgtgaaatttaccgagtcaaacgtgtttaaacaatgtaaaagtgttgcaggcgattgttttgtttatcttgttttgggtttggttgtcttggatgggaggaagtagctctaaagagtcacctagaggaggtggaagtggtcgtaggtatgaacgtagtgtgtctgggagctcatcttattcgtctgcttgggaccagagcagctattatcagacaccaaaccatccatctgcgtctcctgtttcatcctataattctgggagacaaacaccgaagaatcttgagaggaagtattcacggattgctgataactaccgttccattgatgaggttaccgctgctctttcacatgccggtttggagtcctcgaatctcattgttggtatagatgtcaccaagagcaacgagtggacaggggcgagatcatttggtaggaagagtctgcatttcattggaactactccaaacccttatcaacaagctatttccatcattggaaagactttatcggtttttgatgaggataatttgatcccctgttatggatttggagatgctacaactcatgatcaggatgtcttcagtttcaatcccaatgatacatattgtaacgggtttgaagaagttctcatgtgttacagagagattgttccccagcttcgtctctcaggtccgacatcttttgcacctatcatcgaaagggccatgacaattgtggaagaaagtggtggccagtaccatgttcttctcattatcgctgatggacaggtgacaagaagtgttgatacagataacggtggattcagtccacaagagcagcagactattgatgccattgttagagcaagtgaatatcctttgtctatagttcttgttggtgttggagatggtccctgggacaccatgagacagtttgatgacaacatccccgctcgtgcctttgacaatttccagtttgtgaatttcacggatataatgtcaaagaacattgatccagcaagaaaagaggcagaattcgcgctttctgccttgatggagatcccgtctcagtataaagccaccctcgaactaggcttacttggacaaagaaccggacattgtccagacaggattgcgcttccaccaccaacttatgctactcaatctatgcgcaacagcccaagaacttcccgatcaaccagttttcaaaacaaaccatatgataatggtgtttcctctacaccaccttcaactactcataacgagagccagcaacagttttgccccgtatgtctagtgagtgcaaagaacatggctttcaattgtggtcatcagacttgcgctggatgtggggaagacctccatgtgtgtcccatttgccggagctcaatctcggttcgtatcaagctttattaagataagtctctcaagaactgaaggaacccgaggtggtctgagatctttcacagccaacaccatcccaacttagatctcatttaccagtgtcctaacatttgtttttactttgaggggaataaccggttcctctcaaaggttttgtagataatctgttgtcaattttgcattctcattgcacatgaaaaaaccacagcagactctctcgtgaataaaggatcctttctctgcggttacacatttttactttagagggtc

SEQ ID NO: 1021 - DNA, 1350 bp, Arabidopsis thaliana
  unsure (1)..(1350): unsure at all n locations
  Clone ID: ARATH-23APR03-CLUSTER4813_1
ngnnnggtgcccggctgcagcgcctagtccccccccccccaattctcagctttgccgttttcatcgattaaagagagagaggcttcgttcgccgtccgtcgtaaaaatggggttcaagaggaagaaagatgatggtgatggtgaggaaatggaatctgatgttcgtggaaagtctactttcagtgggggtgagaagaggaatgtgatacttccttcgatgattaagaacaaagataagagatcaaaagtgtatgcgaagcagaagcatgagaagaaattggagaagcagaagaagattagagctcgtgatgctgctgagaaacgagctttagagcttggagaagagcctccacaaaagatgattccgaagacgattgagaatacaagagaatctgatgaaactgtttgcagacctgacgatgaagaattgtttgcggatattgatgctgatgagtttaatccagttctgagacgtgagattgcacctaaggtcttgctcacaacatgtcgtttcaattccactagaggacctgctttaatatctgagttgctttcggtgataccaaactctcattatcaaaagagaggaacctatgatttgaagaagattgtagaatacgcaacgaagaaagattttacatctcttattgttgttcatacaaatcgtagagaacctgatgcgcttcttatcatcggtttgccaaatggtcctactgctcatttcaaattgtcaaatcttgttctaaggaaggatattaagaatcacggaaatcctacaagccatcaaccagaactggttttgaataactttacaacgcgtttagggaatcgtgttgggagattttttcaatcactcttccctccggatcctaatttccgtggtaggagagttgtaacattccacaaccagcgtgactttatatttttcagacatcaccgttacatatttgagacaaaggaaagcaagagtgataaaggaaaagaagagacaataaaacctcgtcttcaggaatgcggtcctcgattcacgcttaagctagttactctacagcatggaacttttgacaccaaaggtggagaatttgaatgggttcataagcctgaaatggacacgagcaggagaaggttcttcttataaattctgctgtcttccgagtttcaccaagttttgtgtttattttgcattttcgaattttccctacctccgtccaaaattgtatgtctttaaaacttctcatttcttttttcaatatagccatgagccatcgaaacaatcgtaagagtacttgtttcaacaatataggccctcgttttttactaagctatatatagttggttaaactcatgatc

SEQ ID NO: 1022 - DNA, 903 bp, Arabidopsis thaliana
  Clone ID: ARATH-23APR03-CLUSTER4840_1
atgtgttccagtttccatcttttttgaaccctctcaataacaaaatcagaaccttgtcatattaaaaaaatctcaatttcaattctctcgatttctctatcatcatcatccatggcttcgcaagctagccttctccttcagaaacaactcaaagatctctgtaagcatcctgttgatggattctctgctggtctcgttgatgagaagaatatattcgaatggagcgttaccattatcggacctcctgatactctctatgaaggaggattctttaacgcgattatgacatttccgcaaaactatccgaatagtccgccaaccgtgaggtttacttcggatatgtggcatcctaacgtttattctgatggtcgtgtttgcatatctattcttcatcctcccggtgatgatcctagcggttatgagcttgcaagcgagcgttggactcctgttcatacagttgagagtattatgttgagtatcatatcaatgctttctggtcctaacgatgagtctccagcaaatgttgaagctgccaaagaatggcgagataagagagatgagttcaagaagaaagtgagccgttgtgtcagaaagtctcaagaaatgttttgatcaacgtcaaacttcacacctttgagatctctggagtttcaatcaaaagttcttcatattcctatctgaaaccctttgaaacgcaacttgttataactcggtttacatctctttttgtcgcgttcgagaaccagagcgttttgaaaggtgtttggttgagaaaagtgctgttcttgagaaactggtattaaaattataaatttcatttgttaagaatcttctttgcttataaagttataaacctataatatcagcaatagtttgctctctgaaaaaaaaaaaaaaaaaaaa

SEQ ID NO: 1023 - DNA, 1712 bp, Arabidopsis thaliana
  Clone ID: ARATH-23APR03-CLUSTER4844_1
gcgcactagtccccccccccaacgacaacacgacgaagatgaatccttctcacggtggcgacgacaagcaacgaccggccgaagatgaatccttctcacggtggcgacgacaagcaacgaccggcgatgtatccccaagttgatcaatccattcctgataatccttttgcttctacaaatccttacgtcgcttcttccccttatctatatccttctctatcctctcataatctcggacctaatctcttcccagaccacggagatgcatccaacgaccaatcaccatctgctcctcctcaggcgacggaggaggttctcatccgtgttcccggcgctattctcaaccttatcgacaaatcctacagcgttgaactcgcgtgcggtgatttcaccatctttcgaattatccaggggcaaaatattgtagcggttctagccaatgttggaaatgagattcaatggccgttgacgaagaacgaggttgcagctaaggttgatggatctcactatttcttttcgattcatccgccaaaggagaaaggtcaaggatctgggtctgattcagatgatgaacaagggcaaaagagtaaatcgaaatcggatgatgagattcttaattacggattgaccattgcttcgaaagggcaagagaatgtattacttgtgcttgatcaggttttacgagactacagttgtttcacagagcagagaatgtctgaaaaagccaaggagactggagaagaggtgctgggaaattcagtggtggcggacacttcgccggaggagcttaagggtgagagaaaggatgttgtggaaggtcaatgtgcggcgtattggacaacacttgcaccgaatgtcgaggattatactcacagtactgctaaaatgatagcttccgggtcaggtaagctgatcagagggatactgtggtgtggggatgtaactgtggagagactcaagaagggaaacgaggttatgaagaataggcttagtcgtgctgagaaggagaaagatgttagccctgagacactgaggagaatcaagagggttaagagagtgacacaaatgacagagaaagttgccactggtgttctttctggtgttgtcaaagtctcgggattcatcactggttcaatggcaaactcaaaagctggaaataaggcatgatctgtgatgctgttgaagtggctgggaaaaacgtaatgtcgacttcatcaactgtcacaacagaactagtcaatcacaggtacggcacaaaagccttcatcaactgtcacaacagaattagtcaatcacaggtacggtcacaaaagcagcagaggctactaacgaagggctagacgcagcgggacatgcatttggaacggcatgggttgctttcaagattcgaaaggcatttaaccccaaaaatgtcataaagccttcatcattggccaagtctgtttcggaactaaaggctaagaaaggctccaagtaaacactaaacagccttcaactgttctgtgttcatctaaacttgcatttagtttttcattttggaaaagtatatgaagattgattgatgtaactctatatttagttttctgtgtatattgtgattctatgtaaactatataatccagtttctgcctatcttctcccttttatgggtttgatttgtaacttcttaatgcatcgagaagcagtattagtactctctatctttcttttgt

SEQ ID NO: 1024 - DNA, 1967 bp, Arabidopsis thaliana
  Clone ID: ARATH-23APR03-CLUSTER4855_1
gacaacacttctctcactcaatcgctttctctttgagagttttgtttagtttcaacaaacaaatcaaaacacacaaagtttgtgtcttcccttaagattcactcaaatctcgcaacacacacattcaacaaatcctgattcataacatctcaccaaatctctcaaaagatctccaaatctaaaatgttcttcttcttcttcttcatctgaatccaaaacaacaatggtgagacgtttcctctcttctcacaaatctctcatcactgttttctggatcgccactttcgcttccttattcatctggcaattcggcggcgtttccacaaatctctactccggtttctcccttttctggtcgtcgtcttcaacaaccaccaccgtcttctccggtggattccccaagctcagacctgtagttttcaatctaacagacttcggtgctgtcggcgatggtgtcacaatcaacactgaagctttcgagaaagctatttataagatctctaagcttgctaagaaaggaggtggtcaacttaatgttcctcctggtcgttggctcactgctccgtttaatctcactagttatatgactcttttcctctctgagaacgctgagattcttgctcttcaggatgaaaagtattggtctttgcttcctcctttaccttcatatggatatggaagagagcatcatggacctcgttatggaagtttcattcatggacagaatcttagagatgttgttgttacagggaataatggtagcatcaacgggcagggacaaacgtggtggaagaagtatcgccaaaagctgcttaaccacacgagaggaccactggtgcagataatgtggtcaagtgacattgtttttgccaatatcactttgcgtgattctccattttggacgcttcacccatatgactgcaaaaatgtcacaatcaccaatatgaccattttggcgcctgtgttcgaagccccaaacactgatggtatcgatccggattcgtgtgaggacatgttaatcgagaactcttacatcagcgttggggatgatggaatcgcaataaagagcggttgggaccagtatggaactacatatggaaaaccttcaaagaacatactcatccgcaacctcatcatccgctccatggttagcgctggtatatcaataggaagtgagatgtctggtggtgtctcgaatatcacagtcgagaatattctgatttggagctcccggcgtggagttaggattaaaaccgcaccaggacgaggtgggtatgtccgggatataacattccggaatgtcacattggatgagttgagagttggtattgtcattaaaacagactacaacgagcacccagatggtggattcaatccccaagcctttccgatactcgagaacataaactacactgggatatacggtcagggagtgcgtgtaccagtgcgtatccaaggaagcaaagagattcctgttaaaaatgtaaccttcagggacatgtcagtggggataacatacaagaaaaagcacatattccagtgtgcgtacgtggaggggcgtgtgataggcaccatcttcccagctccgtgtgataaccttgatcggtatgatgagcaggaacggttggtgaagcaatctgattcccagaatgcaacagatatagactacgagatctgaccaacaagagactgggtttggcctctgcaacaaatttgtttcgttggattttgtacatatacagaggaatctggaaagcaaaggaaattatcggtcagtcagattaaattgtatttgcactcttaaagaggaatttttccattgatcagtttatgttattgggttcttctctatctacctttgttatacacacataaatgggaatggtgagattcgaaaattactgcttttgcggcaagctgagatattgtatcaaaagggaaaggtcagatcccgagactactgccct

SEQ ID NO: 1025 - DNA, 1737 bp, Arabidopsis thaliana
  Clone ID: ARATH-23APR03-CLUSTER4880_1
gactagatgacccgcgcagacaacgatgagttccccatgaaaacccacccaaaatatcacaagaaccgactaaaaaaattcggatctaaacccgacgcggtagaaccaatcccaaattttactccgttgtgaacgcatcaaacccagaaaatttcttcctccgatctcgcattctccacttccataatccccaaaattgtttcgttgacttttccacaagatgaagctaacggacaacgaagagatcaccatgaacggaactcgagaaatggagacgacagagcaagagacatcgtcgccgtgttcgttagtaatcgaagcttttccggtgaagaaatccattattgtaggttacgctcttacatcaaagaagattaagagctttttacaaccaaaactcgaaggtttagctaggaataaggggatattaattgtggcaatagatcagaataagccactttcagagcagggtccgtttgatattgtgttgcataagcaaattggaaaagaatggcgtcgaattctcgaggaatttaggctagcacatccagatgtcacagttcttgatcctccagatgcaatactacatctccgtaatcgtcagtcaatgcttcagtgtgttgcggacatgaatctgtctgatagtaatggacgcgttggtgtgcccaagcaattggtaattaaaaaggatgcatcttcaattccggaggctgtcaataatgctggtctgagactacctcttgttgcaaagccattggttgctgatggaagtgcaaagtcacatgagctttcgctggcttacgatcaacactcccttctgaagctcgagcctcctcttgttcttcaggagtttgttaaccatggaggtgttcttttcaaggtttacattgttggggaggctattagagttgtccggcgcttctccctacctgatgtctctagacgagaactccccaaatcagctggtgtattccgcttcccacgggtctcttgtgctgcagcttcagctgatgatgcagatctggacccgagcattgccgagcttccaccacgtcctctgttggagagactggcaaaggaactccgtcgtggattgggtctaaggctgttcaatttagacataattagagagcacgggacaagagatcggttttatgtgatcgacatcaactatttcccagggtacgggaaaatgccagagtatgagcatgtattcactgatttcttactgagtgtggtacaaagccaatgtaagaaacgagctttggcagatcaatactaaactcaacggagagaccattgttcctccccaaagaaaaaaagaagattagtagtctatgcaatttatttctgtacaggacaaagcaccgatttccctcgatgttgttctttagcttcattgtgctgtacaaaagaacaatggaagattgcatttaaaagaaaatccttgggacctttagagatttaaggatagagaattgtctgaatctcactacaatgtcaccatatcaaaaagtgaatagaccttatgtcacacactactcatatgggcatggcttcactttgtgactgcttctatcttttgatttggttggctttgtaaaaaaaaaaaaaaaaaaaactcgagggggggcccggtaccgctcttatcttttgatcatgtccttgttagtttgtttgaaacttggagtttatagtttggatcagttttggatgcactcttttatgagtaatctt

SEQ ID NO: 1026 - DNA, 3393 bp, Arabidopsis thaliana
  Clone ID: ARATH-23APR03-CLUSTER4887_1
aagagcatcactggcagcaatgaccaccattgagtttcaaagctgcttcatcttcctcctcttatgtctcttctcactcgtctgttactctctctttttcaggaaaccaagctcaagacgggacgcccatggctgtgatctgcctccgagccctccttctttgccagtcatcggccatcttcaccttatcctctcttctcttgtccacaagtcttttcaaaagatctcctccaactacggacctctcctccatctccgcatcttcaacgttcccatagtcctcgtctcctctgcgtcagtggcctacgatatcttcagggtgcatgacttgaacgtctcttctcgcggctcccctccgtttgaggagtcacttttgttcggatctaccggcttcattagtgctccctatggagattatttcaagttcatgaagaaacacctggtcacaaagctccttggacccacaggcactcgagcgctcacgacctcatccggacaaatgaactagaactgtctttacataaacctgcttgataaagcaacgaagaaggagagcgttgatatttgtaaggaagcgatgaagctcacaacagcatctgcaagatgatcatggggaggagttgttcagaggagaatggtgaggcagagagagttagggctttggctacccagttagatggcttgacgaagaagatcttattggcgaacaggttgcgtgcggggtttaaaaagcttgttgtctcactgtttagaaaggaaatgatggatgtttccagcagatttgatgagctgctcgaaaggatccttgtggaacatgaagataaactggacatgcatcatcaaggtacagacttagtggacgcgttgttggcagcttgtcgggacaaaaatgcagagtataagatctctaggaaccatatcaagtcgtttttcgcggatctcttatttgcaagcactgacacctttgtgcaaacaacacagtggacagtggcggagatcattaataaccctaatgttcttgagagattgagaggagaaatcgattccgtggtcgggaaagcaaggttgattcaagaaactgatttgccaaacctcccttatttgcaagcggtggtcaaggaagggcgaaggccttagattgcacccgcctacgcctctcatggtaagggagttccaagaagggtgtaaggtcaaaggtttctacataccagcgagcacaacccttgttgttaatggttatgctgtgatgagagatccaaatgtctgggaagaccctgaggagttcaagccggagaggtttttagcttcttcaagattaatgcaagaggacgagataagagagcaagccctcaagtacatcgctttcggtagtggaaggagaggctgcccaggagcaaatgtagcttatatctttgtaggaaccgcgattggaatgatggtgcaatgctttgactggagaatcaatggagaaaaggttgacatgaaagaggccattggaggactgaacctgaccttggctcatccccttaagtgcactcctgttgctcgattcccaaaacctttttaagttcaaattattaaaaccgatgttccatgtttgatgttggtgactggactagtgttgtaagatggttgaagtaaaataataaggaagcttgctttctgttgttctgtaactacaaacaaatgcattctcattcggatttatcagtcgaatcgttcatacaaaaaattaaataaaaaacagtatcacttggaaaccaaacgctacatagttctcttattactgtgatttgcctccaagccatccttctatgccaatcatcggccatcttcaccttatcctctcttctcttgtccacaagtcttttcaaaaaatctcctccaagtacggacctctcctccatctccgcatcttcaacgtccccatagtcctcgtctcctctgcgtcagtggcctacgatatcttcagggtgcacgatgtaaacgtctcttctcgcggtccccctccattcgaggagtcactcttgttcggatcttccagcttcatcagcgctcccctccctatggagattactggaagttcatgaagaagctaatggtcacaaagctgcttggaccgcatgcactcgagaggtcacgaaaaatccgtgcagatgaactataccggttatacacaaacctgcttgacaaggcgatgaagaaggagagtgttgagatcggtaaggaaacaatgaagctcactaacaataccatttgcaagatgatcatggggaggagttgttcggaagagaacggtgaggcaaaaatagtcaggggtttgattgccgagtcatttactttgtcgaagaaatttttcttggcagcaactttgcgcaggttgctggaaaagctcgggatctcgttgttccagaaggagataatgggtgtttcccgtggattcgacgagctactagagaggattctgagggagcatgaagagaaaccggacgagcatcatgatacagacatgatggacgcattgttggctgcttataatgacgaaaaagccgagtataagatcactagaaaccagatcaaggcgtttatagtggatatgttcatagcgggcactgacatctcagcgctaacgacacaggggacaatggctgagatcattaacaaccctaacgttcttgtgagaattagagaaaaaatcgattctgttgtagggaaatcaaggttgattcaagaaacggatctaccaaagctcccttactcacaagcggtagtcaaagaagggctgagattgcacccgcctacgcctctcatggtaagggagttccaagaagggtgtaaggtcaaaggtttctacataccagcgagcacaacccttgttgttaatggttatgctgtgatgagagatccaaatgtctgggaagagcctgaggagtttaagccggagaggtttctagcttcttcaagattaagggaagaagaagagataagagagcaagccctcaagtacattgcatttggtagcggaaggagaggatgtcctggaacaaatatagcgtatatctttgtaggaacggcgattggaatgatggtgcaatgctttgactggaaaatcaaaggagacaaggttgacatgaaagaggccattggaggactgaacctgacattggctcatccccttaagtgcactcctgttgctcgatccccaaaacctttttaagttcaaattattaaaaccgatgttcgatgtttgatgttggtgactggactatagtgttgtaagatgaatgaagttataataataacgaagcttgctttttgttaagctgttagtactcgttcattcattctctattaagacactcaaaatctcataccactctttatttttctcaa

SEQ ID NO: 1027 - DNA, 823 bp, Arabidopsis thaliana
  Clone ID: ARATH-23APR03-CLUSTER49046_1
aaactatatcacaacttggattctgccactctttttttctttttttttctaactcatcatcatattcagatatgcttcaatcttttttgtacatacaaggtagagaagtgaggattgtacaggattatgtatgttgattatcaagtaatatatagaacatctacattataatacctccaaagtaagctacttgtcatcatccttctccttgtccactttcttcccaatccaattggctacaataggagtcaaagccactgtaggcggaaaccttatcggagatgcagctttatgcgctgcgtaagccaaagcaaaggctcctactttctctcctgtctcattcgtcgaaatcccaacctttagaagaagagcttgaacatcaacaccggaagtcacaaggacatagcagagtgagaaggaaatgagagaaagagtaatagatgtagcgagataagcaccaccatactttgcaagtaactctttagcctcatctgtttttgatttcttcttcttattgtctccatcacttccttcatcatccttagagcttaatatcttccatagaccaacttcaaggccatatttcttggtaacttcttcggcggaaggaggaggaggagaagaagacggcggcgaaatgttcttatcaatgtcctccgccttctcacggacggctctgcatctgaatttcttcgaggaagctgaaactgaagagtggaagaatcggatttgaaggtttctggtgttcaacaaggaagacgaaggaggaatttgcagaagcatcatcgccattgtttttttcagccaccaaaaaaaacagaaa

SEQ ID NO: 1028 - DNA, 1645 bp, Arabidopsis thaliana
  Clone ID: ARATH-23APR03-CLUSTER4909_1
gacttcttccaccttcttcttctcttcttcttctcttcttcttctacttccgcaaaaactttttgagaaagagaagcaaaattctctaatcgttctttctctgccctaatccacgtatcgtttggtgttcttcttcatcgaatcgacatggcttcagatgctgacatggaggactatggattcgagtattctgatgaggagcaagaggaacaagatgttgacattgagaaccagtattataactctaaaggtatggttgagactgaacctgaagaagcactttctggatttgctgaggttgttcagatggaacctgagaaagctgactggggtttcaaagctcttaagcagactgtgaagatctattatcgtctaggtaaatacaaagaaatgatggaagcctatacagagatgcttacatatatcaagtcagcagtcaccaggaattacagcgaaaaatgtataaacaatatcatggatttcgtctctggatctgctagccagaacactggcctgctgcaagagttctatcagaccactttgaaagcccttgaagaggctaagaatgagagactctggttcaagacaaatcttaaactctgcaacatctggtttgacattggtgaatacagacggatgactaagattctgaaggaactccataagtcttgtcaaaaggaagatggaactgatgatcagaagaaaggaagtcagctgcttgaggtttatgcaattgaaattcagatttacactgaaacgaaggacaacaaaaagcttaagcaactataccataaggcacttgccatcaagtctgccatacctcatcctaggatcatgggtataatccgcgagtgtggtggaaaaatgcacatggcagaacgtcagtgggaagaagcagcgacagacttctttgaggcttttaaaaattacgatgaagctggcaaccaaagacgtatacagtgcctgaagtatcttgttctggcgaatatgctgatggagtcagaagtgaatccgtttgatggccaagaggcaaagccgtacaaaaacgaccctgagattttggcaatgacaaatttgatcgcagcatatcaacgaaatgagatcatagagtttgagagaatactaaagagtaaccggaggacgataatggatgatccattcatcagaaactacatggaagatctgctgaagaaagtgagaacacaagtgttactgaagctgattaagccatacacaaagatagggattccgttcatatcaaaggaactgaacgtgccagagacggatgtgacggagttactagtgtcgctgatactcgacagcagaatcgatggtcacattgatgaaatgaaccgttacttactgagaggcgacagtggcaatggaaggaagttgcataaggcggttgataaatggaactcacagctcaagtctctttcttcaaatatcaccagccgagtctgttaacttggaaacctctcttttggatagattttgtgatttggcgttgattctttgtggattatctgtttctcttcacatagctggatttgatggagtttataaaccacttcaatgccaagaaaaaggatttgaaactcaaaaacattctcattaataaaattgatttcttaactttgcagct

SEQ ID NO: 1029 - DNA, 1284 bp, Arabidopsis thaliana
  Clone ID: ARATH-23APR03-CLUSTER4967_1
attaattgatttggtctttggttcttatcataattctttcgtttggcctttgatcctatcataagctttttttcgtttatcaatcttctcgattcagccacaattcttgtttctcagataattcatctcctttctttgattcgtttccttctcttctgtcactcagatctagatctagatctaggtttttttctttctcatcggaaatttgacttagaggcttgttttgatctagggtttggtctttgggaattttgaaaaaaaaaacaaaattaggaatgaatctatgagctactcaatcctgtttcgtcggattcgtattctacactctttctccgtcgtttacctctactacacctacgttttctcatgaagtaatcgttctcgatctcagttttcgtttttgatctaacttattctttgatagatttagaaatcggggattttcagattgtgtctttgagaggtttttataggaaaatatctctagaagaagaagaggaaaattataaaggttaaatggggtctgtgcaaatgcaaacaagtcctgaatccgataatgatccgaggtacgccacggtgacggatgagaggaagaggaagagaatgatctctaacagagaatctgctcggaggtcaaggatgaggaaacagaagcaacttggtgatttgatcaacgaagtcactcttctcaagaatgataacgctaaaatcactgagcaggttgatgaagcttcaaagaaatacattgaaatggagtctaagaacaatgtcttgagggcacaggcttcggagttgacggataggttgagatcattgaactctgtgcttgagatggttgaagaaattagtggtcaggctttggatattcctgagattcctgaatctatgcagaacccttggcagatgccttgtccaatgcaaccaatcagagcttctgctgatatgtttgattgctgaagatggatgattcatatctgaaggatcaaaaatgaagcattgagttcgagtctttggtctgttttacttactgtccttgttgtaacaattagtgtgtcattggtgaattgagtcttgtgttgtcaatggacaacgcaatctttatgcaatttcaatttgttcgtgtctttgtatggttttgtagcctcagtcctctagtcttgtgtctcatgtaattggtgtctaatgtgtttcttattgaattcaagctttcttattgaaaaaaaaaaaaaaaatgttatgaaattttggcttttgtattcgtttatggaactacaaattaca

SEQ ID NO: 1030 - DNA, 1982 bp, Arabidopsis thaliana
  Clone ID: ARATH-23APR03-CLUSTER4983_1
tcccctcgtgggccccccaggggccccccccacttccccccgtccgcccctgttcttctggggtttgcgggcccggctcccctttccccccggggcccccgtgtgccccggcctcccccctccctccctctccccccccttagagggggagagctcgccggcgccccccccggggccgccagaccggaggggttggtccccccggcctcagggcaccccccataattcgaacatagtagcccccccccccccccccgatcatcatctgttacttcttagatttgcttatccttcttcactttctcaattttgaatctgagaattcgtgcctccgatctctctccctctcgccgtggatagagatggagagcttaccaacgacggtctcagggaaatcagaccggcgaggtaggttttccaagtctcagaacacctccaagccctctcttatcttggccttcttctcttgtcttgcttggctctacgtcgctggccggttatggcaagatgcgcagtacagagcagcactcaatactgtgcttaagatgaattatgatcagaggcctaaggttcttacggtggaggacaaacttgtggtccttggatgcaaagatcttgagaggagaattgttgaaactgaaatggagttggcacaggcaaagagtcaaggctatcttaaaaaacagaaaagtgtctcttcttcagggaagaaaatgctagctgttattggagtttacacaggctttggaagtcacttgaagcgcaataaatttagaggctcttggatgccacgagatgatgctcttaaaaaacttgaggaaagaggagttgtcatacgctttgtgattggtcggagtgctaaccgaggtgatagcctagatagaaaaattgacgaagaaaatcgtgcaactaaagactttttgattcttgagaatcacgaggaagcccaagaagagttaccgaagaaagtgaagttcttctacagtgctgctgttcagaattgggacgcagagttttatgtcaaagttgatgacaacgttgacttggatcttgaggggatgattgcgcttcttgaaagtcgtcgtagtcaagatggtgcttacattgggtgcatgaaatctggagatgtgattactgaagagggaagtcaatggtatgagcctgagtggtggaaatttggggacgacaaatcgtatttccgtcatgcaactggttcgctggtaatactctcaaagaatctggctcagtatgtcaatataaacagtggattgttgaagacatatgcgtttgatgataccaccattggatcatggatgattggcgtccaggcaacatatatagacgacaatcgcctttgctgcagcagcacaagacaagaaaaagtgtgttccatggcatgatcactgcatagatgatcctcttgtcccagagcaaagacggcggtttctcatcgcattcatggcgctccgatactcttttggggcagattcttggaccggatactgaacttatcattagttttgttagaatgggagtatgattaggccattcattacagtttatgattagaggcatgcgtatcccttgagctttggagtaagaaaatggggaaatggtatagatgtgaatgaagtataatttttcctttggtatcatatcaccatcatttgtccgtccattctagcccaatctctggcaggcgtttaatgttcgaaccttaagtttgcatttttggttgctggtttttaaaaatgtgttagttaagacttaagaggacaaaagaaaatcgtctgctttaagctcataaacacttcggaccaatacgtggttaaaaatacttcattgacaaaaaaaaaaaaaaaacgggcccccgcgtttttaaaaaagcgggggggagtggaaaaaaccccgcggggggcccccaaaatttaaatcggctctgggaaaaaaactccccctttttgcgggaggggtggggaaaa

SEQ ID NO: 1031 - DNA, 1806 bp, Arabidopsis thaliana
  Clone ID: ARATH-23APR03-CLUSTER4986_1
gcaccaggtcccccccccccccccgagtgaggatacaaagactctaaataagtcggaaggttctaactctacctggtacatcttcgtagctacaaaacaaaactcgccgagacattaaccaaatgacaaatacgaacacactcttcctcagacatgatgatgattcagagattttgatttttcaagaaaactctgtttttcctctttttgtttttgcctcttggggcatttggagagcaatggcgacttttgctgaacttgttttatcgacttctcgctgtacatgcccttgccgttcattcactagaaaacccctaattcgtccccctttatctggtctgcgtctccccggtgataccaaaccattgtttcgttccggacttggtcggatttctgttagccggcgtttcctcacggccgttgctcgagctgaatcagaccagcttggtgatgatgaccactcaaagggaattgatagaatccataacttgcagaatgtggaagataagcagaagaaagcaagccagcttaagaaaagagtgatctttggtattggcattggtttacctgttggatgtgttgtgttagctggaggatgggttttcactgtagctttagcatcttctgtttttatcggttcccgcgaatatttcgagcttgttagaagtagaggcatagctaaaggaatgactcctcctccacgatatgtatctcgagtttgctcggttatatgtgcccttatgcccatacttacactgtactttggtaacattgatatattggtgacatctgcagcatttgttgttgcaatagcattgttagtacaaagaggatccccacgttttgctcagctgagtagtacaatgtttggtctgttttactgtggttatctcccttctttctgggttaagcttcgctgtggtttagctgctcctgcgcttaacactggtatcggaaggacatggccaattcttcttggtggtcaagctcattggacagttggacttgtggcaacattgatttctttcagcggtgtaattgcgacagacacatttgcttttctcggtggaaagacttttggtaggacacctcttactagtattagtcccaagaagacatgggaaggaactattgtaggacttgttggttgtatagccattaccatattactctctaaatatctcagttggccacaatctctgttcagctcagtagcttttgggtttcttaacttctttgggtcagtctttggtgatcttactgaatcaatgatcaagcgtgatgctggcgtcaaagactctggttcacttatcccaggacacggtggaatattagatagagttgatagttacattttcaccggcgcattagcttattcattcatcaaaacatccctaaaactttacggagtttgatgatctaccggaaagaccatatctttaggaaacttacaagcatatccatggtaagatccggcaatgtagctgtgaaacaaatggtgcagtgttctctgttgctacctttgaaagatgcagaggatttgaaggtgaaagcagagccttggtctttttatctgattgcagccggtttgatgcttcttcgttcgatgtaaaaaccggtttggtttatgtttgatatagttgacccagaagggcagtctttactctttaggggtgcataatttggtagttatacggattattatttttagacaaattatcttaggaactctttattcttatgaaaaagggaaatgtataaagttttgacttcccttattaaactaaaaaaaaaaaaaaaaactag

SEQ ID NO: 1032 - DNA, 1893 bp, Arabidopsis thaliana
  Clone ID: ARATH-23APR03-CLUSTER5005_1
attcctttttaacaatcttctgcattttcgaacttgctttgctgtgataaagttctctcctttcctttctaaaggaagaagaaaggctttatctctcaaaaccctcatccacaaaatcccctttaatccgctaatcagagggtttttctgtttttgtgttgcttcgttactacggttacattcttctcttccccttttgatttcaaaggtacgatctttatcctcaattgcgtttcgatcgtatctcaaattctcttcgatctctgacagaaagtttccaactttagtgaatcgcgaaattgggttcgtgtttcttgctctgatttcggtgtaacccttcaatttcagaaccctcttgataccttaagaagaggcaatttgaagttttcttcacagatccgtcttagctctttctagagaatggcggatttgataccattttatctgaatattgtggcgtttctatgtactgttggagctattgctttggcgatatttcatatctacaggcatcttttgaattacacggaaccaacttatcagagatatattgtacgcattatcttcatggtcccggtttatgccttcatgtcattcttgtctcttgtgttacccaaaagctcgatatattttgattccatacgagaagtatatgaagcatgggttatctacaattttctatcgctgtgtttggcatgggttggaggcccaggatcagtagtgcttagtttgagtggtcgttctttaaagccatcatggtctcttatgacatgttgctttccgcctttaacactggacgggcgatttattcgacgatgcaagcagggttgtctgcaatttgtaattcggaagcgtgggctagttgctgtcacacttgtgctttatgcaaaagggaaatacaaggatggaaattttagccctgatcaatcctatctctatcttaccatcatctatacaatatcatacactgtagctctgtacgcgctggtcctcttttatgtggcatgcagagatctgcttcagccattcaatccagtcccaaaatttgtgattataaagtctgtggtctttctaacctattggcagggtgttctagttttcctttctgctaaatctggatttataaagaatgcagaggcagcagctctttttcaaaattttataatatgtgtcgaaatgctcattgctgcagcttgtcatttctatgcttttccatacaaggagtatgctggtgccaatgttggtggatctggcagtttctcaggaagcttatcacatgctgtaaaactaaatgacttttaccatgacactgttcaccagtttgctcctacctatcacgattatgtgctctataaccatcaagatggtggtgacgaggggacaaagaagtaccgatcgagaacctttgtgccaactggccaagagatggatgcaatgagaaaaaacaaacctgtgtatgcaaacaagatagatggtgtttcagtctcaagtagtctatcttcagaggcaagctcacctaaaagctccagcgtaacttctgatcctgcacgctctgatgctgtgaaatcttccttgctggtggatgcctcagattctcttgaaacaatgtatgatatgtcgctcattgacattgatctatctagtttccccagcaatgtcccatctgcaagtgaaagtgggcctagataggagcagagaaaatgtagaaatcaccattaacaggtacaaaacatgctcctaatagttgtattcagatgaatcttctgaggtgtgttcttagttggaagatgttgttagttggagacttgaggataaatgaaaaaagcttataaacccatttaccttttgtagctttatacaatgagtcttctactgcaaaaaaaaaaaaaaaaa

SEQ ID NO: 1033 - DNA, 1429 bp, Arabidopsis thaliana
  unsure (1)..(1429): unsure at all n locations
  Clone ID: ARATH-23APR03-CLUSTER5040_1
anatcattcattcacacaaacacttcaaacaatgacttgccttcttcttcttctcctcctcctcctcttcctcttctcctctgccgactctctgacgtcaccatccgacgtgtcagctttaaaagctttcaaagccaccgtgaaacccaactcaatcccaccgtggtcttgtctcgctagctgggactttactgtctccgacccatgtgcttcaccacgtcgaacacatttcacttgcggcatcacttgctcgtctgactccacacgtgtgacccaactcactctcgacccagccgggtacacgggtcgtctcacgcctctcatctccggcctcacagagcttctcacgctcgatctcgccgagaacaacttctacggcctaatcccatcctccatctcctccctcaccagcctcaagaccttgatcctccgatccaactcgttttccgggtcattacccgactcagtaactcgactcaactcactcgaatccattgacatatctcacaactctctcaccgggccgcttccaaaaacaatgaactcgctttcaaatctccgacaactcgatcttagctacaacaagctcaccggagccatcccaaagcttccgaaaaacctcatcgatttagctttaaaggcgaatactttatcaggacccatctcaaaagactcattcaccgagtcaactcagctcgaaatcgtcgaaatcgctgagaactcattcaccggaacactcggagcttggttcttcctacttgaatcaatccaacaagtcgatctagcgaacaacactctcacaggcatcgaagtcctccctccaaacctcgccggagaaaacaacctcgtagctgtagagctaggattcaaccaaatcagaggaaacgctccggcgagtttcgcggcgtatccaagactttcttcactatctatgagatacaacgtgcttcacggtgttataccgtcggaatacgaacggagcaagacattaagacggctttacttagacgggaacttcttgacgggaaaacctccggcgagatttgtgagaacagacgcagaagtaatgggaagtttggggaataattgtctacagggatgtccagggaaagctaagatgtgtgctccatcgcagaaaccattttacatttgtaagcaagcttatggtggaaaaccaaagtcttagttttgtcggtgtcggtgactttttgtgtcagtgattttgtaaaataatgcttttagtcatgagtttactctatagtcttggagaaatactaatatctatattcatcgagatcttcgtatgtacacaaataaatttacaaaaattggaacggaacttatagtatttattttgttgtattgtgtgtttttatatatttattgagatttaaattaaaaaaaaaaaaaaaaaaaaccnttnngcttt

SEQ ID NO: 1034 - DNA, 2094 bp, Arabidopsis thaliana
  Clone ID: ARATH-23APR03-CLUSTER5041_1
atttttaccaaaatttctgtttcttcaaaggattgaactttcatatttctctcttgcccagttctgagttattgcaatcagaagttgtaaacacttttcctgtctctttctgctacccgaatttatcttctttagcgtctgtctctttcagcggacgtgtcttgtctctttaagatttcaagcaatctatgaattcgacggctgatgttaatccagagcctcctagattagcttatttaatatcgggaacaaaaggcgatagtcataggatgatgaggactttacaagctgtgtaccatcctagaaaccagtatgttctgcatttggatttgaaatcgatttggagattagatctgactcagcttcgactaaaagccattgctttcgcctttggattgttgattccctagtggatgttctttatctctttaaaaaggtcctctcttttaaatcaatttttgctgaacttgcccaattcggaaactttgttgcaagtctcctcttggtctctggtaatcgttttcgcatcaatccttatattgatttgaatctgtaatcagattcgatctttgatgctaatttggtattctatagaagacaacatatctgaattgggtttcttcgttggataggataagtggttagggaatgagaaaattgtataggaagctggtttcattcagagacccatttgctagggtcaagagacatgttagttcacattcagggtttagagctttcagcgacagaaaatggttgttcccttttctagctagcttgatcatgtccattactcttctgattttgttaatttctggccaattcgacaacttctttggggaagaagatcaattaccagttgatgttgtttcagagtctaatgactactttgtagaatcagatttcaagcaatctatgaattcgacggctgatgttaatccagagcctcctagattagcttatttaatatcgggaacaaaaggcgatagtcataggatgatgaggactttacaagctgtgtaccatcctagaaaccagtatgttctgcatttggatcttgaggctccacctcgagaacggatggagctggccatgtccgtgaagactgatccgactttccgtgaaatggagaatgttcgtgtgatggctcagtctaatcttgttacttataaaggccctacaatgattgcttgtactcttcaagccgtttcaatcttgctaagagaaagcttacattgggattggtttcttaaccttagtgcctcggattatcctctagtaacacaagatgatttgttgtatgtcttctcaaatctgtctcggaatgtcaatttcatcgagaatatgcagctcaccggatggaaactgaatcagagggctaaatcaatcattgttgatcctgccctatacctatcgaagaaatccgatatcgcttggactactcaacggcgatcacttccaaattctttcaggctattcactggctcagcttggataatgttgactcggtctttcctcgagtactgcatttggggatgggataatttcccaagaacaatactaatgtactacacaaatttcgtatcttctcctgaaggatacttccacacagtaatctgcaacagcaaagagtttatcaacactgcaatcggtcacgaccttcactacattgcttgggacagtcctccaaagcaacaccctagatctctctcgttgaaggattttgacaatatggtcaagagcaaagctccatttgcacgcaagttccacaaaaacgatcctgcgttagacaagatcgataaagagctattgggacggacacaccggtttgcaccaggaggatggtgtgtcgggagttcagctaatggcaatgatcagtgctctgtgcaaggtgacgactcggtgttgaaaccaggacctggttctgagaggttgcaggagcttgttcaaacactttcctctgaagaatttaggcgaaaacagtgttcttgaagttatctactgatgacgcaaaatataacgttgtacagtatattgttttgtttgattataaatttttggttatagaaatttcttcgaaaaaaaaaaaaaaaa

SEQ ID NO: 1035 - DNA, 1201 bp, Arabidopsis thaliana
  Clone ID: ARATH-23APR03-CLUSTER5054_1
cgtgtcgtcaatcttttcgatttctcttcctctcgtctctctctctgttaacaatggcgacgactagtttagtgaccggactaaaagtggtattaccggttatgttctgtctgatgctagcgactcttgttcataccatcatcaccgatgtccacccttgacctgatcgtttagatgtcttcacacaaagtgttgttacggcatttttggatttcgatattaatcatgtacctctacaccatcatcaccgatggccttcctttacctgatcgtcaagatgtcttcacaccatggttcgttacgacaattttggatttctacattaatcttgtacctatagcggtttggattgtgtataaggagtctacatggtctggttcaatactttggaccattttgctcatcatttttggcagcctcacgacatgtgtgtatctgtttctgcaacttctcaagctgacaaatcaagaagcttcagaagatcctatgtactatttgttacttcgagattcaatcaaggatggagttggtctgagagacaagaattcacttgttgtcactgcaagatttgtgtttggtgccttaggatgtgtgatgctaggagctttggtttacacttgcttcacttatggttctcctttccacatggagcttctatacccgtggatggtggttttattggttaacttctacattgatgttgcagtcttatcagtttgggttgtctataaagaatctagtttgatcattggaattctatgggttgctctattgataggacttggcagcgttggcacgagcgcagtcattgtcgtgcagctattccgtctgtctcctctcgacccgctctacctcgttctagtgaacaacagcaatcgcaaagttaaaagtaaaggctaagttagtgaactctctcatgggtcaatggcagggctggagatatgtacgagcgcactcattctgcggctttgcgtataatgtgaagctttgtcatttcatttttaacattttaccacaaaagttcaaaacatatttttatctacattttaagtttgtatgtttcatagttttcttctgtatatactttctcttatgtgacgacaattacttatgtacttaacttttttgggtcacgacttgaaaaaccacatatggattgagactttttgaactaaaaaaaaaaggaaaaaaaaaaaaaaaa

SEQ ID NO: 1036 - DNA, 1188 bp, Arabidopsis thaliana
  Clone ID: ARATH-23APR03-CLUSTER5056_1
gcacgagatcatatcgaaatttctagggtttctttttcctccgccggtatttcattgtccatcaccaatcgccaaaaccgcagaaaggtctgacctttggattagcgtgagagtttcacaatgaaagatagagaaaacgatggaaatcttgagagcagaatcttcgtgggagggttatcgtgggatgtcacagagagacagcttgagagtacctttgaccgctacgggaaaatcactgagtgtcagattatggtggggagagatactgggcgtccacgtggttttgggtttattacattcactgatcgcagaggagctgatgatgcaattaagcacatgcatggaagggagttgggcaataaggtcatctccgtgaacaaagctgagcccaaagttggtggagaagatgtagaccaattaaagaaaggtggaggctattcatctcgagggaagggaaccgaggatgagtgctttaaatgcagacgccctggtcattgggctcgagattgcccatcaactggtgacgatcgagaacggttcagagttccccttgcgatgcgctctcgtattggagacatagatggacaccgagatcgctatggagatcgtgatctggagagggagcgggagcgggagcgtgagtttgaccgctacatggatggacgccgtgaccgagatgggggacgatatagctacagggaccgcttcgacagtggagacaagtatgagcctcgtgatcactatccatttgagagatacgcaccaccaggagaccgttttgtgagtgataggtatgggatgcctgaacatcatcttgagaatgaatatcgcgggagagagagaagctatgacagggacagatacgcaagggatacaagtgacagatatggagatatgggaccgatacgcgatgagggaagaccctacagaagcagaccaggtccttatgaccgtcctagccgtcctggaggcagaccttcatcatatgaacgttggtagtttgttttggttaaccagatgtcaatgcttatgctttgggatttaggtctatatcagagatagaactcgaactcgagatctctgttatgcttttttgtcgaatattatgattcttcatcgcagtaaaaaagttatgttcttatgatccaaaaaaaaaaaaaaaaagggcggccaaaaaaaaaaaagaaa

SEQ ID NO: 1037 - DNA, 1921 bp, Arabidopsis thaliana
  Clone ID: ARATH-23APR03-CLUSTER5060_1
gaagacctccgccgagccctatcatcactctgagctcaaaatcatcttcctcctttctcaatccaaatcttcttcttaccaattctttttcttttcaaagtttcataaacagattacaccaaatcccaattctccgtgacacagctttctccttttttgggaatcatttgttaactttcccggagaaaaaaaaatcaatacttgcatgctcttaagactctgaaatgcaatcatcgcatcgaattttgtctcgcctccttcattctcctagaaaaggttacatcagagcaagtgtcggtggctctgttcactttttggcgctattcgacgagaaagacaatggatttgtagatactactcatcggagttttagttctcttatccgttccagttctcacgtaagagggcttatctccaccaattgtttaaataaaggtcttggtgtgcgatgttctgtttcgcttgatagggaaacacctttaattgatacctactcctctcaccggaatttcttcactcgggcgaaacaagtgaagagaattgagatcaatgatcaacacagtcaaagagctgtcactactgcactatggtgcaacttcctcgtgttttcactcaagtttggggtttggtggacaagttctagccatgtcataatggctgaagtagttcactccgtagctgattttgctaaccaggcacttcttgcttatgggctcagtagctcaaggcgtgccccagatgctcttcatccctatggctactcaaaagaaagatttgtatggtctttgatatctgctgttggcatcttttgccttgggtctggtgctaccatagttaatggagtacagaacttgtggacttcttcgccacctccgaatatggaattagctgctgtggtaattggtggttcttttctaattgaaggcgcttccttactcgttgcaattcaatctgtcaaaaaaggagctgctcaagaaggcatgaccataagagattatatatggcgtggtcatgatcctacttctgttgctgttatgactgaggatggcgctgcagtggcaggtttggcaattgctgccgcatctcttgtcgctgttaggatgacaggaaatcctatctatgatcctataggatcaattgtagtcggaaatttacttggaatggttgctatatttctaattcaacgaaaccgacatgccttgattggaagagcaatggatgatcaagacatgagtaaagttcttaaatttttgagaaatgactcggttgtagattctttatatgactgcaaaagtgaagtgattggtcctggatccttcagatttaaagctgaaatagatttcaacgggcagatggttgtccaaaactatttgaagagaactgggcgtgaagagtgggcaaaaatgtttcgcgaggctgcaaagaacggagatgattctgcaatgctcaatattatgtcaaactacggtgaggaagttgtcacggctttaggaagcgaagtagaccggttagagaaagagatccaagagcttgtcccaggaatccagcatgttgacattgaagcacacaaccccacacccacagacccatctctttgatctaataaagaaactcgcttaattcaaggtcggattatcgatacattcttttgttccattctcttggcctgaagaaatgcaagccacaagtaagattgtggtaaatcctggcctcttggagaaatagaagtgttacagttgtgtgatagggaaaaatttgcaaatggattcttctcatgagtgttgttgatgttatattctatgcacacaacaacaaaaaaaaagcttgttacttgtaggaacattgagatgtaagatcgatattattttatatgtacacgatactagtgttttggtaaaaaaaaaaaaaaaaacccaatcgt

SEQ ID NO: 1038 - DNA, 2296 bp, Arabidopsis thaliana
  Clone ID: ARATH-23APR03-CLUSTER5068_1
ggtgagagagagagagagacagataggaatctttgagcgattcgtcttcctcctctatcgccctctactcttcaccggaactgtgatctcaccggaatatccctcctttatttatcctctactcatccgttttactctctccctccgtcgatcttctctttctcttgatcgcctccgtccattctttatcatttcttaattcagaattgtgatcgatggatgattattttagcgcggaggaagaggcttgctattactcctccgatcaagattctttcgatggaattgataatgaagagtctgaattgcagcctctgtcctctaaaagatcaaacactcaggtcatcactcaggaatcgcttctagcagcacagagagaagatttgctaagggtgatggaattgttatcaataaaggagcaccatgcacggactcttcttattcattaccagtgggatgtggagaagttgtttgctgtgtttgttgagaaaggaaaagatagcttgttttctggagctggtgtcactgtcttcgattatcaatatggcaactcttcctttcctcagtcttcacagatgagttgtgatgtttgcatggaggatttaccaggtgatcacatgacaagaatggactgtggccattgcttttgcaataattgttggacggagcattttactgtgcagataaatgaaggtcagagcaaaaggattagatgcatggctcatcaatgtaatgctatttgtgatgaagatattgtcaggagtctagtcagtaaaaagcgtccagatctagctgcgaagtttgatcgttaccttcttgagtcgtacatcgaagataacagaatggtcaagtggtgtcctagcactccgcattgtgggaatgctatacgagctgaggatgacaagttgtgcgaagttgaatgttcttgtgtcttcagttctgtttcagttgtctgtgtcaagcccactccccttgctcttgtttgatgtgggagttatggagaaagaagtgtcgagatgagtctgagacaatcaactggataaccgttcacacaaagctgtgtcccaaatgttacaaacctgtggaaaagaatggtggatgcaatctcgtgaggtgtatttgtgggcagtgtttttgttggctatgtggtggagctactggaagtgatcacacttataggagtatcgctggtcacagttgtggtcggtaccaagatgacaaagagaagcagatggaaagagcgaagagagatttaaacaggtatacgcattatcatcaccgatacaaagctcatacagattcatcaaagctagaagataaacttagggatactatccatgagaaagtgtcgaaatcagaaaagagggagttgaagcttaaagacttcagctgggtcaccaatggactcgaccggttattcagatcaaggcgagttctttcatattcgtatgcttttgcatattatatgtttggtgaagagatgtttaaagatgagatgacccctgaggagagagagataaagaagaatttgtttgaggatcagcagcaacaacttgaaagtaatgtggagaaactttcgcagttccttgaggagccctttgatgaatttagtaatgataaagttatggcgataaggattcaaatcatcaatttgtctgtcgccgtcgatacactctgcaagaaaatgtacgagtgcattgagaatgacttactcggatctctccaacttggcatccacaacatctcaccttacagatcgaagggaatcgaacaagcagctcagttttatgcttcctggaattccaaagatgctgacaaattccaacctttggatagtggtacaagcggagtgacatcgaggcctgagcaagcttcaggatcaaggagctcggaagacaccatttgctcatcttcacagaaacgtcccaaaaaagaaggaagtttcttaaacaacaaagtcactttattggatttgaacttgccagctgatttcgtcgaccagaactgaactcaaatcctctcttgcttagtccaaatgagatatgatgacatagcaaaaggtgtttgactatatatctatcaccttcaagactcgtgactctggactgattaatttgtctttcttatagtttttctggttttcgtacaactataattatgactaccccttacttttgcttctttagttatagatctttaattcagcctctttaaactctgctgcttctcaatgtctatgatgtcaaaagagttattttattagtaactaatttaataactaaaaaaaaaaaaaaaa

SEQ ID NO: 1039 - DNA, 1729 bp, Arabidopsis thaliana
  Clone ID: ARATH-23APR03-CLUSTER5071_1
gcacgagattaaactgaaagttaggacctttcatttccaatctctaaacccatttctctacgattagagaagctgacatcaaaattgaaacttgggaaatttttggatttgttcttcttctatggcaactgaagacgatggtgaattgtcagctcgttaccagaacacgttggatgcattgtcgtctttgatcacaaaacgtggccgtttagctagtaacaaccaatctcaccgattccgtttgctctttcattatctcaaggttcttgagcttgaagatgcagtttcacaaatgaaaatcattcatgtggccggaactaaaggaaagggatcaacatgtacatttgcggagtctattcttcgttgttacggtcttcgaactggtctcttcacatctcctcacttaatcgatgtccgagagagattccgtcttaacggcattgagataagccaggagaaatttgtgaactacttttggtgttgctttcataagctcaaggagaaaaccagcaatgaggttccaatgcctacttatttctgcttccttgctttattagctttcaagattttcacaacagaacaggttgatgttgttatactagaagttggcttaggtgggagattcgatgcgactaatgtgattcagaaacctgtcgtctgtggtatttcttctctagggtatgaccatatggagattcttggatacacacttgctgaaattgctgcagagaaagccggtatcttcaagagtggagttcctgcttttacagtggctcaacctgatgaagcaatgcgtgtactcaatgaaaaagcttcaaaattggaggtgaatcttcaggtggtggaaccgttggactcaagccagagactcgggcttcaaggcgaacatcaatatctaaacgctggtcttgctgttgcgttgtgctctacatttcttaaagagattggtattgaggacaagaatggtttggatcagacaaacggtttacccgaaaaattcatctctggattgtcaaatgcttatttgatgggacgagctatgatagtgcctgattcagaactccctgaagagattgtgtattaccttgatggagctcatagtcctgaaagcatggaagcttgcgctatatggttttcaaaacagatcaaacaaaaccaagaaagaaaccagaaaagatcagagcagatactcttgttcaattgtatgtctgttcgtgacccgagtttgcttcttccgcgattaaggagtaaatgcattgatcaaggagttgatttcaagagagccgtttttgtgccaaacgtatcagtgtacaaccaagtgggatcttcgacaaacgttggcacacgtgtcgagtcgatgtcgtggcagttcggtcttcagaggatttgggagagtttagctcgaggtgaagcaaaatctaattcaaaaagtgattctaaaggcaaagaagaagagaagagtttcgttttctcgtcacttcctgtggctgttgactggctccgggacaatgctcgccaaagtaaacaagttcgttttcaggtgttggtaactggttcattacatttggtgggtgatctcttgagatttatcaagaaatgaatatgtttctgccatgtattcttggccaatctttgcctgtaatgactatatatctcacaacatgatttaacaaaagaaaagaaaagatatttcgacaaaaaaaaaaaaaaaaaaaaaaaaaaaaaaaaa

SEQ ID NO: 1040 - DNA, 1920 bp, Arabidopsis thaliana
  unsure (1)..(1920): unsure at all n locations
  Clone ID: ARATH-23APR03-CLUSTER5084_1
cgcgcggccgactcttcacctaaacagcatcaatggcgacttctctctccgtttctagattcatgtcctcctccgccaccgttatctccgtcgctaagccgttactttcccccaccgtatccttcaccgcgccgctctccttcacacgctctctcgctcctaatctctctctcaaattccgcaaccgccgcaccaattccgcctccgccaccaccagatccttcgctacgacacccgtcaccgcctccatttccgtcggagacaagctcccagactccactctctcctacctcgatccatccaccggagacgtcaaaacagtaaccgtctcatccctaaccgccgggaagaaaacaatcctattcgccgttcccggcgcattcacaccaacatgctcacaaaaacacgtccctggattcgtatccaaagccggagaactcagatctaaaggcatcgatgtaatcgcatgtatctccgtcaacgacgcgttcgtgatggaagcgtggaggaaagatcttggaattaacgatgaggtaatgttgctatccgatggaaatggcgaattcacagggaagcttggtgttgaattggatttgagggataatcacacactcttcacctaaacagcatcaatggcgacttctctctccgtttctagattcatgtcctcctccgccaccgttatctccgtcgctaagccgttactttcccccaccgtatccttcaccgcgccgctctccttcacacgctctctcgctcctaatctctctctcaaattccgcaaccgccgcaccaattccgcctccgccaccaccagatccttcgctacgacacccgtcaccgcctccatttccgtcggagacaagctcccagactccactctctcctacctcgatccatccaccggagacgtcaaaacagtaaccgtctcatccctaaccgccgggaagaaaacaatcctattcgccgttcccggcgcattcacaccaacatgctcacaaaaacacgtccctggattcgtatccaaagccggagaactcagatctaaaggcatcgatgtaatcgcatgtatctcagtcaacgacgcgttcgtgatggaagcgtggaggaaagatcttggaattaacgatgaggtaatgttgctatccgatgggaatggtgaattcacagggaagcttggtgttgaattggatttgagggataagcctgtgggacttggagttaggtcaaggagatatgcgattttggctgatgatggtgttgtcaaagttctgaatcttgaagaaggaggtgcttttactaatagtagtgctgaggatatgcttaaagctctctgattctgatgattttctcatcactttcgtcttcttctctgttttaaattttctttactctgtgtatttgttttgttttgtgtttgctgttttctctaaatctacgaatcattatcggatttgtaatggaataatgaatttagaggttctgttgtttgtgaacattttggaaaaaaaaaaaaaaaaaaaactcgagggggggcccggtacaccccatttccccctaaaggggggggataataaaacctccgcggggccgccctttttcaacccgccgggggagggggaaaggcccccgggggtcaaccccttcggaccacacccccccgggccccaggcggggcccccccctttttggccccccgccggggcccctttccgaaattgtggcccccccccccccggaagcccccccccccccccctcaaattttggggccccccccccgttgtgggggggggggagcccnaggagacgattatgtgcccccgcccttaaaatttttttttttttaaaaaaacaccccccccccatttttttttttttgttaaaaaaaccccccctttttttttttatacacacaacg

SEQ ID NO: 1041 - DNA, 973 bp, Arabidopsis thaliana
  Clone ID: ARATH-23APR03-CLUSTER5128_1
aaaaacctcaaaacaaactgtaaagtttattaagaaataataatgaagacattagttgtgaaatgtttccttctattggctcttgtatgtagctgcagagcagcagattcaatatggcaactctgcaacacaaattcaaacatctcagcaagcagccaagtctccaagaacatcgattctcttctcgcgacgcttgtctcaaagactccttcaaaaggtttcaagaccacaacttcttcaagttacaacaacaaagagaaagtgtatggacttgctcaatgtagaggagatatcagcaataccgattgctccacgtgtatccaagacgcggccaagaaaatccgtgaagtgtgtcagaaccaatccgactcaaggatcttgtacgatttctgcttcttacgttatagccaagagaatttcatagggaagcttgacacgggggctggtcttatatacttcaacgtcgctaacgtaaccgaaatcgaccccaaaaagttcgataatgagctcggggcactctttgacaaaattaggtctgaggctgttttacctaagaataaaggtttaggtaaaggtaagacaaaattgacaccttttgtgacactaaacggtttggtccaatgcacgagagacttaagcgaattggattgcgctcaatgctttgcaactgcggtcgggagcttcatgacaacttgccacaacaagaaaggttgtcgtgttttgtatagtagttgctatgtccggtacgagttttatccgttttacttccctcttgatccggctaaaaccggtcctagtgttggtagaatttcttccgttcatctctctccgtaatcgcatagtctaataaaagagtaagtttgtttctaaagagtatatgtatatgtgtgcaaaataaggctctttgcttatgtttctttctttaagatgcaagacaattaagtaaccaagttattcaaaaaaaaaaaaaaaa

SEQ ID NO: 1042 - DNA, 2509 bp, Arabidopsis thaliana
  Clone ID: ARATH-23APR03-CLUSTER5146_1
aactaattaaagttgttggtttggtaagagtaccgaaacggtaacgaataataaatgggagacatcattatctctttctctaaatctttccaatggcgtctcttcgtatcctttcgatttggttcttcttcttcttcgtcatcttgaaccaataataaatgggagacatcattatctctttttctaaatctctccaatggcgtctcttcgtagcctttcgatttggttcttcttcttcttcgtcttcgtcttcttaatcaatccctccatttctattcgaacttccttcatcaagcttcccggaagcgacggatctcgctactgcgacagctggagattagccgccgagaccaataacgtcggaacttgggatctgattccgtcaatctgcgtggattccgtcgccgagtatcttaacggagaccagtttttatccgattacagtgtcatcgtcgattatgctctcgcgtttgcgaaatcggttgaaatttccggcgacggcaaggacgtgtggatcttcgatatcgacgagacgcttctcacgaatattgactactacaaggctcatggttacgggtctgaaccgtatgacgataataaatttagtgagtgggtggaacaaggaacagctccagcttttgatgcgagcttgagactgtacaatgctctcaagaaacttggtttcactatcattttgctaaccggtcgggacgagcatcaaaggacttccaccgagacaaatctccgggatgccggttattccggttgggaacgtctcctcttgagaggtccaaatgatcaagggaagtcagctacaaattacaaatccgagcagcgatcgaaactgattgaggaaggtttcaaaatccgtggcaatagcggtgatcaatggagtgacttgcaaggttttgccgtggctgatcgttctttcaaagtcccaaatcccatgtactacattccttgatcactattcatttctgattttatgtattgagtaacaaccacttatgtgttttagacgttaatattacctttgctcctatattacattgatctttagtataaacattaactaatactttcatataaagtataattataattgctttgtatcttccataattacgaccggagaaaagcttaaaagaagctcgtcttctataaccttaaccatcactctttgaggaagactgaccataaccactcggctcattggttccttaccgggcggtgagggaagcactatgacctgtccacctccagctacaggcccttctacatagcaagatacgtggctcagagccaaatcctcctcgaacatcatcggacgtgaatgagacatgttttctaaattagtacacacgagatccgaaccatttgatatcgcaccgttattgctactcaaccactcaatcaagtccatgaccgtgtcgtagtctagtctcttggttatgctctcaatctcttgaacagcgtggaataagagtttatctttggttttaaccggtttggagtagggaaccttgtgataaaccatgcaattaccaaaataactttggtctaaacgcaacaatttcctaacgtctaagcacaaggacatgtccatgagctcgtttctttttcctttggctcgactcacacagacccaaaagagtccagccaaaatctcaaatgtcgaaatccttggctcattctcgccggctctgaccagcggatccgggaacagaaaagtaacggtgaccatatggtcctcggtcatgtttgacggtgaagccgttagagagcaagatttgatgtaatggctaagcagttggttgttagagattagtctttggttggaaaaccggcgaggcggcaacgggtggaatagtggtggagccatcatggaccgagacaaagttaaatctgcccaagctcgaataaacatcattgcacaaactggatcggctaagagatggctacaactcaatccaatagctaacccaccactttcaaactcagttacctgaacacagaaggtagaccaataatattgaagatgatacatgtcttcccaatgaacaagcttgagttcttcctctctatttacactcctaagccattccttaactgacccggttgctctggcctccaccatccccacgccggcgtcgttgctctttaccatccatcgttggcttaaatccttattctcttccataccatcaacttctttaaccagtctcccggttacaatcggataacaattgagtgtgtatgctaatgactcccttaatttttttgtgatttctcccggttctctagtcttggaacaccggtaatagtagactagacgaatgtggtttggttccatgacgtggtccaatactgataactggtataatcgccctggttcaatcgatctagtgctcaccacggttcttttgcatatgaatctcacgcggtcctcctccattattgtcttctctttagcaaacatttttcgttgtattattctttggttagaatc

SEQ ID NO: 1043 - DNA, 1328 bp, Arabidopsis thaliana
  unsure (1)..(1328): unsure at all n locations
  Clone ID: ARATH-23APR03-CLUSTER5149_1
atcttcttcttctctgtttctctaagaagatagaacaatcccaagaatctcctcttatttgatcaaccatgtcgaatgtcttgctacgtatttgcatcgcctaaacctcttggcagattcatcaattcaaagtccggcggacggaaacttttcttctccgtcgttagagcttcttccgatgatgctgtgtgttctgccgtggtctgtgctcccgcgatcgaggtagggtcacggggtatagcctggttggttagtcaacggccctaggtgcattagaagaagatgcctcaccagactcggagtgttcatggttatgatcacaatgatacttgttatcatcttcttcttcactttattttcttcttctctgtttctctaagaagatagaacaatcccaagattctcctcttatttgatcaaccatgtcgaatgtcttgctatccccaaacggctacgtatttgcatcgcctaaacctcttggcagattcatcaattcaaagtccggcggacggaaacttttcttctccgtcgttagagcttcttccgatgatgctgattgtaatgccgaagaatgtgctcccgagaaggaggtaggaacagtgagtatggaatggttagctggagagaagacgaaagtggtgggaacatttcctcctcggaagccgcgtggttggactggctatgttgagaaagatactgctggtcagactaatgtttactccattgagcctgcagtatatgttgcagagagcgcgattagctcaggtactgcaggatcatcggctgatggggctgagaacacagcagcaatcgtagcaggcattgctcttatcgcagtcgctgcagcttcctctatactcctccaagtcgggaaagatgccccaactcgacccaaagcagtggattacagtggaccgtctcttagctactacatcaacaagttcaagccttctgaaattgttcaaccttctaccccctccgtcacagaagccccaccggtggccgagctagaaacttcactgccagaaactccatcggtggctcagcaagaaacctcactgccggaaactatggctagtgaggctcagccagaggcgtcttctgttccaacaacaagtagtacctcttaggggcttagcctaggattatatctttgtgtaaaaatgagatgaagcatataccaagattatgcattctgttaatattcggatatacctatatgtatgtatacactctgtcactcttctctttgagtgaatgattatatcaaatctcaaatcctattaaaaaaaaaaaaaaaaaagggcggccgcnnnnnnnnnnccccc

SEQ ID NO: 1044 - DNA, 2677 bp, Arabidopsis thaliana
  Clone ID: ARATH-23APR03-CLUSTER5183_1
gagggagagagagagggacctcttgcttcttctttctctcacgcacctctttgaagattcttcttctcttaccttttggattcgtctcttcttcttgattttgagtttgattctaattttggatccagagggtttatttatgtgaatgattccgattttggggaacttgttcgtctgaaatgttttgttgaaccggtagcgtcatcggaaagggtaactgcaatgaactctgtatctgtcacccttgcatttcatgtaacttcagactgttctgccgtaaaccaatgtcggataaatgttaagtgtttggtttcttgtatgcgggtcagtaagcaagcaatgcacgagttgtggatgcctgtgactgatacataattctagatttttatttattgttctgttagagatagagttagtcagtattgtttattttcaaggatttggtagtttctagggagtttttagataattagggatttggaaactcacatctcagaagtgaccataaacccttttacttgataagagcattagttatgggtctgccacagactgcttcaagtgaacaatcccaggaagctttgtctactccaagttgtagcctttcgcaaagtctgcctgtgtatgctacttcccatgattcagatgttcttaacagtggaagtgaggaaggaatttgctcttccattgcagagtttgatagaaaaacatcattggagcctctggagttcactgatgattcgtgtagattccgtgggacttgtgttgttacctcatcaagtgctcatggatcgactagttatgctgcaggtaaggttagttcgagtcttactggagctagaaggatagttggttttgcgtcaggcgaaacaagctcactggacaacaaacaaacgagtgtcgctgttgatcactctctatcatccactgttggagttgcaggagtagatatcggtggagcattagtcaggaaacgagtactctcccccttaaatactcttttccctgtcaaattcagaggtgacctgcatgatatcagctgtggtaaccaccaacaaattacttattctggtcagtctaatggattctgcaactctgtcgcacaagatcacataaaggctaatacccctagtaggttacatctctccactactcctacaaccacaagttgctgggagtggaagaatgtctcaaacagtggtagactctcgtctatggtcttcactgatggtccattgcttgactctgtagatctccgccaacccgtcaaaggaggtgaggtttgcttatattccccactatatgaaacgtctagcacacccaataagcccttaccttgtgataaggaaatatctgtctctccgccgctttgtctgtcaccacttggtccgaagttttctgagagagtaaaagctgtaagaagttgccaaactgggaaaatactggaagatttaaggaatatcagtgaagaagcagaattaagagttgatcgtagattgtttgatgatgcatatgccattaggagagcgttttcaatggagagaagtactgaatcagctcctgcatctccatgtaaaaggttcattagaagcttgagtggacggcctattcagaggtcattggttggttcttttgaggagtcactcttgacaggacgattgtcatgcgggccaacaaatcagaagattgacggctttcttgccgttcttagtattgctgggggaaacatctctccaaaatcacagaagcttccattctcagtaactagtgctggtgatgattgcctcttgttatactacgcctccatagatctcgctggaggatctaaattgaacaaattctggggccaaaaagtgaaaacaagtcaaatgaactctgatgcccagagttcgaagagccaactgcggatccccatgaagggtcggattcaactggttcttagtaaccctgagaaaacacctcttcacaccttcctctgtaactatgacttgactgatatgccagctggaacaaagacgttcttgcgccaaaaggttacactgggatcatctaatccaactagtgaagcaacgcaagagaacactagaaaagccacaagcttggaaaaagaaaactctaaacatggggacaaagagagttgtgaaggatctgattcagtagattcagtggaaggagatgtgttgcatgaaagtggaaaaatctgtttaaagccgtcgaaagaatgtaacggtggttctggtgctctacgctacgctcttcatctgagatttctttgcccattacctaagaaaagttcaaagaaatctgaagaaaccgaatccacggggcaaaagaaaaacttggattcagatgggaagaggagattctatctgtacaatgacttaagagtcgtgtttcctcaacgtcacacagattccgatgaaggaaagttgaatgtcgagtaccattaccctgaaaacccaagatacttcgacatcaccgagtgagaacttaacttcatggttacacaagctcaatgattttcttgtttaagaagaaatcaatggactttttctgtacatacaaatttatagtcacaaatcagaatggctctgacccactttgtacagtttaccatttccgggttctcgtaaaactgaataataataaaaccgagtttctaaaaaaaaaaaaaaaa

SEQ ID NO: 1045 - DNA, 1427 bp, Arabidopsis thaliana
  Clone ID: ARATH-23APR03-CLUSTER5203_1
aatgttctaccaatcgtcgtcgtctctaatcgaaccatccaagacccgaattggatggattgggatcgggataatgggatcagcgatggtttctcatatcctcgccgcagtatattcagtcaccgtttatgctcgcgatcttcgtaaaacaaaggatctgcaaaccaaaggaggtcgtaccgccaatagccccaaagagttaggggagatgagcgacgttgtgtccacgatcgttggaaactctaacgatgttagatagttgcttcttggggatgatggtgtactctctggtcttaaacccggtggagtaacagtggacatgactagtagcaagccaggattggcgcgtgagatatacgcggaggggaaggcggagggattgctgggcgtagcaaaccaggattggcgcgtgaaatacacgcagaagcgaggcgtaggaattgttgggcggtggatgcgccggtatcaggtggagacgctggagcacgagaggggacgttagggattttcgccggcggagattcagagattgtggagtggttgtccccggtgatgaagaatatagggactgttacttatatgggagaagcagggagtgggcaaagctgcaagatagggaatcagattgctggtgcgagcaacctggttggacttgctgaagggatagtgttcgctgagaaagcgggtttagatacagtgaaatggctcgaggcggtgaaggatggtgcagctggatcggcggttatgcggctgtttggggagatgatggtgaagagggattatagggcgactggctttgcggagtatatggtgaaagatttgggaatggctgcagaggcggcgatgcctggtgctgctctgagcaagcagttgttcactggaatggtggctaatggagatggcaagttaggtattcaaggcgtcgtctctgttattagaagacttaacggcatatcctgaaaacacttgtgttgtaaaacagagtgttccaatgatttcacgatcaactaggcaaacttgtcttcgatttggtttaagttgataataagaagaacatcgagtctcaccaatctcaataagaaacaaagggcatttatcaaaaagaaattatacaagtcaccaaagtctcttcaactgaaacgttggagcagctatattcaaacctttcttcctcggatcccttcgctttacaccttgtccatgtccatgtcttatacgtagtgagcactaacctgcagcccagagacaatacgtagaatggaatgaatgagtatacattggaggcaatagaatagccatctatggaatgacaatgcaaggaacagggtgaactaaagcatatggtaaaaggtcctcgaaaaaactgcaattacagcctcatgtcaggttactctatctcaagaaagtatcactaaaacctcttgata

SEQ ID NO: 1046 - DNA, 3334 bp, Arabidopsis thaliana
  Clone ID: ARATH-23APR03-CLUSTER5208_1
gagaggaagaaagagagtggagaagagaagagaagagaagagagcaacttcctccattttcttttggcttcctctctccttctcggtttgttttgtctgtacctgagagagtttcccctaacaaaaaaagactcttttttcctcaaaatccatttcgcttccgacgccattctcagtcggtgtgaacgcgtgagagaaagagagagatttggcttactttatctccggcgggcatctttttccggcggagtttccgatgtatctactctagctaagctcagctcttaactgttacagggaccataatgaatgaactccgaggcagaaaggctcaaaagattgaaagtccagttccaggatgcttagggaagatggttaacctatttgatctaggaattgctgttaatgggaacaagttgcttacagataaaccacatcttgatggatcctctctgtcaagaagtcgatctgatgtgactcgaatgccaggcccttcttataaaggccattcagaagctgaattgattatgtctgatttgaggagaagtgcttctagcaaactaagtggtacaccgatgaagaaactcattgctcgagaaatgtcaaaagaagttgaacataaacagagcccaactaatgtggttgctaagttgatgggtttggaaacacttccccagacgcatcaggagactgctacacagcgaagcaaatccagaagcaattcacactcttctctgaatcattcgatgacttctacagataatgaggttcaaaagtatcaggatttcagtagggaatttaaagatgtgtatgaaacatggcagtcacctcagaaggtgagtcgctcaagggattgctcgcctagaaaaggaagatatgatgaaagtacgactgagaaacaaatggctcttgttcgtcaaaagttctcagaagcaaaacgccttgtaacagatgatagtcttcaccaatccaaagagttccaagatgcacttgaagtgttaagctcgaacaaggatttgtttgttcaatttctccaggaatcaaattctttctctcagcagaatctttctgactttcaccatgttcctcctcattcagaggcgaagcggatcacagtattgagaccttcaaaggctggtgaaactgaaaaatatgtggttcaagggaggaggaacaagcaggttaagaaattggcttcatcaagtcaagagactggatgggggaaccgtgatctgggttacccgtcaccttatgtcaaccggggaaccgaagaacacactgtacagccaacccgaattgtcgtcttgaagcctagtctaggaaagtctctagatattaaggctgtatcatcatcccaatcctctccaaggggtttacacagtaggggatattttgatgagcctgaagatgttgagactaaagaagttgcaaaggaaattactcgtcaagtgcgcgaaaatctgatgggtcaccacaggaacgagactcagtcttcttctgtcctatccaatggctatatcggtgatgacagttcttttaataagtctgataacgaagatttagtgggaaatcttagcgattctgagatcatgtcaccagcatctaggcattcttgggactgtccaaataggtttgacagtcttttctctccttcctctttcagcagagcttcattttctccagagtcatctgtctgcagagaggcgaagaagcgactttctgaaagatgggcgttgatgtcagtatcgggaagaactcaaccgcttaaacatgtttcaagaacctcaagcaccttaggggaaatgcttgcacttacagagaccaaagtgacaactgaatccggggaagggagctatgaaatagtaccagcaacgagggtatcaacatcatgcataactagtgatctgagtcaagtggaaatggcaagtgattctctgaatattcttgcaaggtcaaaatcagtctctgacgttagactcaacggagaaacatctgttctggggagttccaaagtacaggctccacgagagctgactaagacgggaagcctgaaatcgtcatggaaagtctcaaacttgttcttctttaagaataataaagcaagcaaggagaaaagagatgcatctcaatgcagcagtatgtctcaattggcagcgccttctcctgtgactcttaccggaaaaaccagcgaagattgtgtgtttcctattgattgtctccctcctgtttcatcagaacagcaaagtataatcctaggcgaggaggaagtgactacaccaaagcccctagcgactgggaatacaagtgaaaaccaggaccagccaagtccaatttcggttttgtttccaccatttgaagaggaatgtgccagcattccagaatgttctgggtcaaccaagcattggtcatctcaaggagacgaaatgtctcttaaatctaatctaatcgacaaatcaccaccaatcgggtcaattgctcggctcctctcatgggatgatgactcttgcactgacaacatagctaaacccgcaatgggagtccatgaggaggaagactggcatctcttcatagaaatgatcttgacagctgcaggtttcagcagtggttgcatagtctctcatgaccccatcatgtcacgatggcacatgccaaacagtcccttagacccttcactcagagacaaatacaccaacccggataacaacaacatcaaggagttcatccacgaaggcaaacgcagacaacaacgatcaactcgtaagctcattttcgaccgcatcaactccatcgtttcagaaacaacgactacacgcacaggtaatggttctctgcatttcgacctggtggagcatgtgtgggctcagttaaaggactgggtttcagatgagcctagcaagcgtgactcaggagaagacatggacgccaacagtttggctgcagagagtctagtgaaagatgagatagtcgggaggacatggactcatagcttgcaagttgaaatagatgactttgggattgaaattgaaaagagattgttgcaagagctagtagaggaagccgttatcgatcttacacgatgagatgagacaggagcaatatatatactacgttcaataaaaatgtaagatagtgctaagttcatttttttttggtctatgggaagatttgtgtctcgatttttttgtaatgattgagagagaaaacagaatgctgtgtagccattgttgaagcagagcaataagcagttgttcccatttcaaacacaaatctcgtaactcttttgtacaccaaaatgaaagctatgttgcgatctaaaagaaaaaaaaaaaaaaaa

SEQ ID NO: 1047 - DNA, 472 bp, Arabidopsis thaliana
  Clone ID: ARATH-23APR03-CLUSTER52449_1
ggcccgggccccccctcgtggtttatctaaaatttatttgattatattatatattctattttagatagcaaaatcttgcattcaaaagagagagtgatacataagagtttaacctataagaagaagctagcttcaacatgatttctccaaagtaaagacgaagatcaatgaagaacaattttacatacaagtgaaaaaaaacgaagttccttgtcaattgtctagctccattgcctgagcagctttagctttagcagttggagtcagttttgtctttaatttcttcttgccaacagaaaatccacctttcttcttcttcccacttccatcaactttcatcttattcttgttggcatgaagcttcttgatcttcttgtcctgtaactctttctctttttggagattgtactcgtgctgcttctttctcttggctaaattgttcttcttcgacattttttccgttccgtgggcc

SEQ ID NO: 1048 - DNA, 2489 bp, Arabidopsis thaliana
  Clone ID: ARATH-23APR03-CLUSTER5279_1
gtgtctcctgcatgtgttgggtctcggacgtggtctggttcaagcgcgccgtcacctgcgtgtcaccattcccttctgtatcagtcgaggcaaagaagaagaagacattattttaagtgagttctctctctgtcacactcacaaagctttatactttctggctactgcaagctcatcactgaaaagagcttaaaccagagagatctgataagagaaattttagagtctctctgcttcaacaagatctacatcgaccaggagattagaaagaatcatgggttctaagcataacccaccagggaataacagatcgagaagtacactatctctactcgttgtggttggtttatgttgtttcttctatcttcttggagcatggcaaaagagtgggtttggtaaaggagatagcatagctatggagattacaaagcaagcgcagtgtactgacattgtcactgatcttgattttgaacctcatcacaacacagtgaagatcccacataaagctgatcccaaacctgtttctttcaaaccgtgtgatgtgaagctcaaggattacacgccttgtcaagagcaagaccgagctatgaagttcccgagagagaacatgatttacagagagagacattgtcctcctgataatgagaagctgcgttgtcttgttccagctcctaaagggtatatgactcctttcccttggcctaaaagcagagattatgttcactatgctaatgctcctttcaagagcttgactgtcgaaaaagctggacagaattgggttcagtttcaagggaatgtgtttaaattccctggtggaggaactatgtttcctcaaggtgctgatgcgtatattgaagagctagcttctgttatccctatcaaagatggctctgttagaaccgcattggacactggatgtggggttgctagttggggtgcttatatgcttaagaggaatgttttgactatgtcgtttgcgccaagggataaccacgaagcacaagtccagtttgcgcttgagagaggtgttccagcgattatcgctgttcttggatcaatccttcttccttaccctgcaagagcctttgacatggctcaatgctctcgatgcttgataccatggaccgcaaacgagggaacatacttaatggaagtagatagagtcttgagacctggaggttactgggtcttatcgggtcctccaatcaactggaagacatggcacaagacgtggaaccgaactaaagcagagctaaatgccgagcaaaagagaatagagggaatcgcagagtccttatgctgggagaagaagtatgagaagggagacattgcaattttcagaaagaaaataaacgatagatcatgcgatagatcaacaccggttgacacctgcaaaagaaaggacactgacgatgtctggtacaaggagatagaaacgtgtgtaacaccattccctaaagtatcaaacgaagaagaagttgctggaggaaagctaaagaagttccccgagaggctattcgcagtgcctccaagtatctctaaaggtttgattaatggcgtcgacgaggaatcataccaagaagacatcaatctatggaagaagcgagtgaccggatacaagagaattaacagactgataggttccaccagataccgtaatgtgatggatatgaacgccggtcttggtggattcgctgctgcgcttgaatcgcctaaatcgtgggttatgaatgtgattccaaccattaacaagaacacattgagtgttgtttatgagagaggtctcattggtatctatcatgactggtgtgaaggcttttcaacttatccaagaacatacgatttcattcacgctagtggtgtcttcagcttgtatcagcacagctgcaaacttgaggatattcttcttgaaactgatcggattttacgaccggaagggattgtgattttccgggatgaggttgatgttttgaatgatgtgaggaagatcgttgatggaatgagatgggatactaagttaatggatcatgaagacggtcctctcgtgccggagaagattcttgtcgccacgaagcagtattgggtagccggcgacgatggaaacaattctccgtcgtcttctaatagtgaagaagaataaaacaaaaacaaaaaactcctcaggttactaagcttgaagtgtagatctattttacaacatctggaaaattcttatcaaaaaaggaaggaatcagaatttccattaaagaaaggtgtcaaaaaaaagttgtaaaactatatagtagtgatcaagacgaatatgtgcatttatgttttatttttgttccctagtttttaattttatttttttgaaggaagaaaaaattagttccatgtgtttttgcaagatagttgaaaccttggacgcttgttatgtatgatgcgatcttgacattttttaataacagttattttaaataaatttatgatataaaaaaaagggcggccgc

SEQ ID NO: 1049 - DNA, 1944 bp, Arabidopsis thaliana
  Clone ID: ARATH-23APR03-CLUSTER52_1
tggaagaaaaaatatcggcaacaagaacaaaacgctcttctatttttctccatcttccaatttccaggaacaagattggacgaaagctaaaggtattgcatccatttaaaaagttcatggataggtggtccagtaaaagagccatggaggcgagacctgactctaagaagaagggtggtgttgtttttagagatagatttaacagcaatagttgcaaggttcctatttgtagtgatgagaaaaaatcaatgaactttactaggtttgttggctcttcagataagaaagagaaatcagtgttgtctacataccgctcttcgccaaacgggaaggaagtaattggaacttcctctaagatttgtatctctagctcctcttctgtgaaaagtggtgagaagcaaccgttttctcagatagccattgattcatcagagagcagcagaggtagtgaagacgaggtagagtcagaaatcttgcaagttcctcttggaagagataaaagaagaatgaacaataaacttatttatggaaaagttataacacctgaagcggaatgctcaaagttgccatcaagctcaagaatcaagagaggttttaggcagagatttgggttgagcaagcaagagtttcatcctggtccatctggccagtcaacatctgctaaccggggatgcagcccgttgttgtcaggtgtcattccaagtggttttggattggacaaaagattaagtcggaaggcagatacaatcagtaagacaaaagtttacggagaaagcagttctagctcctcagctagggggaagaatgtaacagaacctccaccagttgaagtgagacgtcgtagttttaatccgagaggttctgtttctgatagtagacgggctagacactgcattttggatgatgacaacgatgttgcttcagttgggagtcagagattggcaaatagaaataatagtcgcattagagggagtggtagagacggtttatcctctgtcacggcagcagagatgtctcagactgaaacatcaaacaatctcaattctcctgtctctttggagctgttctctggttttccagaatttggcctctctggttccttattgagtcatgacagttttcgcagttataatttagatgggatctccgagattctgccagaacttgataggatcgaacaagatatcgaacttaattatgaggatctgcttatcatggaaacaggtttacttctcggtggactaagcttccatgaccaacaccgagacatgaggctagacatcgataacatgtcatatgaggaactattagctctagaagagaggattggtacagtaagcactgctttgacagaagaagcaatatcaaagtgcttgaaaacaagtatctatcagatgaaacctttgagttatgggtctatcaccaaaagtcctagtgataacaaggaagatgccaaatgcagcatctgccaggaagaatatacgattggagatgaagttgggaggctacactgtgagcacacataccatgtgaagtgtgtgcaagagtggttgcggatgaagagttggtgcccaatctgcaaagccacagccgaaacctcctctaaataaccgtcttcttcttcttcctcgttcgttgtattagttctttcatctaaagcctgtgaacaacaatggaacctgcgtaaaaaaggcctcaccatttcctttgtgtacataccaattcacaccggctctgtctctctctcccttttgtctaatgacaaagctatcctgtgtttctcttgtcttttcctctctttactgtttgacttccgtaatgtaaagtgggaaagacggaaacgatttcatttgaactttgaagatcaagtaaacatgatcttttaattcttaaaattggacaatttgttgaaaagcaacaaagagcgtggttctttggtaaaaa

SEQ ID NO: 1050 - DNA, 2532 bp, Arabidopsis thaliana
  Clone ID: ARATH-23APR03-CLUSTER5300_1
gagtgaaatgcaaaaagctgacgtgtaccaatgaagcccacgaccaatggtgggctcttggcttctcaatcatcttcctccttctcgtttccgagattccgcggccaacttccgattatcttctcagccaataataatcagaagaagaagaatcttccaaatccaaacgtcgtcactctttgtctccactctcattccaatgtctcctcctctcaaatcgccgtcactcgccgcgcaattctcgtcgcaccaccgctcctcgccgccgccgcttcgttgtttctctctatttcctcagctgcctctgctgagacttctgcggaatcagtagctcttcctcctgttgctactgctcctcctcctccgcctgtggagaaggaagaggcgataacttctagaatctatgacgcgtctgtgcttggtgagccgatggctgttgggaaagataagaagagagtgtgggagaagctattgaatgcgaggattgtctatctcggagaagcagaacaagtgcctacaagagacgacaaggttctcgagctcgaaatcgtgaggaatttgaggaagcgatgtattgagagcgatcgtcagttatctttagcattggaagcatttcctcttgatttgcaggaacagttaaaccaatacatggacaagaggatggatggagaggtattgaagtcgtatgtatcacattggccagtccaacgttggcaagagtatgagcctctcttaagttactgccgcgataacggagttaaactcattgcttgtggcactccgctcaaggttttaagaactgtccaagctgagggtatccgtggtctatcagagtctgagcgtaaattatacactcctcctgcgggttcagggtttatctcagggtttacttccttctcacgtagttcttcactcaatatgaatccactcacacagattgttccatttggaccgagttcttatttgtcggcacaagctagagttgttgaagaccatacaatgtctcaagttattgtacaagcagttgcagatggaggtggaactggtatgctggtagtggtgacaggggcaaaccatgttgagtatgggtcaaggggaacaggattgccggcaaggatctctaggaagattccgaagaaaagtcaacttgttgtgttacttgatcctgaaagacagtttttgcggaaagagggtgaatctccagttgctgatttcttgtggtattctgcggccagaccctgcagcagaaactgctttgaccgagcagaaatcgctcgggtaatgaatgcggctggtaggagacgagatgcccttccccaagacattcaaaaaggattagaccttggtctggtgtcacctgagattctgcagaatttctttgatttggagcaatatcctcttatttcagagcttacacaacggttccagggattccgagaaaggttgttggcagatcccaaattcttgaatagattagctattgaagaagctatatcaataacaacaacacttgtagctcaatatgagaagcggaaagaaaatttctttgaagaactcgactatgtgatcactgatagcgtaagagcatcagttgttgattttttcacagtttggctccctgcaccaaccttgtcttttatctcatatgctgatgagacaattgggccaaacagcatagatgccttaagaggcctcctagggtccatacctgacaatgcatttcaaaaaagtctaggtggacaagagtggactctgagtcttaggattgcttcagttattatcggtggcttgaagcttgctggtgttggagttgtttccagttttgcagctgtgggatcttcaaatgctttgtatgcaatacgaaaattcattaaaccagagttgggtgttggtgagcaagcaaagaggtctcctatgctgaagacggcccttgtgtatggaggttatctgggaacatcttcgaatatccgttatcagataattgctgggttaatagagcatcgcatttctgacgagctttcttctcaacctctacttgtaaacatgatttcatttgttgttcgagtagctaactcctactttggaactcagcaatggattgatcttgcgcgctctacgggtctgcaaactcagaaaagtgtcacaacttccaaccaaatccccgaggttgcgagccaatccacagtggaatacagtacaactgaagaggcaagtatggatgatcttaagaatcaatgagatttatgcggctatgtgactaggtaccaattgtatatgtttataaaagcttttgatcgtattggagggaaagatatattcatttgagttgtatttttgtatcttagcttacgggaaacaatgattcgtgaataaaatttcttcaattataatttcacatttcttaagttgtatgttcgtacatgtgcttggcaaatagtgatggtttcaatataaatttgttgtcttaaactctccaacaatggatagtttccttacttttggacttcggtgtttgtatggaccacctacaat

SEQ ID NO: 1051 - DNA, 762 bp, Arabidopsis thaliana
  Clone ID: ARATH-23APR03-CLUSTER5302_1
caaccaatctcaaagcaaattatatacactactaaccaatctcaaagcaaattaaatacactactacttcttgagcttttaaactacacaaacaaatggctccaagaaccccccttgcactcttcgtttctctcaacctcctcttcttcacttacacctctgcaaccacagggacttgtcctaaaaattccatagagatcggtacttgtgtcactgtgctcaatctagtggacctaacattgggaaacccacctgtaaagccatgttgctcgctcatccaaggcttggctgaccttgaggctgcggcctgcctctgcactgcgctcaaagctagcattcttggaattgtcaatattaaccttcctatcaatctcagcgtactcctcaatgtttgtagtaggaatgctccaaagagtttccagtgcgcgtaagttgaatacctatgacatacctatgaaacaaacgaatcataccgatgcttgaacatgttttcttacctacttgttgttgttctaagatgtttgttttttctttctttcgttggattggttagtgtttacactcgacaagtttgttgatacccctttactttgtgattctgtgggttttgttgttcccgacaagtttgtatgtactcctgtactttgttgttcctttgttttgttgttcctcttctttgtaactgtgtatttcaaatttgcttaataaaaatataaattgatgttgtagctaaaaaaaaaaaaaaaaaaaaagggcggccgc

SEQ ID NO: 1052 - DNA, 979 bp, Arabidopsis thaliana
  Clone ID: ARATH-23APR03-CLUSTER535_1
aacttttctaccaatggctcttgaagctcttaattcaccaagattggtcgaggatcccttaagattcaatggcgttgagcagtggaccaaatgtaagaaacgatccaaacgttcgagatctgatcttcatcataaccaccgtctcactgaggaagagtatctagctttctgtctcatgcttcttgctcgtgatggcggcgatcttgattctgtgacggttgaggagaagccgagttataagtgtggcgtttgttacaagacgttttcgtcttaccaagctctcggtgggaaacgatccaaacgttcgagatctgatcttcatcataaccaccgtctcactgaggaagagtatctagctttctgtctcatgcttcttgctcgggatggcggcgatcttgactctgtgacggttgcggagaagccgagttataagtgtggcgtttgttacaagacgttttcgtcttaccaagctctcggcggtcataaagcgagccaccggagcttatacggtggtggagagaatgataaatcgacaccatccaccgccgtgaaatctcacgtttgttcggtttgcgggaaatctttcgccaccggtcaagctctcggcggccacaagcggtgccactacgatggtggcgtttcgaactcggaaggtgtggggtctactagccacgtcagcagtagtagccaccgtggatttgaccttaatattataccggtgcagggattttcgccggacgacgaagtgatgagtccgatggcgactaagaagcctcgcctgaagtaagtctttgttgaagacctggaagtttatcaaatgtaaatatcaaatttcaatttcaaggaacagttttgttgattctattaccaatacacaatacgattcaattcctttgtttctgaagtaacagcatactaaattcattagaaaaccgaatcgaaaatatttacaaaaaaaaaaaaaaaaaagggcggccgc

SEQ ID NO: 1053 - DNA, 1250 bp, Arabidopsis thaliana
  Clone ID: ARATH-23APR03-CLUSTER537_1
caaatttgttaatttatttttgttatatggacccaaaacaagctattggtgccctacacaatatttcctgcttttacaaaagttggctctgccaaataaaaattttcaagtttttaaccccaccatagtgcaacatgactcaaaagctgtttatacagtatagtctacggtcttacatcgtattttggaaatatgaccaaattaccccttggtttgtccataaatatcaagctccaacaattcaattcttcccttttccccttctaatttctctcatctctctattagaaaaattattagcaattatgttgtccactgcaccggccttttcattctccgaaccgggtttggttaatcaattctcgggtttccaaaccgggttcactccttgggaatgggattgctctgatctctttttcgtggaccaaatgtctcttgaaccggccatccctagtccttgttatggtgaatccgacactggttccgtcaaaattaattccggttctcatgacatgaaaaccggttctgacgaatcttgtgccggtttcgtcaaaattaatcctcgttgtgacgacgccgacatatcaaacgatctaccgtgctctcaagcagatgaaccggactcggacgacacaaaacaattgacagccatcacaaatttcggttcgggagagaataaccataaccggaaaaaaatgatccaaccggagatgaccgacgagcggaagaggaagaggatggagtcaaaccgggaatcagcgaaacggtcaagaatgcgtaaacaaagtcacattgataacttacgagagcaagtaaaccggttggatttagaaaaccgtgagctcgggaaccgactccggttagttttacaccagcttcaacgagtgaattccgacaataaccggctcgtgacagaacaagagatactccggctaagattgtcggagatgcgtcggattctgatcattagacaacttcaacaacagcaacaatgggaactacataaccggagaatgatcatgactgaacaaaaccaccctcatcttcaatgatagatcaaaatatttaagaagaaaaaatatcgaaaaacttagaacaataaccaaaaaaaaaaagcaaagcaaaaaagaaactctcgctatgtctctctatctctctatgtaaatgaaatgaaggttaggaagagaaaatgatagttttctaattttcctttccactttctcgttttctatatgttgtgactccactac

SEQ ID NO: 1054 - DNA, 1164 bp, Arabidopsis thaliana
  Clone ID: ARATH-23APR03-CLUSTER5415_1
ggcttgctttcacgtttttcattgatggctggctttactcttcttccctcgcggttactcgcgtttccttcacgcgctttacctcgtcgccttcatcaccaccatgcaaagctgattcttcgctgcaaaatgtcttcttcttcttcctctcttactcaatccatcactctcccgagccaacccaacgagcctgtccttgtctctgcaaccgctggaatctcttcttccgatttcagggatgcgattgattcatctctgtttaggaattggctaaggaatttggaatcagagagtggaattttagctgatggttcaatgacattaaagcaagttcttatccagggagttgatatgtttggcaaaagaattggatttctcaaattcaaagcggatattttcgacaaggaaactggtcaaaaggttccaggtattgtatttgcacgaggaccagctgtagctgtgcttattctcttggagtcagatggtgagacttatgcggttctcactgaacaggttcgggttcctactgggaagattgttctggaattacctgctggaatgttggatgatgataaaggtgactttgttggtactgcagttcgcgaggtcgaagaggagattggtataaaactgaaaaaagaagatatggttgatctcactgcttttcttgacccatctactggttaccggatcttcccttctcctggaggctgtgatgaagagatgagcgtgtttctttacagaggacaagtcgaaaaggaaacaattagacagttgcaaggcaaagagacaggactccgtgaacacggtgagttcatcaaagtccgactcatcccatatagagagctctggcgcaaaacagctgacgctaaggttcttatgagcattggtctctatgaaatggctcagcgagagggtcttgtgtccagccagagactgaaacccaactcttgatctcctacaattctctgaaatatacaataactggattcagtcaaccagatgagatagattgagattagacgttcttatgttgtaaaaggagtttttagataaatgttatcgctttataacttggtaccatgacaacttgggaacttatctttagaacaaaagattttgcaaacccaatttagggtttaggtttccaaaaaaaaaaaaaca

SEQ ID NO: 1055 - DNA, 2185 bp, Arabidopsis thaliana
  unsure (1)..(2185): unsure at all n locations
  Clone ID: ARATH-23APR03-CLUSTER5427_1
tgagagaagaagtgattctctaaacaacaaaaataaaataaaactcttctttctctatttctgttgaaggtacctcatcattgcaacacaaacttaaagctttgtttgtgtctgctttcagacaatgataccaagttacgacccaaatgatacagaggctggtctcaagcttctcgaggatctgacaacaaatgcagaggctatccaacaacaagttcttcaccaaatactctctcaaaactctggaactcaatatctccgagcatttctggacggagaagccgacaagaatcaacaaagcttcaaaaacaaagtccctgtggtgaattatgacgacgtaaagcctttcattcaacgaatcgctgatggagaatcatctgatatcgtctctgctcagcccatcacagaactcctcactagttcggggacttctgcaggaaagccgaagttgatgccttctacagctgaagaattggaaaggaagacatttttctacagcatgcttgtgcctatcatgaacaaatatgtggatgggctagatgagggaaaagggatgtatcttctattcataaaaccagagatcaagactccgtcaggtctaatggcccgtcctgttttgaccagctactacaaaagtcaacatttcagaaacagaccattcaacaagtacaacgtctacactagccctgaccagaccattctttgtcaagacagcaagcagagcatgtactgtcagcttctctgcggtctagtacagcgatctcatgtcctaagagtcggagctgtctttgcctctgcctttcttcgagcagtcaagttcttggaggatcattacaaagagctttgcgctgacattagaaccggtactgtcactagctggatcactgactcatcctgcagagactcggtcttgtcgatccttaatggcccaaatcaagaattggctgatgaaattgagagtgagtgcgctgaaaagtcgtgggaaggaatcttgaggaggatatggcctaaggctaaatatgttgaggtgattgtgactggttcgatggctcaatacattccgacactagagttttatagcggaggtttaccgttggtttcaacgatgtatgcttcctctgagtgttactttggtatcaaccttaatccgttgtgtgatcctgccgatgtttcctacacgcttcttcctaacatggcttacttcgagttcttgcccgtcgacgacaaatcccacgaagagattcactttgcaactcactccaacaccgatgatgatgatgatgctctcaaggaagatctcatcgtcaatcttgttaatgtcgaagtcggtcaatactacgaaatcgtcatcactacattcacaggtttgtacagatacagagtaggcgatattctaaaagtgacgggtttccacaacaaagcgcctcaattccgtttcgtgcagcgaagaaacgttgtactaagcatcgacactgacaaaacgagcgaagaagatctactaaacgcagtgacacaagctaaactaaaccatcttcaacatccttcaagcctcttgctcacggagtacacaagctacgcagacacgtcatcaatcccagggcattacgtgctcttctgggagctaaagccacgtcacagcaatgacccaccaaagcttgacgacaagacaatggaggattgttgctctgaggttgaggattgtttggattacgtctacaggagatgcaggaacagggacaagtcgattgggccattggagataagagtggtgagtttgggcacgtttgattcgttaatggatttttgtgtctcacaaggatcatctttgaatcagtataagactccaagatgtgttaaatctggaggagctcttgagattcttgattccagagttattgggaggttcttcagtaagagagttcctcaatgggaaccacttggtttagattcttagactttacttctttttctttaatgtatgattaaagtcttgattttataagtataagatcttcatttgttaagttgctaattggtgtttctttttttaattgttaagcttttgtctcttttgtaacaaactttcagcaaagtcctctcattttgtgaatgtaaacttttgtgtctcttccttaaaaaaaaaaaaaaaaaaaaaaaaaaaaaaaaaaannaagggcggccgctt

SEQ ID NO: 1056 - DNA, 917 bp, Arabidopsis thaliana
  unsure (1)..(917): unsure at all n locations
  Clone ID: ARATH-23APR03-CLUSTER5457_1
ggctgtggccgtctccaacaccatttcgaagaccagggagatcgaagcaaaatggagaaaggaaagggaagaaaggaagaggtcgtgaccagggagtacactatcaatctccacaggcgcctccatagctgcaccttcaagaagaaggcacccaatgccattaaagagatcaggaagttacggctgcgagacgctgttctcttgctgtggccgtctccaacaccatttcgaagaccagggagatcgaagcaaaatggagaaaggaaagggaagaaaggaagaggtcgtgaccagggagtacactatcaatctccacaggcgcctccatagctgcaccttcaagaagaaggcacccaatgccattaaagagatcaggaagtttgcattgaaagcaatgggaacaaaggacgttagagtggatgttaaactcaacaagcagatatggagcaaaggtatccgaggtcccccgaggagaattagagtccgtgttgcccgtaagagaaacgatgatgaagatgccaaggaagagttcttctccctcgtcaccgtcgctgagattccggctgaaggattatctggtttgggtactaaggtcattgaagaagaggagtgaaaattggtgaatgtacactcacacaaccttatctttagatgaaaagacgaaacgaaaagactttgcttgttttgatcacttacctattttggtcatttatcatttcttatgttttaagttctatagacaacagatttggtactactcatacgagtttgatctttttgtgacgcaaagaggaacccagggggggcccggggcctgggatnaacnnaggggggccgggcnatttcccttnggnggtttaantnctgcgggtttaaagggganggaaaccgggtnccattattttnggnngnncctt

SEQ ID NO: 1057 - DNA, 1296 bp, Arabidopsis thaliana
  Clone ID: ARATH-23APR03-CLUSTER5466_1
gatcacggcctagtttagttaagctctcgccggtgatttagcggagatgggaagtgaccgcgacggtgctccgccggagaacacaaaacgagaggttgaagatagagatatcagaagaaaatcatcccgggagaaaccgagtggttctggaaaggattccggcgaagagaaagatgtgagtcgccgccgtgaatcgaagaggagaacaaaagacggcaacgattccggctctgaatctggtttggaaagtggaagcgaatcggagaaggaagagagacgtagaagtagaaaggatagagggaagaggaaatcagatcggaaatcatctaggagtaggagaagacgtcgtgattattcgagtagtagctcagattccgaatcagaatcggagtcggaatattctgattctgaggagagtgagagtgaagatgagagaagaaggaggaagaggaagagaaaggagagggaagaggaagagaaagagaggaagagaaggagaagagagaaagataagaagaagaggaacaagtctgataaagatggagataagaagaggaaggagaagaagaagaagaagtctgagaaagtgaagaaaggagctgttactgaatcatggggcaagtatggaatcatcagagaaactgatatgtggaataaacgtccagagttcacagcatggttgcttgaagtaaagaaggttaatttggaaagcttgccaccttgggaagagaagaaaatgtttaaagattttatggaggatcataatactggtacatttacctcgaaaaaatactatgacattgatggttactatagacttaagttggaaaaagagatgaaaaagggtttgaagaaagctgggattagtgaacgtactgtgttcaatgatgaggaacaacgccgactggagatgcaggaattacgtgaaaggcagaaggaagaagaagtgttagctctaaagcgatcaatggaaggtggaatggcgcaagctatgaaagagcaagctcggctaaaggaagaaatggtgtacttatacaagattggggacatggagggtgcagctgctatacagagaaggttggatccggatgttcccatgtgatgtgtagctttttgttaagctacaatatcttctcgattgtgttccaagaatcgaacttttgtaacattaggataagagaaaccaaaattttatgtcctagagccctaagatactacttttttgcttgcttggatatcattattcgccaagaggtctggtcaagttatgaaaattggcaaaaaaaaaaaaaaaaa

SEQ ID NO: 1058 - DNA, 1339 bp, Arabidopsis thaliana
  Clone ID: ARATH-23APR03-CLUSTER5473_1
aagtgttcttgaggagaaggacgatcgatctaaggagacgatgaagatcttccacgttccttgtctgcaagacaactactcttatctgataatcgatgagagcaccggagacgcggcggttgtggatccagttgatccggagaaggtgatcgcatcggctgagaagcaccaagctaagatcaagttcgtactcactacgcatcatcactgggatcatgccggtggaaacgagaagattaagcagttggttcctgatatcaaagtatatggaggttctctggataaggtggaggattgcaattgtgcgggaggagaaggacgatcgatctaaggagacgatgaagatcttccacgttccttgtctgcaagacaactactcttatctgataatcgatgagagcaccggagacgcggcggttgtggatccagttgatccggagaaggtgatcgcatcggctgagaagcaccaagctaagatcaagttcgtactcactacgcatcatcactgggatcatgccggtggaaacgagaagattaagcagttggttcctgatatcaaagtatatggaggttctctggataaggtgaagggttgcactgatgcggttgataatggtgacaagctgactttgggtcaggatattaacatattggctctccacactccttgtcacaccaagggtcacattagttattatgtgaacggaaaagaaggagaaaacccagccgtgttcaccggagatacactttttgttgctggatgtgggaagttttttgaagggacagctgagcagatgtatcagtcgttgtgtgtgactctggctgcattacctaaaccgacacaggtttactgcggccatgagtacaccgttaagaacttggaatttgctctaactgtggaaccaaacaacgggaagatacaacagaagttagcatgggcccgtcaacagcgccaagcagatcttcccacaatcccttcaacactggaggaagagctcgaaacaaatccatttatgcgtgttgataagccagagatacaggagaaactcggttgcaagtcgccaattgatacaatgagggaagttcggaacaagaaggatcagtggaggggatgatgataaatggagagcttcttgcctatgttttgtgtacttgtgttgaatgatcctgtaaaaggtgtatgaaccagtaatgttgatattctgtgtgaaactgtgaaccggtttggtaaaccgaaatcagaccgacctgtaagccgtactccctttttgaattttcagtttactatggataataatttcagtgtcaaaaaaaaaccccgtaaaaaaagagcttcttc

SEQ ID NO: 1059 - DNA, 1775 bp, Arabidopsis thaliana
  Clone ID: ARATH-23APR03-CLUSTER5533_1
aacaaccaaagactctttaccatctctttctctctctgtttgaagacatagcacaaaaaaaaaaaaaaaagacagagcaaaaaaacacacaaagatgggcataatgatgatgattttgggtcttcttgtgatcattgtttgtttatgtactgctcttctccgatggaaccagatgcgatattctaagaaaggtcttcctcctggaaccatgggctggccaatatttggtgaaacgactgagtttcttaaacaaggaccagatttcatgaaaaaccaaagactaagatatgggagtttcttcaagtctcacattcttggttgcccaacaatagtctcaatggacgcagagttaaacagatacattctaatgaatgaatcgaaaggacttgttgccggttacccgcaatctatgcttgatattctagggacatgcaacatagctgcggttcatggcccgagccaccggctaatgagaggctcgttgctttctttaataagcccaaccatgatgaaagaccatctcttgcctaagattgatgatttcatgagaaactatctttgtggttgggatgatcttgagacagttgatatccaagaaaagaccaaacatatggcatttttatcatcgttgttacaaatagctgagactttgaaaaaaccagaggttgaagaatatagaacagagtttttcaagcttgttgtgggaactctatcggtcccgatcgatatcccgggaacgaattaccgcagtggagtccaagcaagaaacaacatcgataggttattgacagaactgatgcaagaaagaaaagagtctggagaaactttcacagacatgttgggttacttgatgaagaaggaagataaccgatacttgttaaccgataaagagataagagatcaagtggtaacgatcttgtattccggttatgagactgtctctacaacctccatgatggctcttaagtatctccatgatcatccaaaagctcttgaagaactcagaagagaacatttggctataagggagagaaaacgacctgacgaaccgctcactctcgacgatattaaatcgatgaaattcactcgagctgtgatctttgagacatcaagattggcaacgattgttaatggtgtccttaggaaaactactcacgacttagaactcaacggttatttaatcccaaaaggttggagaatttacgtatacacaagagagattaactatgatacatctctttatgaagatccaatgatctttaacccatggagatggatggaaaagagcttagaatcaaagagctatttcttactctttggaggtggagttaggctttgccctggaaaggaactaggaatctcggaagtctcaagcttccttcactactttgttacaaaatatagatgggaagagaatggagaagacaaattaatggtctttccaagagtttctgcaccaaaaggataccatcttaagtgttcaccttactgactagttttgtcctaatattgaaaaatgtgtaaataaatctattaagggtcattttgtagggctaattaacctattttatctattaaatctctcaagatcatagaggagatggataatgtacagagagaaagagagaagaagaaaatggaatatagaaaaaaataaaatatttgaaatgttgagcttagtctcttatcttgtaaatttgtaacccataaatttttacatttcataattacgttctgtgtttttttttaaaaaaaaaaaaaaaaaaaaaaaaaaa

SEQ ID NO: 1060 - DNA, 1399 bp, Arabidopsis thaliana
  Clone ID: ARATH-23APR03-CLUSTER5543_1
cttcacttcttttatctctctttctatctcacacagagtgaagaatccagagagtctctaatggcagaatgaacaaaggaattagcaatcatcttcttctcggaagagaaaaatcatggctttagaagaggaggaagagagtcaaaacgcaccgttttgtgttcttgatggtcttttctgtgaggaagagagtgagtttcacgaacaagtagatttgtgcgacgagagtgttgaaaagtttccttttttaaatctgggtttgtctgatcatgatatgttgtgggatgatgatgagttatcaactttgatttcgaaacaagaaccgtgtctttatgacgaaatcttagatgatgagtttctggttttgtgtcgtgaaaaggctcttgattggatttttaaagtgaaatctcattatgggtttaattcattgacggctcttttagctgttaattacttcgataggtttattacaagcaggaagtttcagacagataagccatggatgtctcagcttactgctttggcttgtctgtctttagctgctaaggttgaagagatccgtgttccttttctcttagattttcaagtggaagaagcaagatatgtctttgaagctaagactatacagagaatggagcttcttgttctgtctactcttgactggaggatgcatcctgtgactccaatctcgtttttcgatcacattattcgacgatacagctttaaatctcatcatcaattggagttcttgagtagatgtgaatctttattactctccattattcctgattcgagatttctgagttttagtccttctgtgttagccactgcaataatggtctctgttattagagatttgaagatgtgtgacgaagctgtataccaatctcagctcatgactctactcaaagttgattcggagaaggtaaataaatgctatgagttagtgttagaccacagtccaagcaagaaaaggatgatgaattggatgcaacaacccgctagtccgatcggtgtgtttgatgcgtcattcagttctgatagctcgaatgagtcgtgggttgtgtctgcttctgcttcagtgtcgtcttcaccatcttcagagcctttgctcaagaggagaagagtgcaagagcagcagatgaggctatcttcaataaaccgaatgtttttcgatgtgcttagtagtagtcctcgctaataatgtcaacaacccatcaaaatgtgtcggtttagttacctaaaatctgtttccatgttttacatattatcggctatatggttctcggttcttgtgtttatggacggttgcaaatggtgtacgtttcgttatttgatattctaaaaacaaagttcttttacattaaaagtttccgctggatcttacctcaaaaaaaaa

SEQ ID NO: 1061 - DNA, 1675 bp, Arabidopsis thaliana
  unsure (1)..(1675): unsure at all n locations
  Clone ID: ARATH-23APR03-CLUSTER5545_1
gttctgttgcccttcgatcaaaaacccaaatctctctgttcgcagagaggatcaaatcacagttagcgggagtgattcagagagacaaagttagtgagagagagagataacgaagatggacgctatgaggaagcaactcgatgtgctcatgggagctaacagaaacggcgatgtcactgaggtcaatcgcaaatactacgaccgcgatgtttgccgtctttacctctctggtctctgccctcacgagcttttccaattgacgaaaatggatatgggaccatgcccaaaggtgcactctttgcagcttaggaaagaatacagagaagcaagggcaaaaggtgttgataactatgacagggaattggaagatgccatagacaggcttatcgttgagtgtgataggaagattggtagggcccttaagcgtcttcaagaagaggatgccaaagctgccattgccatttctgtctctgaagtcactcagtcgcctgaaattctcgagttatcggagaaaatcaaagagaagatgaaggaagcagatatccacgatcttgaaggcaaaatggatcttaagattagagctcttgagttagtcgaagagatgaggaccaagagagctgaccaacaggcggtgttgctgttggaagccttcaacaaagatagagcatccttgccacagcccgttccagctcaaccaccatcttccgaattacctccaccggatcctcgcactcaagaaatgataaatgagaaactgaagaaggcagaagagcttggtgaacaagggatggttgatgaagcgcagaaagcactagaagaggcggaagctcttaagaagcttactgctagacaagaacctgtagtggattcaaccaagtacactgctgctgatgtgcgcattacagaccagaagctgcgtctatgtgacatatgcggagcatttttgagcgtctatgacagtgatcgtcggttagctgatcattttggagggaagcttcacttgggttacatgctgatccgcgacaaattggcagagcttcaggaggagaagaacaaagttcacaaggaacgggtcgaagaaaggagatcaaaggagaggagtagagagcgagaatcaagtaaagacagagacggaggagataaccgtgaccgaggaagagatgttgaccgcaggagtagagatcgtgacaggcaccatgaccaccgagaacatgacagaaactataatcagtcacgtggctatgactcaagaagccggcgcagttcacggcccaggtcagggaaagaccgagggatcacggtcccggtcgagggaaagaccgagggtactatgatcgccacaggcgtcacaaccgctactagatggtcttactgttgcgtttagacatggtttaggaagttacaaatgcttttaggatctattacctaaacttttttctgtcttcatgtaggttactcaagtctgtaagatgagtttcagagattttcacatctttttttttttccacaaattaaagacttggaagaaagaagatgtggttgatgtttttaccacatctgagaagcgtgtatgcactatcatcgaacaaaaaaaaaaaaaaaatagattctcgaactatctatgtaccttgattacaatcgtggaagtaattagaaattatatgattttgtngtt

SEQ ID NO: 1062 - DNA, 659 bp, Arabidopsis thaliana
  Clone ID: ARATH-23APR03-CLUSTER5573_1
taaacaccgaatctctcaacacaaacaaaatcacacatctctcttcatctttttgtttcctgcaagaatctgaatctgctttactattgtgtcatcatgatgaacatcgacgatacgacgtctccaatggcccacccgatcggtccatctcagcctccttccgaccaaaccaaacaagatccgccaagtttgccccaagaagcagcttcttctgtttcggccgacaagaaagatctagctttgcttgaagagaaaccgaagcagagtcaagaagaagatagagtggacactgggagagagaggttaaagaagcatcggagagagatcgctggtagggtttggataccggagatatggggacaagaagagcttcttaaggattggatcgattgttcaacgtttgacacgtgtctagtccctgccggaatctcgtctgcacgtactgctctcgtagaggaagctaggcgagctgcttcagcttctggtgggttacataatcgttgcttgatcttacgttgaatttaatataataagataacatacttataaatgtggttcttgttcctcaataatataaggcactattgttacattgttgataatattctaactcattttactcgtaactttatgaaacattacaaaaaaaaaaaaaaaaa

SEQ ID NO: 1063 - DNA, 782 bp, Arabidopsis thaliana
  Clone ID: ARATH-23APR03-CLUSTER55755_1
tttttttttttttttttggacaagagccgtttggacaagagccaaatgaccattcaaattgtcttataaagtcaatagattgtaatgacaaatgaacaaacaatccaaaccaaatacatgatgagagacaatattcctctgttcccaaggtaaatcatctgggaataacaagaaaaagacgagaaaaattgatagaaggatttgctcaaatagtatagaaatgcaacaatgatgtatgctaacaacaatctgatttctgttcaggcatagttcaacctgaatatatcgttgaacacgtaaaagcttccttgtggcgtcggcatcaaatgaaacatctggctgaacttgagagcgtgttcttctccggcgagctggagattaccggaaacgaaaacgagcataccggaagcaggaccagaaggctgacaatcaacggtggagatgtgatgcttgcactgctggaaaggaagagaggtgagcttagcgacgatgctctggactccttggatcttttgaccttcgaaggtgagcatagaagcttcctgatagagaccagcgagaccgacacggttggtgtcgaaggtggaatagtaatgttcgacgaaggccttagatacagcgtcgggatccatctgagacatttttagagagagcgatgccgatgatgagagattgagcagcagaggattgagaggatttgggagacgctaaagggttttggtttttctatttattctctgacctgttgtttaacttcgcgtctctacgacgctgcttttctt

SEQ ID NO: 1064 - DNA, 1690 bp, Arabidopsis thaliana
  Clone ID: ARATH-23APR03-CLUSTER5579_1
gaagaataaaaacgatgttggcgactcacgcgctggtgactccgattccaaagttgactgctttcgtactctctctatctactactccatcaagattgtctggttctgttccgggtttgattgatttctaccgtcgccggagattttgtcgtgtaatcacctccatggctgaagcgggatcggtttacgtcgatgtagctggggaatcgaagtcggagcatgttactgggaagtggttttcggtgccggagctccgactgcgtgaccaccggttcatagttcctcttgattattccaaaagttctcccaaaattaccgtctttgctcgagagatcgttgcggttgggaaagaggagcaagcaatgccgtatttattgtatttgcaaggtggtccaggatttgaaggtccaaggcctagtgaagctagtggatggattcaaagagcttgtgaagagtttcgagtggtcttactcgatcaacgaggaacaggcttgtccactcctttaacatgttcctctatgcttcaattcaaatcagcaaaggaattagctgattatttggttcactttcgagctgataatatagttaaagatgctgagtttattagagttcgtcttgttcctaaggctgatccttggacaattttgggtcagagtttcggtggcttttgtgcacttacatatctgagttttgcacccgaaggactcaaacaagtgctaataactggaggaattccaccaattggtaaagcatgtacagcagatgatgtatatgaagccggttttgaacaagttgctcgccaaaatgaaaaatactacaagagattccctcaagacattgagattgttcgtgaactcgtaaattacttggctgaatctgaaggtggcggggtacctctcccatcaggaggcattcttactcctaagggtcttcaaactcttggtctttctggtttaggatcaagtactggttttgagcgcctgcattatatgttggagagagtatgggatcctattttagttactggagctccaaagtgtattagtcagttcttcttaaacgcttttgagagttggcattcttttgatacaaatccactatatgctcttctccacgaggccatatactgtgagggtgcttcatcaggatggtctgctcatagattacgggataaatatgagtacaaattcgacgcaatgaaggcagtcaaagaaagtcagcctgtactcttcacaggagagatgatatttccatggatgtttgatgaaattcatgccttgaagccatttaaagctgccgccgatcttttggccaagaaagaggattggcctccattatatgatgttcctagattgcagaataacaaggtgcctgttgctgcagcggtttactacgaagatatgtatgtaaacttcaagctggtgacggaaacagcttctcatatatcgggtatcagactttgggtaacgaatgagtttatgcattcgggtcttcgtgatgctggaagacaaattattgatcatttgttgggaatgatcaatgggaaaaagcctctcttttgattccttgtactagtcagtactttgtgacttgtggttttcttcgttatacactttctttgagaattaaatgagtaaaaaagaaagagaatgaataaaagaaagtctttcaagttttggctttcctttcc

SEQ ID NO: 1065 - DNA, 1505 bp, Arabidopsis thaliana
  Clone ID: ARATH-23APR03-CLUSTER5605_1
aagaaaccattgtgttagatattcaaacaaaaaaaaagaacgtcaaaaacatcagactgatcaccatcactctttgattagaatgagcaactcaaagtcatactggagaaagcaaagatggggaacgccgccacaagccctaacaccgttaatggaaggaccagatccagacatgcaagacgaaagaaccaagaaggagagctcatgggaagcaattagagaatggtttaaggttcataagggcatttctggaaatatgtcatctccttcggtccaaccactttgcaacagctatgacgtgccagctaagggacaagacttgaggctcttgctcggcgtcttgggttgtcctcttgctccaatctccgttgtcgtctctgacctatttcccgatgaccctcttcttggttctttccaaatcaagaatgtcccatttgagacgtcgacagcgcattatataatacaacaatacttagcggcgacgggatgtctaaagcgagcgaaggcggcgaaaaacatgtacgcgacggggataatgaaaatgagttgctgtgagacggagatagccgccggaaaaagtgtgaagacactaggcggtggtggaaacggtaggagcggagatagtggttgcttcgtgctgtggcagatgcagcctggaatgtggtctctggagcttgttctcggtggaactaaactcatctctggctcggacggtaaaacagtttggcgccatacgccatggctcggtactcacgccgctaaaggccctcaacgtccacttcgtcgtctaatccagggcttggacccaaaaaccacagcaagcctattcgcaaaggcccaatgcttaggcgaacgaagaatcggcgacgatgactgtttcgtgctcaaagtctccgccgatcgtgactcgttgttagaacggaatgacgccggagctccggcggaggttatacgccacgcactgtacggatacttctgtcagaaaagcggtctattagtctatttagaggattcgcacctcactagggttatgacgatctcgcctgaggacgaggcggtttactgggagacgacgatcggaacaagcatcggagattaccgtgacgttgacggagtagccgtcgcgcattgtggtcgtgccgtcgcgacggtgttccgatttggggagacgtcgttgcagtatagcagaacgaggatggaggagatttggaggatagacgacgtcgttttcgatgtgcctggtctctctttggactcctttattcctcccgccgatatatttgaagatactaaccctaacaataataatatttacagtattgttaattcccgatgattatgtggactagtttaataaccagaaaacaattttattggtgggttaattcgttgatggtatatgtatgtacatgtttgttctataaaatctaaaaatccatgttttgttattttgggttgtaagcttgtaagattatgacgagttctaaaaaaaaaagggcctggat

SEQ ID NO: 1066 - DNA, 3035 bp, Arabidopsis thaliana
  Clone ID: ARATH-23APR03-CLUSTER5611_1
gggtaacaaccaaaaaataattcacctgagactcacattctttaaggttttcgcatttaatatttcactttcttgaaatctcctatatttttgttatatatggtcgtcggcgatgccaacggcggtgaatgtagcgaaacaatgcttaacggcagaagcatcctacgcattagaagaagctgtgaacgttgcacgtcgaagaggacactcacaaacgacgtcgcttcacgctatctcagctttactctctctaccaacctcagtcttacgtgacgcatgtgctcgtgttcgtaactctgcttactctcctcgtcttcaattcaaagctttagatctttgcttaagcgtttctttagaccggatccagtcgggtcatcaacttggatctgatgattcaccacctgtttctaactctctaatggctgcaattaaacgatctcaagcgcatcaacgtcgtttacctgagaacttcaggatctatcaagaaatgtcacagagtcagaatcagaactcactttcttgtgtgaaagtggagcttcgtcagttgattctttcgatcttggatgatccggttgtgagccgggtttttggtgaagcgggttttcggagctccgagttaaagctttccattattcgacctgttcctcatcttcttcgttattcatcacaacagcctctgtttctctgtaacctaaccgggaatcctgaaccgaatccggttcgatggggtttcaccgtaccaagcctgaattttaacggagatttggattaccggaggattagcgcggttttcacgaaagataaagggaggaatcctctgcttgttggtgtatcagcttacggtgtactaaccagttatttaaattcgctagagaaaaaccaaaccgacgggatgattctcccgacgaagcttcacggtttaacggcggttaacatcggttcagaaatctccgaccaaatcagcgtcaaattcgataaaacctacaccgacactaggtttcatgatctagggaagcttgcagagcaaggttcaggacctggactactcttacactacggtgatcttagggttttcaccaacggcgaaggaaacgtaccggcggcgaattacatcgtgaatcggatttcggagctgttgcggcgacacgggagaagagtgtggttgatcggagcgacgacgagcaacgaggtttatgagaagatgatgagaaggtttccgaatgtggagaaagattgggatttgcagttactcaccatcacttctcttaagccttgtttgcctcacaacaagtccagtttgataggatcatttgttccctttggtggattcttctcaacaactccttctgaactgaaactacccttctccggtttcaaaacggaaatcaccggacccgtttcttcaatatccgatcagacacaatctaccttgccaccttggttacaaatgaccacaagaactgatttaaaccaaaaatcaagtgccaagtgcagaccaaagaagggttggaatcagtttgtggaaataagttcacgagcagtgcttctgcatcgacctgttcagctaaatcggtcaccactgatctgaatcttagggtaagttcagtcaccacaggatccggtctcaagaagcatttggatagcaaagatttttctcagccacaatctgtgtcctcctattcctttgataacccaagggacctcaacgcagagagtttcaagattatttacagaagattaaccgatatggtttcaggacaagatgaggctgctagagttatcagctgtgcactgtcacaaccgcctaagagtgtcactcgaagagatgtttggcttaatttggttggtcctgatactgtaggaaagagaagaatgtcgcttgtccttgctgagattgtgtatcaaagcgaacacagatttatggccgttgatcttggtgccgcggagcagggaatgggcggttgtgatgatccgatgaggttgagaggaaagacgatggttgatcatatctttgaagtgatgtgtaggaatcctttctgcgtggttttccttgagaacattgaaaaagctgacgagaagctgcagatgagcttgtcaaaggcaatcgaaactgggaagtttatggattcacacgggagagaagttggtatcggaaacactatttttgttatgacgtcatcttcacaaggttccgcaacaacaacatcttattctgaagacccacgcttccgtacggctgcgagaagacgacagaaggggattgaaactgtatctagtttaccaatggtgcgatcggtttacggcccaacctcggtgaacaagaggaagctgatgggattagggaatcttcaggagacaaaagatactgtggagagcgtaaaacggttaaacagaacaactaatggagttcttgatctgaaccttccggctcaagagaccgaaatcgaggaaaaatatcattgtgaagagaactcaaacgtttggttaatgaacttgaagaatcataaacgtctcattgaggttcctttcaagccttttgattttgaaggactagctgaaaaaatcaaaaagagcgttaaagaaaatttcgacaagtgcgtgagatcggattgcttgctggaggttgaccctaagatcatagaacgattgctagcggctgtttatttctcagatagtagaaaagatatcaaagagttgctggagaatataatgagtccagtgttcttgagaattaaagaaaggtatgaaatcactactagttgtgtagtaaaattagttggtcgagatcttgacatttttcttgaggatcaaatggacttgttctttgtaaaatctcagtaggttaaagagaactttatatggaaagtgtatcatataaggtagagttagtaataggtattattgttcttttgtgttgctatactatgataatgtgtgttcctgtagttatgatgatgagttgatctttctccttgtttattttatatgtatgtaaatagttatttacattctattttattttacctgttttaaac

SEQ ID NO: 1067 - DNA, 1121 bp, Arabidopsis thaliana
  unsure (1)..(1121): unsure at all n locations
  Clone ID: ARATH-23APR03-CLUSTER5634_1
aatcatcactttcacaatcttcttcatcgatttctctcttccaaatctcccaaaagatgtcgaaccctagagttttcttcgacatgagtctcagcggtactcccatcggacggtccgagtcggcgctttacgcagttactcctcactatcggcaccgcttcaccaaccctaatttgccatcatcactttcacaatcttcttcatcgatttctctcttccaaatctcccaaaagatgtcgaaccctagagttttcttcgacatgagtctcagcggtactcccatcggacggatcgagatggagcttttcgctgatacaaccccaaacacggcggagaatttccgtgctctctgtaccggcgagaaaggaatgggaaagctaggtaagccacttcacttcaaaggatcgatcttccaccgtgtgattcccggattcatgtgtcaaggaggtgatttcaccgccaagaacggaaccggtggtgaatcgatctacggtgctaagttcaaggacgagaactttatcaagaagcatacaggagctgggattctctcaatggctaactctggtcctaacactaacggatctcagttcttcatctgtaccgataagacgtcgtggttagatggtaagcacgttgtgtttggacaagttgttaaaggcttggacgtcgtgaaggcgattgagaaagttggatctgattctggaaagacttccaaagtcgttaccatcactgattgtggtcagctttcttagatctgagtgagaaagtgagagactttgatctttatgagtaataatggtgtcttttgctttcggttgttcttcctcttaccttaatggattattctgtttagggtttgagttttcgtttcagagtttgtaacaaaacccttttgtgttttctggggtttgaaataattatgagcttacccaattgcttctttgtgtttttgcttctatgaacaagtagtaactgattcgtcttctgattcttcaactgaatcgtgaatcttaaaaaaaaaaaaaaaaaaaaaagggcggccgcacacgcaaatctgtttaacggatacagcgannnnnnnnnnnnnnnnnnnnnnnnnnnnnnnnnnnnnngnnnnnncg

SEQ ID NO: 1068 - DNA, 3081 bp, Arabidopsis thaliana
  Clone ID: ARATH-23APR03-CLUSTER5651_1
ggaaaataaaattaaaggtagaaaaattaatttaggaaaaaaatattcggaaagttctgtgaaaagtcttcggatttagaacggagacagcgagaggatagagcgcttcttcggctacaacaagctttcgctaatggcggtttccttctgatcactctcaccggagccgtcatcttctctgttttaccgatttttaggaaattttgattgtggtggaaacttgttgtggcaactctactgagaaagtttgaagaagctggaatcaaagatatagctagagttaagagggttcatactaacttgtgctcgttttgtgatgtgctgttgttaacgtttggaggaaaaagttgtagtgtattaaaattcagcgtccgagttctggggcggagttgccccatagcattgactttacgcctctacacatagtccgaagggctaattcagctcaaaacatgatgatggatgaagatgttgagcaggccagtttgatgtctttcaatgacaggcctagggcttttcccaacatgcgtagtaaaacctatagtccactgatattccggattattaggaaattaaatgtccgtgtcctttcgataattctgcttttctgcttcggagcaatcttttacatgggggcaagtacttctcccatcatcgtgttcgtcttcacagtatgcatcatcagcttccttttgtcaatatatctaaccaagtgggttttagcgaaagatgaaggacctccagagatggttgagatatcagatgctatacgtgatggagctgaaggttttttcagaacgcagtatagcactatatccaagatggccattttgctagcttttgtgattctttgcatatatctattccgtagcttaactccccagcaagaggctgctggtttaggaagggcgatgtctgcttatattactgttgctgcatttcttttgggggctctatgctcaggtattgctggatatgttggaatgtgggtgtcagttcgtgctaatgtgcgggtctccagtgctgccagacgatctgcgagagaagcattgcagatagccgttcgtgctggtgggttttcagccctggttgttgttggtatggctgtgattggtatcgccatcctctattctacattttatgtgtggttgggcgtgggttcaccaggctcaatgaatgttactgacctacctcttcttcttgtcggatatggttttggtgcttcgtttgttgccttatttgctcagttgggtggtggaatatatactaagggagctgatgttggggcagatctcgttgggaaagttgagcagggaattcccgaggatgatcctcgaaatcctgctgttattgctgatttggttggagacaatgtgggggactgtgctgctagaggtgctgatttatttgaaagtatagctgcagaaatcatcagtgcaatgatactaggtggaacaatggctaagaagtgcaaaattgaagatccatcaggctttatcctttttcctctagttgttcattcttttgacttgattatatcctcaattggtattctatcaatcaagggaacacgtgatgctagtgtgaaatctccggtagaggatccaatggctgtacttcagaaaggatattctctgacaattatattagctgttataacatttggcgcgtcgactcgctggctgctttacactgaacaagctccatctgcatggttcaatttcgccctatgtgggttggttggcatcatcacagcctatatctttgtctggatatccaaatattatacagactataagcacgagcctgttcggacgttggctcttgctagctcgactggtcatgggactaatatcattgctggagtaagcttgggcctggaatcaactgctcttccagttttgactataagtgtagctattatttctgcgtattggttgggcaatacctcgggtctagtggacgaaaatggtattcccactggaggtctatttggaacagccgttgctacaatgggaatgctaagcactgcagcttatgtccttactatggacatgtttggccccatagctgacaacgctggtgggattgtcgagatgagccagcagccagagagtgtccgtgagatcactgatcttcttgatgctgttgggaacaccacaaaagcaacaacgaaagggtttgccattggatctgctgcacttgcatcattccttctctttagtgcgtatatggacgaggtttcagcgtttgctaatgtgtctttcaaagaggttgatattgctatcccagaagtgttcgttggtggattattgggtgccatgcttattttcctctttagtgcttgggcatgcgcggcagttggtcgaactgcacaagaggttgtcaacgaagtaagaaggcaatttattgagaggcctggcataatggagtacaaggagaagccagattatagtcgctgtgtcgccatagtcgcatctgcagctttaagagaaatgataaagccaggagctttagctattgcatcacccattgtagttggtttggtgtttcgaatcttgggttactacacaggacaacctctgctcggagcaaaagttgtagcttctatgctcatgtttgcaacagtttgtggtatcttaatggcacttttcctaaacacggcgggaggtgcttgggacaatgcaaagaaatacatagagaccggggcacttgggggcaaaggaagtgaagctcacaaagcagctgtgactggtgataccgtgggagatccgttcaaggacacagccggtccatccattcacgtcctcataaaaatgcttgcgactataactctcgtcatggctccggttttcctctgaaagtgaaccgttacttatccatcccggcttatttactctcttgcacatatacaaatagagagggagagaggttggttataaaatgatttacatggattaatggtttttgtgtttcatttcatctgaataaatgagataattctgtttttgagtttagagacactctttaaggaattctagagacattttaatcaaccacatctttgactttgagagtctt

SEQ ID NO: 1069 - DNA, 2418 bp, Arabidopsis thaliana
  Clone ID: ARATH-23APR03-CLUSTER5661_1
aaaattttcacatttggaaggatctgatctgaaacaatggcagtgagagcaacggtgtcgcgttttccgatcgattcagacgctcaagaggcgtcaggacttccttggggactgacagtaacaccattcgcggccaaagacgagaacggaatcggaccagcgtgcggatctaacggtcatcttcttcctcgttgcgaaaactgctacgcttacttcaatacctattgtgagcttgatcaatgggcttggaattgctcgctttgtggaactctcaatggacttccttctgatgctattgctcgttactctaatcctcactctatacctgaaatgacttcctccttcattgatcttgagatgcctctggatggatcggaggaagagatgacgcaagcacgacctgtgtatgttgcggcgattgatatctcttcttctgaggaatttttggagcttacaaaaagtgcattgctagccgctctggaagctctaagtccaggggctctttttggtcttgttacgttcagtcacaaaataggactgtatgatgttcaaggacctataccagttgtaaagaatgtattcattccccctgatggggagagcagcttatcgctagaacttgaggatgtcatgcccttgttacaatttttggctccggtagaaacttgcaaggatcgtattgctgctgcacttgagacactcagaccaattacttcttgggagagatcagctggagcaggtcaagggatggatagtgtgttgatgggtggtaggggctttggtacagctatggaagctctattcaactatctaggatctgaatttgggaatacatttgcattagctagggtgtttgctttcctatctggtcctcctgattatggacgtggacaattggatacaagtagatatggtgaacaatatgcaagtaaaagggtagatgctgatcgtgctctacttcctgaacaaacaccattctacaaagacctagccaccattgctgtccaatcaggtgtatgtgtagatttatttgcagttacaaatgagtacacagatttagcatccctgaagttccttagcattgaaagtggcggttcactgtttttgtattcaagcactgatgattcaactcttccccaagacatgtttcgaatgcttaaccggccgtatgcattcaattgtgtcttgagattgaggacgtcaactgaattcaaacctggcaactcttttggtcacttctttccagatccacagtacgagaaccttcagcatatcatctgctgtgattcatatgcaacatatgcatatgactttgaatttgcagataacactggattttccaggcattctggagagcaaccagtggtgcaaattgcatttcagtacacagttgttgtacctcccgagggactgtcaaattcagaaatgtcatcttcaagtagaggcaagcacacacttcagagacgattaaggatcagaaccatgcaatttggaactgcccacaatatcaatgaaatttacgacagtgtggatcatgaagttgttctctcattgctcgttcacaaggtaattttagcctctctggaagatggagtcagagaagggagggcattgctgcatgattggctagtaattctaacagcacaatacaacgatgcctttaaccttgtccaatacaaaaacggaaataagtcaatgagttctcagattgatatcacgttttcacaatgtcctcaacttgagcctttgcctcgtttagtctttgccttactccgtaatccccttctccggtttcatgaagaaggtgttcatcctgattacagaatctacttgcaatgccttttcagtgtgttggacccgagctctcttcattgcggcatttacccagcactaatgtcatattcaacaccggatacactggcatatccgcgtcattcgttgagccgtgcagcattgataacaagtggtagtccgatatttttcctagatgcatataccactttgatagtcttctactcatcaacagcagacccgtcaatacctttccctccacctcaagactgtttattgaggcagaccataaataaagtgaagcaagaaaggagcatcacaccaaaactagtgtttatccgaggaggacgagacgatgctactgtctttgagaactatcttatagaagaacaagatgtggacggtaatggttttgctagcgccatgggtttcgtgtctttcctcgatgatatttcgcagcgtgtcactgaatacatgaagtgaaagccaaatgaccctctagtttattatacatccaaactcaaaattttcaactgtgtcagagttttactcttcttgttgtaacatttgctttagactagcatcccaacttttttgctctcttaatcaaaatgaataattaagctg

SEQ ID NO: 1070 - DNA, 2036 bp, Arabidopsis thaliana
  Clone ID: ARATH-23APR03-CLUSTER5688_1
aaaacttaataaagcctcgtactgagagatcaaaacaaaacaaaacaaaacccaaacacttaccaaatcaatcaattatcgagaatcttccttcctttaatcctcaaaaaaaacaaaaacctttcttcacctcctttccttgattcatcctctaggttaatgggtgttttctcgaatcttcgaggacccagagccggagctacccacgatgaatttccggcgaccaatggctctccttcgtcttcttcttctccatcttcatcaatcaagcgaaaattatcgaatttgttaccactctgcgttgctctggtagttatcgctgagatcgggtttctgggtcggctcgataaagtcgctttggttgatacgttgactgatttcttcacccagtctccgtcactctcgcagtctccaccggcgagatccgatcggaagaagatcggattatttactgataggagctgcgaggagtggttgatgagagaagattcagttacttactctagagattttactaaagatccaatttttatctctggtggtgaaaaggactttcaatggtgttctgtggattgtacatttggagatagttcagggaaaacaccagatgctgcgtttggattaggtcagaaacctggaactcttagtataatacgttccatggaatcagcacagtattatccagaaaatgatcttgcacaggcacgacggtgggagaggttatgatatagtgatgaccactagtctatcatcagatgttcctgttggatatttttcgtgggcggagtatgatattatgtctccggtacagccaaaaactgagagagctattgcagctgcttttatttctaattgtggtgctcggaattttcgtctacaagcacttgaggcattgatgaaaactaacattaagattgattcttatggtggttgtcatcgaaaccgggatgggaaagttgacaaggttgaagctcttaagcgatacaaattcagtttggcttttgagaatactaacgaggaagattatgtcaccgagaagttctttcaatccttagttgctgggtccgtccccgtggtagttggtcctccaaatatagaagaatttgcgcctgcttcggactcattccttcacattaagactatggaagatgtagagccagttgcaaagagaatgaagtatctcgcagctaaccctgctgcttataatcagacactaagatggaaatacgagggtccttcagattctttcaaggcacttgttgatatggctgctgtacactcttcttgccgtctctgcattttcctggccacgagggtccgagaacaagaagaggaaagccctaatttcaagaaacgaccgtgcaaatgtagcaggggaggatcagacacagtttatcatgtttttgttagagaaagaggccggtttgaaatggaatcagtctttttgaggggtaaaagtgtgactcaggaagctctagaatctgcagttctcgccaagttcaagtctttaaaacatgaggcagtgtggaagaaggaaaggcctggaaacttaaaaggagacaaagagcttaaaatacatcggatttacccgcttggcctaacgcaacgacaggctttgtacaacttcaaattcgagggaaattcgagtctaagtagtcacattcaaaacaacccttgtgctaaatttgaggttgtcttcgtctagtttcattcctctggatctgtcacaggtatcatctcagctaagaagacatttctctgtgctagaatcgcaaagtgctaaacaaaccgattagatgaaacaaaaggttaatagtcatgagattggtgaactcattttgtttaggcagtgtatctgtaaatcgttctgacattgcagacgatgtgttcttgatagctggatgcataaatgtttgaagatttagagcaatttgatagttttgaatctcttgagagtgtgttaattaatctttaaatttttcctgggttaaaaaaaaaaaaacacaattagtctcacaagaagattatcaagttct

SEQ ID NO: 1071 - DNA, 1692 bp, Arabidopsis thaliana
  Clone ID: ARATH-23APR03-CLUSTER5710_1
gagagatctttcctgcgaagcacccccccccccggagagatctttcatcttctaaatcgaagatggttcctaagatcgcatcaatggcgtctactagacctctcagttcacttccttacttgttcctctccttgtctctcctcttcgtcgtctcgcttctcttcttcttctccaattccttaatctccaatccaaatccgagcatttcacacaatactctccaaaacggtatcaatgtctatgtagctgagcttccaagatccctaaactatggtcttctcgacaaatactggtcctcttctactccagattcacgtatacccaccgacccagatcacccgacccgtaaaacccatttacccaaacccgatacacacccaccgtacccagagaatccgttgatcaagcaatacagtgctgagtactggatcatgggagacctagaaacctcaccagagaaacgaattggatcttttgctaaaagggttttcagtgaatctgacgctgatgtagtcttcgtgcccttctttgccacgttaagtgcagagatggagcttggaaatggtaaaggttcgtttagaaagaagtccggtaacgaagattatcaaagacagagacaagtgcttgattttctcaagaacactaaagcttggaaacgatctaatggtcgtgatcacgtttttgttctaactgaccctgttgcaatgtggcatgttcgtgaggagattgctttatctattcttcttgtggtggattttggaggatggtttaggcaagattctaagtcgtctaatgggactagcttgccggagaggattgagcatactcaagtctctgtcattaaggatgtgattgttccatatacgcatctgcttcctagattggatttgtctcagaaccagagacgtcatagccttctttatttcaaaggagctaagcacagacatcggggagggttaatcagagaaaaactatgggacttgttggtcaatgagcctggcgttgtcatggaagaaggttttcctaatgcaacaggaaaggaacagtcaataagaggaatgagaaactcagagttctgcttacatccagctggtgacactcccacttcatgccgtctctttgatgccattcaaagtctatgtatccctgtgattgtcagtgacaccatagagctcccgtttgagggaataatcgattactcagaattctcggtttttgcctctgtaagtgatgcattaacacctaagtggttggctaatcatctcagaaggttctctgaaagagagaaggaaacattgagaagtagaatagcaaaggttcagtcagtttttgtgtatgataatgggcatgccgatgggattggacctattgaaccagatggtgcggtgaatcacatatggaagaaggttcagcagaaggtgccaatggtgaaggaagcagtgattagggagaggagaaaaccagcaggggcttccgttccacttcgatgtcaatgtatctaaataatgcaaccaatccaaaagatagaaagtgttcctttgattttgttggtcttttcttttgtacttgtttcgtttacgaacattgttatggccactttaaaatccatgttccttagggttcaaagaaaaaaaaaaaaaaaaaaaactcgagggggggcccggtactgaatcatgtaagaggtttcattat

SEQ ID NO: 1072 - DNA, 1263 bp, Arabidopsis thaliana
  Clone ID: ARATH-23APR03-CLUSTER5752_1
gacattcctctcttctctctctcttttcccaaaaaccaaaaccttttttccgtaccaaggtcaacaaatggcggcgaaagtaattacatttatggcggttatggtggttactgcctttacggccaacgccaaaatccccggagtttacaccggtggtccttggatcaatgctcacgccaccttctacggtgaagctgacgcttccggcactatgggtggtgcgtgtgggtacgggaatttgtatagccaaggttacggagtgaacacggcggctttaagcactgccttattcaacaatggtttgagttgtggctcttgctttgagcttaagtgtatcaatgatccaggatggtgtcttcctggaaacccatcaattcttatcaccgccactaatttctgccctcctaactttaatcaagctagcgacaatggtggttggtgtaatcctcctcgtgagcactttgatctcgctatgcctatgtttctttccatcgctaagtataaggctggtatcgtccccgtctcttaccgcaggatcccatgtaggaagaagggaggaatcagattcacaatcaatggattcaagtacttcaacttggtgctggtcactaacgtagccggagctggagacgtcattaaggtgagtgtgaaaggatccaacacacaatggttagatctgagccggaactggggacaaaactggcaatccaacgcacttcttgtcggccaatctctttctttccgagtcaaaacctctgatggccgaagctccacctccaacaacattgctcccagtaactggcaatttggccagacctactccggcaagaacttccgcgtctgatttctagaatatgaaaaagagtcgtgtggcggaagatactaaagcttttttttatatcaaatatatatatttacgtgtctttgatttagtttacgatttggaattggggttttaccatttttcccttattttctcagggaaagtattgggattgcttggtttgcaagttagggtttactttaaagattagggctatattgttttttttgttttttttggtgtgttgtgtcttgtttggtatgtagtcttgtagagaggctgaagcggctgcagaaagaaagggttgggataaagattcatgtagcccgcagctctcttttacgttatgattgtattaaagtatatatatatcatgaagaaattaaacatggtttcttcgatttatataaataaaaaaaaaaaaaaaaaagggcggccgc

SEQ ID NO: 1073 - DNA, 909 bp, Arabidopsis thaliana
  unsure (1)..(909): unsure at all n locations
  Clone ID: ARATH-23APR03-CLUSTER5757_1
aagcgnagctnccgcgggcgctcgctcctggcggaccctcccccccccccccgagactctctcttctcatctctctctctctctctctcttcaaaccctaaaaattcacgcattttggcacagttaagttcgctgaatcccgttcctcttcctctgtctctctccccaagaaaatcactcagatcaaagctcaaatttcggatctcacagctgtcgcttcggtagaggaaaggatgaccagagaacatcctcccgagcctcttgatttcttcatctggactgttgaggatgttgggtcttggctcgaggagataaaccttgggggctaccgccagattttcaaagaaaatggtgtcaatggagaatatctagaaagcatgtctgtgtttactaccgagcagatccttcacttcataaggaggcatcacatgaagtggggagacttcatcaccctctgtaaagaactcagaaggattaaagtggcttgcttgaaaggtgagcagagagttagacggccatggtgggcaccgtcttgtctatccgtagtctttgttaaggcagccaaacgcaaccgacagtctcgtgttgtatctctcaagcttgaatcttgacattacactttggctgtttatgtacgtacttgtctctcttctcttctcttgttttcttttcctttttttttttttttggtttgggtttgtttgtggcacatgcactaggaagaaacaaactcaagtcaaaaaagctgtttggcttggtgaaatcttgcaagcgggaaaaaaattatgcgttttgtactttggtggtgtatacaaagcttgctctcagatgtttaatatatggcttgtgcaatctttatgtgacagataatagtgtgaccaaaaaaaaaaagtaatttgattataaaaa

SEQ ID NO: 1074 - DNA, 1382 bp, Arabidopsis thaliana
  Clone ID: ARATH-23APR03-CLUSTER5794_1
tttttttttttttttttgtacatagaaagttctcattacttggaattattaacatgataatcccccaaaaaaacaaatcaatatctaacctagcaacaatgacggaaggaaaataaatataatcaaaaacaaacctaccaaatactgtttgttccccatagccacactccatagacataacaaacaataaactatggaaaaagatagaatttgatgtgataaaacattcattaattggatctatatatatctttcatgcctccacaaaaagaaaaccatagaacattgaacaaaatgaagactaatctttttctctttctcatcttttcacttctcctatcattatcctcggccgagcaatgtggtcgccaagctggaggagcactctgccccaacggtctatgctgcagcgagttcggctggtgcggtaacaccgaaccatactgtaagcagcctggctgccaaagccagtgcactcccggtggtactcctcctggacccaccggcgatctttcgggcatcatttcaagttctcagttcgatgatatgcttaagcataggaatgatgccgcttgtcctgctagaggtttctacacttacaacgcctttatcaccgctgcaaagtccttccccggttttggcaccaccggagacaccgccacgaggaagaaggaggtcgccgccttcttcggccagacttcccatgaaactacaggtggatgggctacagcaccagacggaccatattcatggggctactgtttcaagcaagaacagaatcctgcttcagactactgtgaaccgagcgccacgtggccatgcgcatctggcaaacgctactacggaagaggaccaatgcaactgtcgtggaactacaattacggtctatgcggtagagcaataggagttgacttactcaacaaccctgaccttgttgccaacgacgcagtgatcgctttcaaagccgcgatttggttctggatgactgctcagcctcccaaaccgtcttgccatgccgtgatagccggccagtggcagccttcagacgccgaccgtgccgccgggagattaccgggttatggagtgattacgaacatcattaacggtggattggagtgtggacgtggccaagacgggagagtcgccgatcgtatagggttttatcagaggtattgtaacatatttggtgttaatcctggtggtaatcttgattgttacaaccaaagatccttcgttaacggcctcctcgaagctgctatttagtaacgagagtattattattataatataatacgcagctttgtattatcaaaacaataatatcagactaataaaactctttccaatgatgttacaaaaaaaaaaaaaaaaagggcggccgc

SEQ ID NO: 1075 - DNA, 2044 bp, Arabidopsis thaliana
  Clone ID: ARATH-23APR03-CLUSTER5799_1
ggtagcggacttgtggctgtaaatttacttgtctcacacttgtctcttctacacgtcttctcttccgaccacacccttcattcaattcaacgtctcctctctggctctctctctcaaatatataaacaccaataatgtctccaatttgagatttttaactgaacccaagtcatgacgaagcttctagagattaatcatattcaaaccctttgttttgccaagggtttttctcctgccagattaaatgttgcaacttcaccttttctgatatctcgtcgtggtggtggtggatattgcagcaatgcttgtatcccttatcggttgaaatttacttgttatgcaacactatctgctgtggtaaaggagcaagcatcagactttagtggaaaagaagcagctttgcttgtagatgagctcagaagcaacttcaactctggcagaacgaagagctacgagtggagaatttctcagcttcaaaacattgctaggatgattgatgagaaggagaaatgcatcaccgaagctttgtatcaagatctttctaagcctgagcttgaagcttttctagctgagatttcgaatacaaaatcatcctgtatgcttgcaatcaaagagttaaagaactggatggctccagaaacggtcaaaacttctgtgacaacatttccctcgtctgcacaaatagtctcagaaccgcttggagttgttttggttatttcagcctggaatttccctttcttattgtctgtcgagccagtcattggagctattgcagctggtaatgcggttgtgctaaaaccttctgaaattgctccagcagcatcttctcttttagcaaagttgtttagtgaatacttggacaatacaacaatcagagttatcgagggaggagtccctgaaacaacggcactactggatcaaaaatgggacaagatctttttcactggtggagcaagagttgctcgcattataatggctgcggctgcgagaaatcttactccagtggttctcgaacttggtgggaagtgcccagctcttgttgattcagatgttaatctacaagtggctgctaggaggatcattgcagggaaatgggcttgtaacagtggacaggcttgcattggtgttgattacgtgatcacaacaaaggattttgcatcaaaattgatagatgctctgaagactgaactggagacattttttgggcaaaacgcattagaatcaaaggacctgtcgcggattgtgaactctttccacttcaaaaggttggaaagtatgttaaaagagaatggagtagccaacaaaattgttcatggtggccgaataaccgaagataaacttaaaatatcaccaacaatactactggatgtgcctgaagcatcttccatgatgcaggaagagatatttggacctttacttcccataattacggtacaaaagattgaagatggctttcaggttatacgttcaaagccaaagcctttagcagcgtatctcttcacaaacaacaaagagttggagaaacaattcgtgcaggacgtatcagcaggaggaattaccatcaatgacactgtcttacacgtgactgtaaaagatctgccatttggtggggttggggagagtgggatcggtgcttaccatgggaaattctcgtatgagacgtttagccataagaaaggagttctttaccggagcttttcaggggacgcggatcttagatatcctccttacacaccaaaaaagaagatggtgcttaaggctttgctctcttcaaacatatttgctgccattttggctttctttgggttctctaaagactcatgatcacatgttataatcactgaacttgctggaatagtacaactgagaaagttgaatatttccatagagaaactaagatcaataaaactatagcctcccctatatatgtaaacagtgaataattttagttacttgaataacaattttacatagttactaggacagctaattatatattgaaaattccttctgccaaaaaaaaaaaaaaaaaaaaaaaaaaaat

SEQ ID NO: 1076 - DNA, 1769 bp, Arabidopsis thaliana
  Clone ID: ARATH-23APR03-CLUSTER5816_1
ccaatcaaagcgtgacttcttcctcggtctttttcttgaggttccaatctttttgacttcatacaccatttcttttgcttacaacactttcagataaaagctatagattcagtattttgatccaacgtgtcatatattaacccttaagcaagattagtgaagtgacgagcctttaagatttgttattcttacaagcagcttgcagaagagaaagagaaacaaaactcccgtatttgattctttcttcaagatatcaatcaagatcaagagtaagacagagacacaaaggcgagagctatgtcgtcgtcggtggatttcgtgacggaacaggggagatgcggcgacgatggtaacggcgccggagagacagtaaagaatggcgaaattgatcatttgctttccgaaccgtcggctccgactatttctctccctacggaatctttcctcagagcagcgacgttactcaagaaccaggttgtggaggccacgtggaaaggtggtgtcgaagctcttgcctctggttcgggtccagtgctggatccgactgtgtacacaggactactcggcacagcgttcacctgcttgaagtcgtacgaggtaacgcggaaccatcaagatctgctaacttgcgcagagataatcgacacgtgtgccaacgttgcgcgtgccacaaccaggcacgtgacatttttatgtggaagaggaggagtttgtacgcttggtgcaattgtagccaattacagaggggaccaatcaaagcgtgacttcttcctcggtctttttcttgagcttgcagaagagagagagttaccagcaggaccagaggaaggaggatttgggatgtcatatgaccttctctatggaagagcgggtttcctttcttctgctctgttcctaaaccgctatctcgatcaaggaactgatcatcacaatcatgattattcgcttttccggggactagctggaccagtatgcctctgggttcgatcttgtgtcaccggtagattctaagtttcctggttatgagatataatttaaaacaggtaatagataaaccgtaggttctattatgactatctctttgtgaaaggatcttaggttctccggtttattccactttctataatctattaaaggatcagtaataggtttccgaacagagaaaactacccgtgcagcgaagggaatccgagggataagctagtccaatgggctcatggagcaaccggcatggccattactttggctaaagcatctcaggtgtttcccaaggaaagggatttccgcgaagcagccattgaagcaggagaagtagtgtggaagagtggcttggtgaagaaggtaggtttagctgatggagttgctggtaatgcctacgctttcttatccctttatcgcttaaccggagatgttgtatatgaagagagagcaaaagcgtttgcgagttacttgtgccgtgatgcgatagagctcgtgaatatgacaagccaagaaacagaacatgattattcgctattccggggactagctggaccagtatgcctctggttcgatcttgtgtcgccggtagattctaagtttcctggttatgagatataatttaaaaccaggtaaccgtaggttcttttatgactatctctttgtgaaaggatcttaggttctccggtttattccactttctataatctattgaagtaacttgagatttgggagaaacattcatagaaaacaagaataaaagtaacatgaaaagatgagcttaatggttt

SEQ ID NO: 1077 - DNA, 1483 bp, Arabidopsis thaliana
  Clone ID: ARATH-23APR03-CLUSTER58197_1
tttttttttttttttttatccaaatttagtggcctactatttatcataaaacaacacaatcattcaaacagcatccaaggtcttttagttgaggtttcttcaattacaagtctagaacgcgacacaaactactaccataattataacaagaccatacccactataagtgactacataaacatatacataacattcaacggaccggactatatacatgttaccctctgtttagtagaactcgcgatctggaaggatgagtggtgcaatgagtgtccatatgtagagtccggccgtgacccaacccgtgcatatcttgacccagaccgaggtccatcccacatcgatcagagtcgcactctctgatgagtcagtccatcccgagagaagcattgcagcgtacatgctcgcaagcgcaaagatgatatggaagaaggagtatgagtaactcacagaccgtgcctcggcttcaccactcttcttccctgtcctcagggtcccctaacaatgcatccttcacacctgagctgagcggagcaccagtctcacgaagaatccaggagacgacaagagaggcaccgaagagaccacaataagcgatcctcgctgatttcctcgatatccccgatgctaccgacgagcataatccacaagtcgccgacgcacagcacgaagctaagcaacacgccattgtttcagagatttttttttgttttagtaaaccgatataactgatgccggtaaaagactgccattcaccgcaggatgtaaagcaataatcgcaaaaacaaaagccaagatcatcggcatgacaatgaagaaaacattaagtccacaatcctgaccagatgggttgaaccagatgaacaggattcctgagaaggtatatgtagcaatgtaacacacgattgatatgacaagcagagcgatgtaccatttcttttcgtccttttcgacccatgaatcattccagttatgtgtagcatctaataataagaccacttgaaccaacagaaacgctccagcaccaaattttgacaacgttccatataacgagacgataacatttggaacaaaaaacatgaggacaacaagcaaaaaccagacaatcatcttcaaaccccacccaccatggtgccacgagtcacgcctgtcattctggtccttgacaccaatcatgatcaaagcatatattgcaaagaagaggaaattcccaaagctcacacgaagaacagcttgttgctgataccattctttggtatatgaatcagaagtattgatccaagggagtttctcgaggagcggagcaccagtctcacgaagaatccaggagacgacaagagaggcaccgaagagaccacaataagcgatcctcgctgatttcctcgatatccccgatgctaccgacgagcataatccacaagtcgccgacgcacagcacgaagctaagcaacacgccattgtttcagagatttttttttgtttt

SEQ ID NO: 1078 - DNA, 2984 bp, Arabidopsis thaliana
  Clone ID: ARATH-23APR03-CLUSTER5834_1
tgaaaagaaggtaagtttgtctgaagagaagggggcacacaagtaagtgctttgtcagatttcgcgtgcattcatcaaaacaaaaacaaaaaagctcttctttcttcttcttctctctttctttcattcattcagttttcttggctccttcctctcctttcttttctttaattttctcaattttcaaagaagaaaagttgtaccgatttttattaaacgaaaggtcactgtttgattgtgtttaagagaaagaaaaaaagtagaagaatcttttatcatcaacctgatctggtttgtgcttaactcgaagagaggaaaagacttctgttttgtttttcttggtttgtagcgcattttgcgttcttgaggtttaaagtcgaagaacaacaacagctcatacttttttatattttctggtttctgtggggctcatagagagagagaaagaagagagattttatacgattatatagctattagatttttgtggtagtggtgttgtctcatgattaagagaagctttaaagaaaactcaagtttgcttctgaggaagacaatcaagaaaaaggtttactattaaacgacaacgcttttgcaatcgccaccacaaaaagattcaagctttggattcgttttacttgtggacgactaaacaaataagagattaaaaaaaaaaaggtttcacatggttctgcgtttgtgaatgtgtgaagcacttagataacagagaaaaagaatttgattattttaaagagtttatctctgtgtgtgtgtgtcagtaaattcgagctttgagtgggtgttttgtgcatctctaagtttttatctcttttatataaaatcttatatttcttttttcaatgttctctttgagatgtgagattttcacagtgttgtctccttaagtgtgtaactcaagaagcattttggggagtgataacacacaagctgagtcttttttcttctttctgagatatcttcttctatcagtttcttcttcatcatgaagttcatgaaacttggatccaaacctgattcatttcaatctgaaggagacaatgttaggtatgtatcaagtgatttagcaacagatgttattgtcatcattggtgatgtcaaattctatcttcacaagtttccgttgctttcgaaaagtgcaaggttgcagaagctaatcacaacatcaacatcatcatcaaatgaagagaatcagattcatcatcatcatcatgaagacgagattgaaatagcagagattcctggtggtcctgcttcatttgagatctgtgctaaattctgttacggaatgaccgttactctaaacgcttacaacgtagtcgctgctcgctgcgccgctgaatttcttgaaatgtatgaaaccgtcgaaaaggggaatcttgtttacaagattgaggtgttcttgaactcaagcatactccaaagctggaaagattcgatcatcgtgcttcaaaccactagagctttgtctccatactctgaagagttgaagttaaccgggcgttgtcttgactcaatcgcctctagagcttcgatagatacttcgaaagtcgaatggtcttatacttacagcaagaagaagaatcttgataacgggttgaggaaacctcaggcggttcctagagactggtgggttgaggatctttgtgatcttcatatcgatttgtataaacgagctctcgctacaatcgaagcgagagggaatgtttcagctgatgttatcggagaagcattgcacgcgtatgcgattaaaaggattccagggttcagcaaaagtagttcagtacaggtcactgactttgctaaatacagagctttggccgattcaatcattgagttaattcctgatgagaaacgtagcgtttcttcgagtttcttgactaagttgttacgagcttcgatctttcttggttgtgatgaagtagccgggttaaagaacagagttggtgagcggttagatgaggcgaatttgggcgatgttttgctctatgatgttgagttgatgcagagcttagttgaggttttcttgaaatcccgagacccgagagaggatgatgtaaccgcaaaagcatcagttgcgaaacttgttgatggttatttagctgagaaatcgagagattccgataatttgcctcttcagaagttcctctcacttgcggaaatggtctcgagctttcctagacagtctcacgatggagtttatcgcgctatcgacatgtttcttaaggaacatccagagatgaacaagagcgagaagaagcgtatctgcaggctaatggactgcagaaaactatcagcagaagcctgcgctcacgcggttcaaaacgagcggttaccaatgcgtgtggtagtgcaagtgctcttctttgaacaagtaagagccaacaacaacggttcatcatcaaccggaaacagcacaccagaggttatacctgcttcaagatcaacaaacactactgatcaagaagacacagagtgttgggacacagaagatatcaaagctttgagaggtgaattagcaaatctaagactcgcaaagaatcaacaagagagccataaccaagggaaactgatgaaaggaggaggattaggagtttctagagtgttctcgaagctttggtctggtaaagagagaagtggagatatgataagtagctcagggacttcaagtcctggttctgttaatgatgattccaagtcttcttcttccacaagcaagaagcattagcaggagacgtaagaagcaagaaaaagatgaattaggtttgctaaaatgttcatcctattactaacttatctctctttagatccaatttctcagatgttaccattttctttcctttgtggttttgttcttccttagtaggtaatggttttttctttctgctttgttgtcactttaaaatggaagtgtttaaaaacaaaaaaaaatggttcttcaaataataaaaggtgaaatttagatc

SEQ ID NO: 1079 - DNA, 1768 bp, Arabidopsis thaliana
  Clone ID: ARATH-23APR03-CLUSTER5856_1
ctctctcacttcatctatggcttcttcttctccgcagtctctcttctctctgttttgccttgctctgttctctcaccttcaaatcgtctgctccctaacgctctggtcccatcactgcctcctctatcatcttgctcacaaccactcactacgctctctctctctctctctcacttcatctatggcttcttcttctctgcagtctctcttctctctgttttgccttgctctgttctctcttcctctcatcgtctcctccatcggcatcaactatggccaggtcgctaacaaccttcctccccctaaaaacgtcatccctctcctcaagtctgtgggagctacaaaagtcaagctctatgacgccgatccacaagccctacgtgccttcgccggctccggcttcgagctcaccgtggccctcggtaacgagtacctggctcagatgagcgaccctattaaagcccaaggctgggtgaaggagaacgtccaagcttacctcccaaacaccaagatcgtggccatcgtagtgggaaacgaagtcctcacctcaaaccagtcagccctcacggcagccctcttcccggctatgcaaagcatccacggtgctctggtggattgtggcctaaacaagcagatctttgtgacgacggctcactcactagccatcttggatgtatcctaccctccctcggccacttccttccgccgcgacctcctcggctccctcactcccatcttggacttccacgtcaagactggctcaccaatcctcatcaacgcctaccctttcttcgcctacgaagaaaaccccaaacacgtttctctcgacttcgtactcttccaaccaaatcaaggcttcaccgatcctggctctaatttccactacgacaacatgctcttcgctcaggtcgacgcagtctatcacgctcttgacgctgtcggcatcagctacaagaaagttcccattgtcgtctccgagaccggatggccttccaacggtgacccgcaagaagtcggagccacctgcgacaatgctcgcaagtacaatgggaatctgatcaagatgatgatgagcaagaagatgaggacgcctatacgacctgagtgcgatctcaccatcttcgtctttgctctctttaacgagaacatgaagcctggaccaacctccgagaggaactacggtctcttcaaccctgacggaactccggtttactcacttgggatcaagacctcttccactcatagtagtggtagtggtagcagcaactccactggtggtagtagcagtggcggtggcggtaacactggtggctcttccagcggtggtggcatctatcagccagtcacgggtaacccatcaccggattacatgtccatttcctccgccgggggaaaaggcagattcgttgagtgtgtgttgttcttcttcttgctttgcatcatcaagcttcggttgtaaaagcttctccactagatctcgtcggctttgtacttttactcggttgatgacgtgatatagcccccaaatttaatttaattagttttgtgttggtgttttggtcggaggatgatttaggagacataccatctttgttgtgccgacctcctctccaactctttttttttttccttttccattctcctttttcttgtttaagcatagattatttaaataatgaatcttagttgattagatttttctaaagaagatgatgattttcgataattgtataacttgaaggcatttgaggccagagtagtggcagac

SEQ ID NO: 1080 - DNA, 1988 bp, Arabidopsis thaliana
  Clone ID: ARATH-23APR03-CLUSTER5874_1
ttaatttttgagtggtactgataggtacaagaaacacaacaaaccctagatttatcttcatctctctcaattctgtatcaagcaaagacggattcaacgatgtcttcacctgaatcaccttccggttccgactcatccacaccacttatccgttcacggcaatcatcaccacgtcgtcaacctgtaatcgcggttctattaaatcgagcttcaggacgacgaggagcttcgatggtggttagagaaacagctgcacaagagcttgcagagcgacgagctgattggggttactcgaaacctgttgttgctttggatatgctttggaacaatgcttttgttcttgttgcgattgttatgcttttggtttttaaagaagagatgccaattgttcctattaggatttggatctgtggttatgcgattcagtgtcgtgatcatgttgtccttgattggcttgagtttagacagaggaatgctagaagcagacctggagattttgacactgattacgctactgatcggaatagagaatgggaagacaacgatttgtggttattgattagtaggacgtatgagtggatgaactctttaatatcactaggctagtggcattgttccgttcttctggctccattgtgatggtagcatccttgctaataactcgatccaatagtatttgaagactttcggtgtacttgcttatgatgagacccaaaccattttttgcggtgtcctggcatggtgtgttgctagccagttctgagatctcctaccttgtattaatgcactactttacgccgatacgtggcaggagggtgcagcaaaatcatctctcagcaccctgccggagtacacagggagcatgaaaaacatttttgctcagcgatttgatggtagtggtggaaggataccagttgctattgcgagtgatgagttaggaaacgagcgtgtgcctcttcccgagcctactcacccttatataagtttgagtatatatgaagatcaagcagagctggtctcactacctagcaaccaccactttctttctccgggcattgggaaaggagcgataatgaacactacttctaccttgtcctatctccaaatgataaaatatgatccattagagaggaagattgccgcgcaggcgcctgctcttatagttttcagattggttatattgtatatagagttgagaaacacgaacatgattgtggtgtgggtaacgcataagactttctgtttcgttaattcaattttcctcaaattctattctcttgactatcagataactaaagatgtaatgaggatgcattagttggaaaaatagccgcaatgcaatacagagataggagtcataaaacatgacacttttcgggagaatttgggtgctttcaagcaagcttgttctttacgatctcgattgaaactccagctcattgggtggactgaatacaacatgctcatcaagcataaaagtaaaagacgaaggcacaggaacagttcatctagtaggctcacattttatctcttctgcattacctttggatacctctatgtgtcttctattttctttacttctcctcatgactcttttcctcctttagagactccttatagtttatcttttgtacatagattcaacattttgctaaaatggtaaagaaaaaggtctgatataaaaaaatgtaataaacgatctatgtagtttatatatctggctacacaataacttagggaagacttactcgtggctcaaccctactagctcaaaatttattcacacatggtacgctttggggaaattatgaggggatctctcagcacttgacctcccctcgccggtttgcgtgtctttttcttccggtttctcagctgcctggtgattcatatttgttatggtctagttggtaaaacctttacttatacaactactactgtttaaacacaataaagttggaacgtggagctcatggagtcttgcactg

SEQ ID NO: 1081 - DNA, 2063 bp, Arabidopsis thaliana
  Clone ID: ARATH-23APR03-CLUSTER5882_1
caattaaaagaaaagaaaaagcgcgacttagacaagtacttttgaatccgcagttttttttgttgggaaatcaaaaattatggggaattgttgctccgatgtcgcctccggtgctggtgctacagccggcgttggtggaagtggttcctccgccgctctcggtgcgactaacgacgcccttgattactatctcaagtccaaaggtttcaacggactcttctcgcagatagagctatcgttttcagcttcgaatttgcgagaccgcgacgtgctctccaagagtgatcctatggttgttgtatatcaaaaagaaaaagatgcaacactttcagaagttttccgcagtgaagttgttttgaactctttagctccgaaatggattaagaaatttatagtcgcttatcatttcgagactgtgcagacattggtgtttcgtgtgtatgatgttgacaccaaatttcaaaattcaagagaggagatgcttaagcttgacgaacagcagtttcttggtgaggcaacatgtgcattgtctgagataatcacaaaatcaactaggacgagcacattagaactcaagcgcaaagatggctttgctccacaggctcagcctcaccacggaaagcttatcatccatgctgaggagtcccttgcttctaagatttcaacagagatagtatttagatgttcgaatttggaatctaaggatcttttttcaaaaagtgacccctttttggtggtatcaaagattgtagagcatggaactccaattcccgtgtctaaaactgaagtccggaagaatgatcttaaccctatttggaagccagtctttcttagtgttcaacaagtgggaagtaaggacagtccagtgataatagaatgctcagactttaactccaatggcaaacacagtctgattgggaaagttcagaaatcgctttcagacttagaaaaacttcatttggcgggccaaggaatcaatttttctttgcctactggtgctggacaaaacaaggtgttaaagagccaactttttgtggacaagtttaccgagactgtccaccacacattcctagagtacttggcatctggatttgagttaaactttatggtagcaatcgatttcacagcttcaaatggaaatccccgcctccctgattctttgcactacattgatccttctggacgattaaatgcctaccagagagcaataatggatgttggagaagtgttgcagttttatgactcagacaaacgtttccctgcctggggattcggagctcgtccaatcgacgctccagtttcacattgctttaatctaaatggaagcagttcatactctgaggtggatgggattcaaggaatcatgacttcatacaccagtgcccttttcaacgtctctcttgcagggcctaccctttttggtccagtgatcaacgctgctgcaatgatcgccagcgcgtcgctagctcaaggttcacggaaatattacgtcttactgatcataacagatggtgttataactgatcttcaagaaacaaaagacgcattagtcagtgcatcggatttgcccttatcaatcctcattgtaggagttggaggagctgattttaaagagatggagatactagacgcagataaaggagaaagattggagagttcgagcgggcgattggcttcacgagacattgttcagtttgtggcactacgagatgtccaatatggagagatctcagtggtacaagcgcttctagcagaattgccttcgcagtttttgacgtatatgagaatccgtaatatgaaaccgattcctccatgaatgatctcgtctcgtgtgtaaatgaagtgtgtacatattatacattacataaaccactgcggcggttaaaaatcgctgtcgttttgcgcgattacataagctttttccatttttataataaaaatgtctgaatgtgggatgtaagtttcgaatgaagaggctgatgtacacatttgtcttgatttcttttacatcaatacttggaatttgaagatatctgttttgtgcagcttaatttcttctattg

SEQ ID NO: 1082 - DNA, 4292 bp, Arabidopsis thaliana
  unsure (1)..(4292): unsure at all n locations
  Clone ID: ARATH-23APR03-CLUSTER5886_1
atggttgcggttgattccacttttcctagccatggtagctcttattctagtagaaggaagaaagtttctgctttggaaccgaattatttcggttcaatgtgtatgggagtttacagtgatgatgtttcaatctctgcaagagaagtagctcaagattactcttgtgacagctgtggtgatttggctactgtatcttccgcttgttgcaattttgatgaactgtgtggtttggattcagccttggagatgggatgtcgttcaaatgaagactgtcgtgcgggtcaagaggcttctggtagtggcatagcttcaggtctagacaagagtgttccagggtataccatgtatgcaagtggttggatgtatggtaatcagcaaggtcagatgtgtggcccttacacgcaacagcagctatatgatgggctatcaactaacttcttaccggaggatcttcttgtatatccaattatcaatggttatactgcaaattctgtaccacttaagtacttcaagcagtttccagatcatgtcgctactggctttgcatatctacaaaatggaataataagtgtagccccatctgttacttcatttcccccttctagtagtaatgctacagtccatcaagatgagattcaaacagagcatgcaacttctgctactcatttgatctcccatcagacgatgcctccacagacaagttctaatggttctgttttagatcagctaacactaaaccacgaggaatcaaatatgttagcttcattcctctcattgggaaacgaacatgcttgctggtttctcgttgatggtgaaggtagaaatcatggtccacattctatattggagctttttagttggcagcagcatggatatgtttcagatgcagccctgatacgtgatggtgaaaataagcttagaccaatcacattagcatcgttaattggtgtatggagggtgaaatgtggtgatgctaattgtgacgagccagtgactggcgtgaacttcatatccgaagtttcggaagaactctctgttcatcttcagagtggaataatgaaaatagctagaagagctctactcgatgaaatcatcagcagtgtgatttcagactttctgaaggccaagaaaagtgatgagcatctcaagtcttatccacccacttctgctgttgaatccatatcgtctcgggttattaatgcggagaaaagtgttgtctcaaacactgaatctgcaggctgtaagaatacaatgaatgaggggggtcatagtagtatagctgcagagtcgtccaaatatactaaatctgttggaagcattgagaactttcagacatcttgctcagctgtgtgtagaacgcttcaccaccattgcatgcaaatcatgtggaatgcagtcttttatgatactgtggcaactcattcatcatgttggagaaagaacaaaatttggtttcggtcttctgatatctcgactgttaattactgcaaaggttcccatacaaagtattcagacaaacctgaatcatttgagagttttacttgtagggtggattcctcttcctctaaaactgcttactctgatgaattcgacttagctaccaatggagccagagttcgtggattgtcatcagatacttatggaacggaaagtgtcatagcaagcatctcagaacatgttgaaaatgaactctttctgtctcttaaaactcacctaactgattatactagtattctcattaaagatggagcgaataatactactagtagtgcacgagatggcaaaatgcatgagggttccttccgtgagcagtataatttggaagggtctagtaaaaagaagaatggcttaaatgtggttcctgctaagttgcggttttccaatgatttcagtgattctcagagactgttgcaagagggagaatcctccgagcaaatcacatctgaagatattattgctaatatttttagtacagcattggagacatcagatattcctgttaatgatgaacttgatgctctggccattcatgagccaccaccacctggatgtgaaagcaatattaatatgccatgtctgcgctataagtatcagcctgttaggtccaaggaatccattccagagattaaagcatatgtttcaatggcattatgtagacagaagttgcacaatgatgttatgagagattggaaatcactgttcttaaagtgttatctcaacgaattccttgcttcactgaaaggaagccatcaagtttctcgtaaagaaacattggcactgaagaagcgcaaaactgttactcggaacaaaaagctggtacagtctaatatatcaaatcagacagcagaaaaaagctaanggaaaccatgtgtcggagccgtctgaaaaaaagttctggttaaacgaatctaagaaactgtcaagattctcactccatggaaaagaagtcccttaaaaggtcgataccccccggttagatttgtcagttcggaaaccaagtcaacagaagatgaggaatactgaccggcgggatcattgtatcataaaggatgcgacgaagctccataaagaaaaggttggtaaagatgcgtttagtaaggtgatctgtgataaaagccaagatcttgaaatggaagatgaatttgatgacgcactccttataacaagactaagaagaatatctaggaataaaacaaaagagttaagagaatgtagaaacgctgcaaaatcatgtgaggagatttcagtgactgctgaggaatctgaggaaaccgttgactgcaaagatcatgaggagagtctttcaaataagccttctcagaaagtgaaaaaagctcatacatcaaagctaaagagaaagaatctgtcagatgctagagacgaaggtacaaaatcttgcaatggagcagtcaaaagttttactgagatttctggaaaggagggtgatacagaaagccttggattagcaatcagtgacaaggtttcccatcaaaatctcagcaagagacggaaaagtaagatcgctttgtttttattcccaggttttgagaatacctcccgcaagtgctttactaaattaaagagacggaaaaatgcagcgaagaatggtcaggatatgtcaaaccctactggtaatcctccaagactcgctgaaggaaaaaagtttgtggaaaagtctgcgtgcagtatatcacagaagggccgtaagtcgtcccaatcctcaattctaaaaagaaagcaccagttggatgaaaaaatctccaatgtaccttcacgtcggaggttatctctctcttccacggattctgaggatgctgttattaaggaagactatgatgttcgaaatgaagagaagcttccctgtcatacatcagataagctgcaaaaagtaggtccaaataaattgatacgtagaaggaagccattagcaaaacatacaacagaacgttctccaattaaggatttgtcagtggatgatgggaggcctaagccgattgcattaaaaccattggaaaaactgagttcgaaaccaagcaagaaaaagctgtttttgtcaatcccaaagtctgatggatgtgcacgcacatctattaatggttggcattggcatgcatggtcattaaaggccagtgctgaagagagagcccgtgttaggggaagttcttgcgtacacatgcaacattttggttccaaaagtagtttgactcagaacgttctttctgcaagaactaatagggcaaaactgcgtaatcttttagctgctgcagatggggctgatgtcttgaaaatgtctcagttgaaggctaggaaaaagcatttacggtttcaacaaagcaagattcatgattggggtcttgtcgcacttgaaccgattgaagctgaagactttgtgatcgaatatgttggagagttgatacgttcttctgtaaatatctgagatacgtgaacgccaatatgaaaagatgggaataggaagcagttatcttttcaggcttgacgatggctatgtgcttgatgccacaaagcgaggtggcatagcgaggtttatcaaccattcatgtgagccgaactgttaccccaagattataaccggtggacggaagaaaaagatattcatttatgctaagcggcatatagacgccggtgaagaaataagttacaactacaagttcccattggaggacgacaaaatcccctgtaactgtggagcgccaaatgtgtattgcttttgtgagcaggtgccgtggatcgctaaactaaaaagaaggacgtggttttcaagacgaaactga

SEQ ID NO: 1083 - DNA, 829 bp, Arabidopsis thaliana
  unsure (1)..(829): unsure at all n locations
  Clone ID: ARATH-23APR03-CLUSTER5917_1
catcaaaatcctccgacgatgacaaccatagctgcagctggcctcaacgtcgcgactccacgatcttcatctcttcacatcaaaaaacttttctcctccatcaaaatcctccgacgatgacaaccatagctgcagctggcctcaacgtcgcgactccacgagtggtcgttcgacctgtggctcgtgtattaggtccggtccggttgaattacccgtggaaattcggttcgatgaagcggatggttgtggttaaggctacatcggaaggagagatatcggagaaggtggagaagagtatacaagaagctaaggagacatgcgctgatgatccggtgagcggggagtgtgtagcggcttgggacgaggtggaggagctgagtgcggcggcgagtcatgctagggacaagaagaaagctggtggctccgatcctttggaagagtattgcaatgataatcctgagactgatgagtgtcgtacttatgataattaaaaaatatgtttttgatgttcgaattatgaaactttaggtatggatcaatgtttgttcttcttgtcccttgttgttatgtttgtgtttttggtttggttgatgattgtaatgtgataaatgaatatgaatagtacaatacacaacatatgtttcataatgtgtttggttcaaaaaaaaaaaaaaaaaaagctgagtgccacggtcgccctccagggcctttaatggcggtgtttcccccggggtttcaaatccgatccgacccgcgtgccactccgcgtgggcctccctcgccggcgnaccaaaaggccnncnnttncntcanattgcacttttngann

SEQ ID NO: 1084 - DNA, 1081 bp, Arabidopsis thaliana
  unsure (1)..(1081): unsure at all n locations
  Clone ID: ARATH-23APR03-CLUSTER5930_1
cagatttggtaaagttaccaaccttcaaagaactcgaagagaccgtctctatagaaaaagctgaaatctttggcttcgttttcatcaattcgaaactcaaagttgtgaaaatccaaatgggtaatcattttctaacgttatctctgcttctcgtaacagtctgcgtttgcgtttctttcatcaccacgaagctaaaccctaaagaagcaattgtatctgtctcttccgattctgagattcctactgaaattcatggtgtcaagatcttgcgtcaagcttcagataccaaacttgctcaattaggcgttgcctcttggcccaagtgggaaggtgctccaagcaagtttccatgggagtttaagaagacagagacaatatatttcatggaagggaaagtgaaagtgaatgtagacggatacgacgaagaagaagaaacctttgagatagggaaaggagatgttgttgttttccctaaagatatgaaagttgtttgggagataactgaagctgtgaagaagcaatatagcttagaggagtagtgactttgtagagagaatttgagtcacattgatgtttgtttgttgtacttggttactactttgaactaataatatctatggaattgcaatgttgattaggattctgattatagaagtaagaaaactatatattatatacaatttaattaggaccccaacagctcaagtacatgactgttctaagagattcttcagccttcttagccttctcgctctcaccagaggaggtaacggctgcggagacagaagacgaagagaaccttttcccttgagaaacagatctaacgttgttccggagatgttgattaaccgaccggagtatgtagttccaccgacaaagacctagttggtcttttaatgcctctacggctccgatgctcactgccactgtccatgctttgcttgtagaactcatctttcttcagagaattaaacttctttgtgttttgtgttttgtgtattgagaattgtttttgttgatgatgtcggggggggggngggactagtgagccnnncccgnattcctgcagacggggntcaaa

SEQ ID NO: 1085 - DNA, 785 bp, Arabidopsis thaliana
  unsure (1)..(785): unsure at all n locations
  Clone ID: ARATH-23APR03-CLUSTER59389_1
gagtnggnagnnanggggncttngtatncccnctgnaaagggattttcangcanaatngtacncngggttccngccnccgtnaaacccngcagtaatgtaatcgnccctaagggngaatgggnncgggccccccncgattttttttttttttttgatcataacagacagattctggttctgctcttcaaagagattcaatatttccataagagagtcaactagaggagatgaaacagtgaagagttgagagattgatcattacaaaagaaaaaacttaaaatccaaaagtgctacgaataacagatcaagaagagatagagatagattccatagaagttccacaagtgtttggtttctcttctgattcacagcaacacagagacacttctatgggaagtagactggccagttgtaatagtacgagtccctgacttctttgggtatcttattccacttgaattcataaggttgcttctttgcccttgcttttttccagtggtactgctcaaacagcatccacttgtcatggtaattgaactggttagagagctgccacatgtaaggattaacccaggtaagaacggagaaagcagcagaaccaatccatatattcacgaaacgatctgcatctgcatgtggcactcctggatctcccctgtacgcatttccaaagtacttctccattttcaccctctctctcgtcactctctgtgtttccccttctgtcgtcgcagcggtactggataaataaaaatcgatcggactgccgagtggttgtacgcgt

SEQ ID NO: 1086 - DNA, 1276 bp, Arabidopsis thaliana
  unsure (1)..(1276): unsure at all n locations
  Clone ID: ARATH-23APR03-CLUSTER5947_1
atacccaacaacataatttcacatatctctctttctttctcttgaaggaaagacgaagatctccaagtcccaagttgttaacacaagacgtaaacatgggtcatcttgggttcttagttatgattatggtaggagtcatggcttcttctgtgagcggctacggtggcggttggatcaacgctcacgccactttttacggtggtggtgatgcttccggcacaatgggtggtgcttgtggatatggtaatctatatagccaaggctacgggacgagcacggcggctctaagcacagctctcttcaacaatggacttagctgtggttcttgctttgagataagatgtgaaaacgatggtaaatggtgtttacctggctcaatcgttgtaaccgctacaaacttctgcccgccaaataacgcgttagcgaacaataatggcggttggtgtaatcctcctcttgaacactttgaccttgctcagcctgtttttcaacgcattgctcagtacagagctggaatcgtccctgtttcctacagaagggttccttgcaggagaagaggaggaataagattcgcgataaacggccactcatacttcaaccttgtgctgatcacaaacgtcggtggtgccggagacgttcactcggcggcgatcaagggttcaagaacagtgtggcaagctatgtcaaggaactgggggcaaaattggcaaagcaactcttacctcaacggtcaagcactttcctttaaggtcaccaccagcgacggccgcacagttgtctccttcaacgccgctcctgccggctggtcttatggccagacttttgccggtggacagttccgttaaaaagggcaagttggttaatctctcttccatttatctaaagtaaactcatttgtgtggttatattggtctcttgaaaaaactcggttattgagagagtgatgcgtcgagggctcggttttgcagaaggccttgatgacgtctaatctttttttggacctctttatttttctttcttgaaactagtttttgttaagaaagaaaaaacaagttatagtagttaatgtattactgatgcagaggtggagttttaactaccacccgctagtagtagttatgagttttttattttaaggtgtgagagagagatggattatcaagatttgtcaattttattatgtttgtttgtaataatacaattctttactccagttaatgaaaattgggggattgatcactaaaaaaaaaaaaaaaaatttaagaaaagnaaaaaa

SEQ ID NO: 1087 - DNA, 1142 bp, Arabidopsis thaliana
  Clone ID: ARATH-23APR03-CLUSTER5977_1
gcaaaaaccctctctccccttcttcttacttcacttcactcgtgctttctccaatggagtcactcctgcacgcgtcttcgtctctggtgtctctgagacccagaatcgacggtagagattcgttcatcaacccgtcacgcgtgtgccttaatcctagtctcggccgcagaggatctaaacctcttccgttggtcgcggcggcgaagaagaagaaaagcaagaaagatgacaatcataacttttcagctagacctgacgaagccactggtccttttcctgaatccattcttctcaaagagaagaagattgatgaagaaggtgatcttcttcccgagtttgctgatgctgaagaaaaggagctatatcagtttctggatcttcagcttcagagtgacttgaatgaagaaaggatgaggcactatgaggtggtttacttgattcatgaaaaacatgctgaggaggttgaaagcattaaccagaaagtacaagattacctgaaggagaagaaggggaaagtttggaggtttagtgattggggaatgcgtagactggcttacaaaatacagaaggcagagaatgcgcactatatactgatgaactttgagatagaggcaaaatacttgaacgaattcaagggattgttagatagtgatgagagggtgattaggcatcttgtgatgaaacgtgatgaggccataaccgaagactgtcctccacctcctgagtttcactctgtccgcgcaggtgatgaatattatgacgatgatgaagaggaagagattgaagaagatgaagatgaaggtgagggtgaagatgaagaagatgctgataatatagagtacgaagtagatgatgatggtaatgtcgttatggtgttgtacggagatgaagaagaaggagaagaagaagaagatggagctagtgaacaagaagaaggacaggacaagtcaactaatggtagaagagaaacccggagaacagttaacgtaggaggttaggactgtctgtaattcttttgtttttgggtcatgttttggataatagggtcacacatcaaatcgaagttgtttgttgtactcataatagcatcctaagaagtatatgagaaactaaactattcccttgaaaaaaaaaaaaaaaaa

SEQ ID NO: 1088 - DNA, 1056 bp, Arabidopsis thaliana
  Clone ID: ARATH-23APR03-CLUSTER5993_1
gtctttttcctttttttcctcccagaagacagaagaagaagcaagatcatcaagaccaatctcgtagacttcttgtctctgtccaaaaaccataaagaaactttattggcataaaaagagaacaatctcgtagattcttgagcttctgacaatggattctttgaagaatagaacattgcttaaggtcattgttcttggagatagcggggtaggcaaaacttcattgatgaatcaatatgtgtacaagaaatttaacaagcaatataaggctacgatcggagcagatttcgtgaccaaagagcttcatatagatgaaaaatctgtcactttacagatatgggataccgctggacaagagagatttcaaagtctaggggccgcgttctatagaggtgctgattgttgcgttcttgtctacgacgtgaacaatctcaaatcttttgaaactctcaataactggcacacagagttcctcaaacaggcaaatcctatggaaccggagacatttccctttgttttgatcgggaacaagaccgatgtagatggcggaaacagccgagttgtttcaaataagagagccatcgagtggtgtggctcaaagggaaacataccgtaccatgaaacctctgcgaaggaagataccaatatcgatgaagcttttttgagtgttgcacacattgctctctctaatgaacgtaaacaaagcaatgacatatatcctagaggccagtatcatgactctgttacggatattattgatccagatcagtcaagaggttgtgcttgctgattccatgtttgacatatctgatcaaataatatcgagtcccagctctttcatttgcagtccttgtttttggtaactttttttctatttattggtttaataatatcatttatagaggtttattaacgacaaaaaacagttgatacatactactttctgagtgttttgattcatgtaaagcattaattaatttctatttaatttttgtaaaaaaaaaaaaaaaaaagggcggcagtaccatcaccgaatcacttggatttgttctacct

SEQ ID NO: 1089 - DNA, 1756 bp, Arabidopsis thaliana
  Clone ID: ARATH-23APR03-CLUSTER6029_1
agaaaaaatgggcaacataaataaaaagtaaaagggctctctctcctttctttcagtttcgacattccccagaatctctcttccctttttgtctccaaccaaaacaaaaccttaatcacctttcttcttcttcaaacagagcacaacagagacgttcgttcccactctgtcttaatctcccctgtttcaattcctaaatcgatggaaaacggtggaacaattccgggtcaagaaatcggatcagggcttcaaaaacccgttaacccagatgggtttgtgacgatcgatgttgaaagtttctctaatgtcatccacaaagacttctcttcttctagtccaagaattactttgcagaggaatgtatcgaggaaagggtctccaagaagcaacaacgagagaaaactccattttgacgcaaatggtaatgacaaggagatctcatttcctcagtccccacttagagggtcaagcacgccggaaaaggctagcaccgtgggccccacagaacatgcaggcacggccacaaccgctgccacagctgtttcagcctcgccgcttcatcagatcaccgttactacggctgccacggccgcaggaaatatgattaccgaccaaaatagagaaagaaggttcggtttttcgaggaaatcgagttttaaacgctctcacacttcttggatgcttgatccgaagaaaatcgtcctcttctttgcaactttgtcaagcatgggatcaatcttgttaatcatattcacactctcgatcagcaagtccaatcccggagatatgcctctagactaatagtaaacacacgaagagcattatatataacgcatatatatcatcgaccgacctaagtttgtggccatagaacatgccacagtctcaccgacctacattttaaggagatgtatcagacagaagaacattacaaaaaatgaagagggtaaggttgtgataatagttttatttcgtatgattttttttaaatgaaaaaaaagaagaagacaacagtaagagagagagaaagtgggaagtgggcacgcacgagatcatatgggagattggaaaagaaagcttaagacaagagtttatgactattgtgacaaagacagagaatcttctcttctgttctttcaaattcttttttctctgttttttctttaaatttatttatcgagtatgtgtttcgattgtcttcaatgtgttctctatgtgtacatatcaattgcggtgactggtgagcaattttagtttcgtttggttttaccatataaaaaaaaaaaaaaaaaagaaaaaaaaaaaaaaaacatgccacagtctcaccgacctacattttaaggagatgtatcagacagaagaccattacaaaaaatgaagagggtaaggttgtgataatagttttatttcgtatgattttttttaaatgaaaaaaaagaagaagacaacagtaagagagagagaaagtgggaagtgggcacgcacgagatcatatgggagattggaaaagaaagcttaagacaagagtttatgactattgtgacaaagacagagaatcttctcttctgttctttcaaattcttttttctctgttttttctttaaatttatttatcgagtatgtgtttcgattgtcttcaatgtgttctctatgtgtacatatcaattgtggtgactggtgagtaattttagtctcgtttggttttaccttttccaaatatattgaaaaactctcttacgatcgaaaaaaaaaaaaa

SEQ ID NO: 1090 - DNA, 4083 bp, Arabidopsis thaliana
  Clone ID: ARATH-23APR03-CLUSTER6030_1
agttccgcacgacaatccttctccctctccggctccgaaccattcacgttctccggcagctctggtcatcgccgccatttcggtttctaactttatagtgaagctgtgacgtggtctctctggtaatggaagagatcaggaaagaaatagatgtcggtgattggcattcaaatctagctcacgatgaatggacaccactccctgtttctggctctcgagcatcagctcgttacaagcatgcggcagtggttgttgatgagaagctctacattgttggtggaagccggaatggccgatacttatctgatgtccaggtgtttgatcttagaagtttgacttggtctagtttgaaactgaaaactgaatcatcaagtgctgataacattcaagaggatgatggtagcagcttacgggaagcttttcctgctatttcagaccatcgcatgattaagtggggaaacaagcttcttttgatcgggggacactccaagaagtcatcagataacatgttagtgcggttcattgatttggaaacacattcatgtggagtcattgatgtgtttgggaatgttccggcttcacgtgatggacattccattacactggttggatcccgagttcttgtttttggtggggaagataagaacaggagactgctgaatgatctgcatgttcttcatcttgagacaatgacttgggatgttgtagagacaaagcagacacgcccagttcccagatttgatcacacagctgccacacattctgatcgctacctcttgatttttggtggttgttctcattcgattttctacagtgatcttcatatccttgacttgcaaacaatggagtggtcacagcctcatgttcagggagatgttgtaactcctcgggcaggacacgctggaatcaccattgacgaaaactggtatatagttgggggcggtgataacagtactggttgtttagagacccttgttctaaatatgtcaaagctggtttggtctacatcaacccatgtagaagcaagacatccacttgctagtgagggtctcagtgtatgttcagcatcagtatttggagagaacatcttagtagcttttggcggctataacgggaagtataacaatgatatatttgtcatgaggctaaaaccaggagaatcctcacatcccaaaatctttaagtcaccagcagccgctgcagctgcagcctctgtcactgctgcttatgccatagccaagtcagataagtcagattatcctccacctgcaaatccaactctcaatggaaatggaaacagtcttcctgagagagatattaggaacagaatcgataccattaaagaagaaaaaagagcattggagtcatctattgcggaaactcaagtagaaaacgcgaagctcagggaaaagatagatgaagtcaatagtagccacactgagctatctcaagaactccaatctgtagaaggtcaacttatttcagaacggtctagatgctttaaactcgaggcacaaatagcagaattgcagaaagcactggagtcagggcaatccatcgaagctgaagttgagatgcttagaagacagaggtcagcgtctgatgaagaagaagacgggactgtgcaaaggcaaggctctgctggtgtgtggggtttgtttggaaggtaaatcccaaacagtttggcgacacaaatacctataagctctgacgaaacaaacattgatttataattccatttttttgagaatgagagatagagtgggggaaacatgttcttctttatttgttctcaaagattcaaaatcaatttgttatgaatgcttttttccctcatttactagagattttacaacgaaatatcatttcacaatgtaacatgtttagaccaatgattccaacaataacgggatcaaataataattgtcataagaaagttgtttatgttcttatttctagaaactcaaactagaaaccatatagagaattcaagctacaccaaacccttcgaataaaaatttaaatattgagcagcaaagcactgccaaagttaaaggctatatgattggagaggtacaaacaccaaaaaaagtctttgagacgattcaactttgatcctattaccgagcagacaccatggttactattttgaagctaacagagagtaggagaacccataaacacatgaagactaacatagctcttgtcgccgtaattcctgtcttgcttcccgaggcagtcatcgcatcatcctgttggactaccccgaatgaaaggactacgttgaggttaccgttcttgtcatatgaccagcccataccgctgtccgctgctagagtcatgtttgatattctcatcatacctgcagtcacgtgaactgaaccagaagattgtgctgcgtgtagacgcattgcgtcctttgtttggaactgtgaagcaaatgaagatggagtaggaatggctccaagcatgtggctcgtctttttgagaaatgggtacttcggagctgaatcaaagtccttgaaatctgtatcttgttttgaagaagatccttcgccactttccttttcctccactgcctctttgcctcctgcgacctccttctccaattctttaggggcaggtttctggtcaagggcttcttggttgggaagaaaatcttcaggtcccattaatagagaatcgtcaaaagtcaaaccctcatcatcaaagaagctgagataatcttcgaagttaaaatcatcttgttgagcacagctgagatcattcgtttccaggtacagaccatcgttgagtggaagattgttattaggatccatgaatggctcatcgggtaaatagttatgatcaataggaatgtcactgtagcatgtatcagctacaaacacattattgttggaagattccagattcaccacattttcgtcttgcacaccacagccaatttgttcctctggaaacagagaacaaggctgaatgctaccctcccgtataataggcttccgatcttcctcaaaagtttcaattggttgttcaaagtacccaccagagtcgacaacattgtttcctggttgaatgtaatttccagagtctgagtaattgcctgattcaacattgttacttgattccccatgacaatagttaggtagaataggaacggcatcatagaccaccagattttcgggcttctcgtcaatgtcatcaatatcgacataaacatcatcattcaaagccaatccttcactgaaagcatcttgagcaggtacataagtcattccatcttcttcccactcctcctcaagataaggagcaccatactgctccccattcttaggacccgtaccacttttctggaatatcctacataacacatatgcttcttgtggcacaccagctttcttcaagtcctcatcagaaagccgatactcatgcataacccaattggtcctttcaccacgaggagctcgacccttgtgataaacaagtgtcttcttcatcccaacgactcttgaaccattacgaatctcccgatctttcccagtcgtcttccaataccctttctccgtagcacgattcgtcttggaaccattactgtacttcttatccagcatactaaagaagtaccattccaagtctctacttttcagcttcgacttatctggtagatcccaaggctcagacttgtatatgtcggtgacggaaatagcatcgaacttaaagggtttgttgcagaccttacgcttaaggtagtagcgaacaagttcctcatccgtcgggtgaaaacggaacccaggagcaagcgacgtcactgagccacgacccatcaatcggtgaaaaccagaacttgaagaaagtaagggtttttatgggagcaaatcgagtagaagaaatacaagagataatcagatatctgaaaaattagggttttaaaaaagaattgggaaaattggaagagagagagagagatgaatcgatcacgatggcattggaattaagcaaccgtggaaaagaaaaaaagataaaagagaaaaaaagaaaaaggatttaaagcggggggggggggggactagtgagctctcgggc

SEQ ID NO: 1091 - DNA, 1262 bp, Arabidopsis thaliana
  Clone ID: ARATH-23APR03-CLUSTER60717_1
ttttttgcttggttgtggtcaacttgcgatacctaccgactcatcatatattcaaaagttcagattttgaccatgtatgtaacttccatgtcaaccagtttctcagtattgttaaaacatgtggactcaaaagcttgtaccttgggaataatgatgtataggttctatggactatgcagatgctgctgaagaatatgtcttgaagaggtaagccagaatcttctcgtaatcacctaattggacaccggtgtttggatcaaccaagaatggaaccttattggatcctgaagcatttagaagtgatttcatccgtgtggacccttctccaatgttgtgtaatacatagggaagctccagctcacacagtgcttcacgcaccaaccgtgaatacgggttgttttcgtaagagaagagctcgagcattttaggtggcagatctgttgaagccttatcccacaatgacatgcctctacctgctcggagaagagttggcatccatccagtgaacaaggtgctttccagaagtcctgtggaagggcctcttccatttccatattgtttaaataggtactttacgatgtcaccactctcatacattaaagtttcagtattcgggtcgacgagaaatggaaacatctcttttccgccagatcttctaaccagttctctgtgtcttatagatcctttaggacaaggataaacttctactgaaaggtctagctcagtcatggcttcccgcactctccgacaaaagggacatgcctcaaattcaaaaagctgcaatcgcaaaggcggattagaagagacatcctggttatctatactcccagttgatactcgagatccccatggaagtcttgcaacagatgccaatgaagaagttgcaacctcgagagcatgattccgctgttgagaaggatcacctccagagaaagctttaagcaatggacagagaaaagacaagaagctagatgtattattactgctcgatttctgtgctgcttcctcctttttaccttctgagttactcgatttcacataaagtcttctcctttcgcgaacccaattcccgttccctgatattctcttcgagaatcgattagaatgaaccatggatgacggaaacgacgcagtcggatggcagagactgctatcaaccaccgaaattgacattgttcctatcaaaaactggattctacagaaaccctaattcgatatcgaagaaaggagaacaatcgattcaccaaaattccaaaaaaaat

SEQ ID NO: 1092 - DNA, 1438 bp, Arabidopsis thaliana
  Clone ID: ARATH-23APR03-CLUSTER610_1
aaaacaaaagctttagatctttcttcttaatggacattccgtattaccactacgaccatggcggagacagccaatatcttccaccgggtttcaggtttcatcccacggacgaagagctcatcactcattaccttctccgcaaagtcctcgacggttgcttctcaagacgcgtgggcgcagaagttgatctcaacaagtgtgagccttggcaacttcccgggagagctaagatgggagagaaagaatggtacttctttagcctccgtgaccggaagtatccgacgggactgagaactaacagagcaactgaggctggttactggaaagctaccggaaaagacagagagatctttagttcaaagacttgtgcacttgttgggatgaagaagactcttgtcttttacaaaggaagagctccgaaaggagagaagagtaattgggttatgcatgaatatcgtcttgaaggcaaattctcttaccatttcatctcaagaagctccaaggatgaatgggtgatctctagggttttccagaaaaccactttagctagcaccggagccgtctccgaaggaggaggaggaggaggagcaactgtgagcgtaagcagcggtactggtccatctaaaaagacgaaagtaccctcaacaatctcaagaaactatcaagaacaaccaagctctccttcctccgtctcactcccacctctcctggatccgaccactaccctcggctacaccgacagcagttgctcctacgacagccgtagcaccaacacaaccgtcacagccagcgcaataaccgagcacgtgtcctgtttctccactgtccctactactactacggccttgggcttagacgttaactcattcagccgtcttccaccgccgctagggtttgactttgacccttttcctcgtttcgtttctagaaacgtctcgactcaatctaacttcagatcgttccaagaaaacttcaatcaatttccttactttggatcgtcttctgcatcgactatgacctccgccgttaatctgccttctttccaaggcggcggaggcgtctccgggatgaattactggctaccggcgactgccgaagagaatgagtcaaaggtcggtgtgcttcatgctggacttgactgtatttggaactactgatcacaaaagaggtgacttataattgttcccgttagggttttatttatgtatttctaggatgattatggtattatgaaatgtgtgtaccgaggagcttaatattgcacttagcttgatgttccgcttaattctctagttttaagtttatccggttgtgttaattaggaggtaatatgcaaggaaaatgttttctagactatgaacgtgcatatgtataagctatgctcgtttttgtaatgtttgacattatgttaatttcatggctttttcatgtttaaaaa

SEQ ID NO: 1093 - DNA, 2114 bp, Arabidopsis thaliana
  Clone ID: ARATH-23APR03-CLUSTER6165_1
attctgaatatctccttccatcattcagagctcaataattaactgattcgaaatggcgaagatgtaccggaagttggcactctgcggtggtgagggaggacaagaatgggacgacgatgtatatgagggtgtaagaaaagtgtatgtagggcaagatctcaaccgtatcacttacatcaagtttgagtacgtgcaggaagacggcgaagtagtaacaactgaatatgattctgaataagatcaagaatttacagtatttgaaaaaatacaaaatggcgaaaatctaccggaagttgacaggctacggtggtgaaggagggcgtgaatgggacgatgatgtatatgagggtgtaagaaaagtgtatgtaggacaagatatcaatcgtatcacttacgtcaaattcgagtatgtgaaggaagacggccaagtcgtaacaactgaatatgggaaaatcattcaacaacccaaagagtttgtacttcaatatccggacgaacatatcatagcggtggaaggaaactatcgcggagtggctctatgtgccacagaggtgatcacaaacctcgtcttcaagacctcaaagggtagaaagtcaccactgtttggtccaaacttgcttggaattacgaccggtacaaagttcgttattgaggatggaggaaagaagatcgtagggtttcatggacggtcgggtaatgctctcgacgcgcttggagtttactttgtacatggctctctaacaacgtctccgcctgtttacaagctggatgcccaaggtggtacagacgggcgtgtttgggatgatggttcttacgacggcgttaaatcgctgcgtattggtcaagataattctcgtattacttatttagagttcgagtacgagaaaggcggtaagttagagacatgtcgccatggggtgaaacaagaaagatcactgaagtttgagcttaacccggatgaatacatcaaatcggtggaagcaacctatgataaaccggacattttccgcaatgtcgtcattacatcgcttacatttgaaacatcgaaggggagaacgtcattctctgggtataagggaggtaagaagtttaagctagagcaaaagggtcgtaggcttgtcgggttccatggaaaggaaggttcagctattgatgcccttggagcatattttgcacctattcctactccgactcctataattagatggctaactacgataagatcataggagttggcggagcaattgttgtatgtcttcatgttttaagaccaacaaaagggagtcaatgccgtttggaatggattctggtaagaagttctcgcttggagaggaaggccacaagatcgttggattccatggacaagctagtgatgatgttacacagcatcggagtcactatcgtgcccgatcaccaacctaccgagtgaaaaccgagttagtcatatatattccgtgtagagtccccattgattatctgtcttcagtttaagtcgaatataatctctttactatgttacttttaatacgtggttgtaagttcaagtaactcactgtgttcgtcggattccacggacaagctagtgatgttgttcacagcatcggagtcactgtcgtgcccattaccaacaccaagtgaaaaaccttttattatataagtaaaaccagccagtgccatgtcgactaaatgaaaacattcaataaggattggtgtgtttactctactacttttgatgtgtttgtaacttactgtttctgtcaaatatgtccaataagaattggtgtgctctcttcaactattcaataaatctaccatgagccgtgtcagagctgctaacattgaacacacagccccactgatgtaatgaaactttttacccactattttaattgctccttgtaacatttcaaagacatagacattagaaaaagaagctttctcattgttgtcttcctcaaagcccagatctctaaagtggtcttacaagatttgattatgcatatgttgcccaaatgactaaaagtaatcttaacaaaaaataatattaaaagtaatcgaaaatgagtcgtcctatatatttaggaaaataacccacgcgtccgcccacgcgtccg

SEQ ID NO: 1094 - DNA, 1751 bp, Arabidopsis thaliana
  Clone ID: ARATH-23APR03-CLUSTER6211_1
cttagccaacaaaaaatggcagaacttattccttggtactacacttcagggtcagggatcgtacttgtacttcaaaccatttttctcttctcgatcgtacgtgctgatttaccaggctcatgggaactcattgtacaagacgccggtatagcttctatgcacacggcggtgacccggttcaacacggtcatccttctagaccgaactaacatcggaccgtcgagaaaggctcttgaccgtcaccggtgccggagagacccaaaagacgccgctttgaaacgcgattgttacgctcactcggttctgttcgaccttggtacaaatcagatcagaccactgatgatacaaaccgacacgtggtgctcgtcgggccagtttttatccgacggatcgttgctacaaacgggtggggataaagacgggtttaaaaagatacgtaaattcgaaccctgtgacccgaacgaaacgtgcgattgggtggagcttcaagataccgaattgataaccggacgctggtacgcttctaaccagatattaccggatggttcggttatcatcgtcggtggtagaggaactaatacggttgagtattaccctccacgcgaaaacggtgccgttccgtttcagtttcttgctgacgtggaagacaaacaaatggataatctctatccgtacgttcatctcctccccgacgacgacggtggcaatctcttcatcttcgccaacagtcgcgccgttaaatacgatcaccggataaacgccgtcgtgaaagagtatccaccgttagacggtggtccgaggaattatccgtcaggtggatcatcggcgatgctagctatccaaggagatttcaccacagcggagattctaatctgcggcggagcacaatccggagccttcacagcgcgtgcaattgatgctccggcgcatggaacctgcggacgaatcgtagctaccgcggcggatcctgtttgggtgacggaggagatgccgttcgggagaatcatgggagatatggtgaatttaccgacgggagagattctgatcataaacggagctcaagccggaagccaaggattcgaaatgggatccgatccgtgtttatacccgcttttataccgacccgatcaaccaattggtttacgattcatgacgttgaacccaggaactgtaccgagaatgtaccattccacggcgaatcttttaccggacggtagaattcttctcgccggaagcaatcctcactatttctacaaattcaacgccgaattcccaacggagctacggatcgaagcgttttcaccggagtatctgtcaccggatcgagctaatctccgaccagagatccaagaaatcccgcagatcatacggtacggagaggttttcgacgtgttcgtgaccgtgccgttgccggtggtggggataattcagatgaattggggaagtgcgccttttgcgactcattcgttttctcaaggtcaacggctcgttaagttgaccgttgctccgtctgtgcctgacggagtaggtcgttataggattcagtgtacggctccacctaacggcgccgtttctccgcctgggtattatatggccttcgctgttaaccagggagttcctagcattgctcgatggatacgaatagtttcttgatttaaaaccagaggagatatttaaaatgttaatttgttaaatagttaaacacatcatgtaatataaatattttcatgcaaaaacttactccgcaaagt

SEQ ID NO: 1095 - DNA, 2549 bp, Arabidopsis thaliana
  Clone ID: ARATH-23APR03-CLUSTER6228_1
atgctggttgccaacgatcagatggcgctgggcgcaatgcgcgccattaccgagtccgggctgcgcgttggtgcggatatctcggtagtgggatacgacgataccgaagacagctcatgttatatcccgccgttaaccaccatcaaacaggattttcgcctgctggggcaaaccagcgtggaccgcttgctgcaactctctcagggccaggcggtgaagggcaatcagctgttgcccgtctcactggtgaaaagaaaaaccaccctggcgcccaatacgcaaaccgcctctccccgcgcgttggccgattcattaatgcagctggcacgacaggtttcccgactggaaagcgggcagtgagcgcaacgcaattaatgtgagttagctcactcattaggcaccccaggctttacactttatgcttccggctcgtatgttgtgtggaattgtgagcggataacaatttcacacaggaaacagctatgaccatgattacgccaagctctaatacgactcactatagggaaagctggtacgcctgcaggtaccggtccctctttctctcaaacacacacccactcatggcgtctcggagagtcttatcatctcttctccgttcatcttccggtagatctgccgccaaattaggcaaccgtaaccccaggcttccttctccttcacccgcgcgtcacgccgctccatgtagctacctcctcggccgcgtcgccgagtacgcgacctcttcacctgcaagctcagctgcgccatcttctgctcctgctaaggatgaggggaagaagacctatgattacggtggcaaaggtgcgatcgggcgtgtttgccaggtcattggtgccattgtcgatgtgagatttgaggatcaggaaggattgccaccaatcatgacatctctcgaggtgcaggatcaccccacaaggctagtgcttgaggtgtctcatcacttgggtcagaatgtcgtcaggaccattgctatggatggtactgagggtctcgttcgtggaaggaaagtcctcaacactggcgctccaatcactgtacctgtcggaagggctactcttggacgtatcatgaatgttcttggagaacctattgacgaaagaggcgaaattaagaccgaacattacttacctattcacagagatgcaccggctttggttgatctagctactgggcaagagatcctggccactggtattaaggttgttgatcttcttgctccttaccaaagaggaggaaagattggtctctttggcggtgctggtgttgggaaaactgtgcttattatggagctgatcaacaatgttgccaaagctcatggtggtttctctgtgtttgctggtgtgggagaacgaacccgtgaaggcaatgacttgtacagagaaatgattgagagtggtgtcatcaagctaggcgaaaagcagtctgagagcaagtgtgctctagtgtacggacaaatgaatgagcccccgggtgcccgtgcccgtgttggactgactggtttgactgttgccgagtatttccgtgatgctgaaggccaagacgttttgcttttcattgacaacattttccgtttcactcaggccaactctgaagtgtctgctttactcggtcgtatcccgtctgctgtgggataccagccaactctggcttctgatcttggtgctcttcaagagcgaattactaccaccaagaaagggtctatcacctcagtccaagccatctatgtacctgctgatgatttgactgatcctgctcctgctacaacttttgctcacttggacgccacaactgtgctctcaagacagatttctgagcttggtatctaccctgctgtggatcctttggattcaacatcccgtatgctgtcacctcacattctgggagaggagcattacaacacggctcgtggcgtgcagaaagttctacagaactacaagaacttgcaagatattattgcaattttgggtatggatgagctaagtgaagatgacaagttgactgttgcccgtgcccgtaagatccagagattcttgagtcagccgttccacgttgctgagatcttcactggtgcccctggaaaatatgtcgaccttaaagaaaatatcaacagtttccagggtttgttggatggcaagtacgatgatctttccgaacaatcgttttacatggttggaggtatcgatgaggtggttgcaaaggcagagaagatcgctaaagagtcagcagcttaagagattgattcagatctttcatgcttaatacttctcttttttttcctgacaataacgaaaaaaaaaaaccaatgcgtgcgactctccgaccaaacggaatctgagttccgtaattatagtttcttttggttcaaattccatgagagctggcaagatgatactgaacagatccattcactgttaatcaaatttttggttgttttgcttcctttgttgaaataaagatgaaaaatcttgcagattctaaaaaaaatatgtgtttaagaaaacaaaaaaaaaaaacgtacgtgcgcgtgc

SEQ ID NO: 1096 - DNA, 1626 bp, Arabidopsis thaliana
  unsure (1)..(1626): unsure at all n locations
  Clone ID: ARATH-23APR03-CLUSTER6231_1
gtgcggcgtcttgatggaggagataaaccctagttcttctgtagacaataagagagacatggcggaagaagctaaagttgatgtgaagacttcggcgaagaaggatatacgcaattatctatgccagtattgcggaatcagcagatctaaaaactatctcatcactaaacacatccaatctcatcatcagatggaacttgaagaggaaagagatgatgaagcttgtgaggttgatgaggagtcttcaagtaatcatacttgtcaagaatgtggtgctgagtttaagaaacctgctcacttgaagcagcatatgcagagtcattcgctcgagagatcttttacttgctatgtggatgattgtgctgctagctataggaggaaggatcatctcaataggcatcttcttacacataaagggaagctctttaagtgtccgaaggagaactgcaagagtgaattctcagtacagggaaatgttggtaggcatgttaagaaatatcatagtaatgacaaccgtgataaggacaatactggtttgggcgatggtgataaggacaatacttgtaagggggatgatgataaggaaaaatctggtagtggcggttgtgagaaggaaaatgaagggaatggcggaagtggtaaggacaataatggtaatggcgattctcagcctgcggagtgttcaactggtcagaagcaggttgtctgcaaagaaattggttgtggaaaagcctttaagtatccttcacagcttcaaaagcatcaggattctcatgtgaaattagactctgtggaggcattttgttccgagcctgggtgtatgaagtactttaccaacgaagaatgcctcaagtcacacataagatcctgtcatcagcacatcaactgtgagatatgtggttctaagcatttgaaaaagaacatcaagagacatctacggactcatgatgaagattcctcaccaggagaaatcaagtgtgaagttgagggttgctcttcgactttctccaaggcttctaatcttcagaaacacatgaaagcagtgcacgatgatatacgtccctttgtctgtggctttcccggttgtggcatgagatttgcttacaaacatgtcagaaacaagcacgagaattccgggtatcacgtatatacctgcggtgattttgtcgaaactgatgaagatttcacttcaagaccgagaggtggactaaagaggaagcaagttactgcggaaatgctggtacgaaagagagtcatgcctcctcggtttgatgcagaagaacacgaaacttgctagtagtgtccaagccttaattatattttgtcttaagataagtgaagtagttttgtgtaaagttctttttgtttgtgtgttggtaggaagaaatatagaactacaatagtatgtagtaatataagtaatgttgtgcttagaatttatgttcgtttaaccttttatctcccacggctttaatgtattgaaccaaacatttgaagatataagtaatgttgtgcttataatcaaaaaaaaaaaaaaaaaagattatcaatcccgacaaccacaaggaaatttcnnnnnncnnnnnnnncnnnnnnnnnnnnnnnnnnnnnnnnnncnnnnnnnnn

SEQ ID NO: 1097 - DNA, 2321 bp, Arabidopsis thaliana
  Clone ID: ARATH-23APR03-CLUSTER6232_1
ggtgcaacaacctaaccatggaaattgcaatttgcaaacatggcgctcgcgctctcgctgtcggcatgttctcctccactccgccgcactcgtcgtgccggttttcgaacaagctgctcgatcttcgcgaatccagcacagcgagccaagaggaagctgcttgagctgatctccgaggaggatcgaggtctgagaacccagaaagaccccaagaagcgagatgaaatcgtgaacgccatcgaatccatgacggttatcgggcgcagctccatcaccacagacgactctctatctgccacgtggcggctcttgtggacgacggagaaggaacagttgttcatcatagaaaaggcaggcttgtttgggacgaccgccggagacgttttgcaggtgatcgatgtgaataaacggatcctcaataacgtcatcactttcccgccggacggggttttcttcgtacgctccgatatcgatatcgcttccccgcagagagtcaatttcagattcaatagtgcggtattgagagggaagaactgggagctcccactgccaccatttgggaagggctggtttgagaatgtgtatatggacggtgagatcagagtggccaaggacatcagaggagactacttaattgttgatcgtgctccttataactggactgaatcatttgtataatttgtgatgctttttgcttcttgtataagttatacaccatttctgcctctctcctttatcattgggcctcaaatagatgatgcaggaatatagggaggaggaggaagaggaatttgaaggatcattcaaagtgtcatccttgagtttatttagggtttttgtctgtgtttgttacaaacacaccacccacattttctatgcccttttttaatgttattttcacaatccatgacttaaacgcccaacactaatcctttgtcttttatttcattgtgaactcacaaagatgttggtgtccgcaagggtagagaaacaaaagcgtgttgcttatcaggggaaggcgacagtgcttgctctcggtaaggccttgccgagcaatgttgtttcccaggagaatctcgtggaggagtatctccgtgaaatcaaatgcgatgacctttctatcaaagacaagctgcaacacttgtgcaaaagcacaactgtcaagacacgctacacagtcatgtcacgggagacgctgcacaaataccctgaactagcaaccgagggttccccaaccatcaaacagaggcttgagattgcaaacgatgcggttgtgcagatggcatatgaagcgagcttggtttgcatcaaggaatggggaagggcagtggaagatatcactcatcttgtctacgtttcctccagtgagttccgtttgcccggaggtgatctttacctctcggcacagctgggccttagcaacgaggttcagagagtgatgctgtattttcttggatgctatggaggtttgagtgggctgcgcgtggccaaagacattgctgagaacaacccagggagccgtgtgttgctcaccacctctgagactaccgttctggggttccgcccacccaacaaagctcgtccttacaacttagtcggggctgcactctttggagatggagcagctgccctgatcatcggagcagaccctacagagtcggaatctcctttcatggagcttcactgtgctatgcagcagttcctgccccaaacacagggggtgatcgacgggcggctgtcagaagagggcataaccttcaagctaggaagagacctccctcagaagatcgaagacaacgtggaggagttctgcaagaagctagtggcaaaggctggctctggtgcgttggagttgaatgaccttttctgggcagttcatcctggtggaccagccatcctgagcgggctggagacaaagctgaagctgaagccggaaaagctggaatgcagcagaagggcgttgatggattatgggaacgtaagcagcaacaccatcttctacataatggacaaagtcagagatgagcttgagaagaaaggcacagagggagaagagtggggtctgggcttagctttcggaccgggaatcactttcgaaggctttctcatgaggaacctctaaatgtatatgaactggacatttctcaacaaataaaatatacaggaaccgatgctaacacacatacatcatgtaatggttgcattagttttgttctttaatggtaaatcacagaaatacatcaatacagtaagtttatatacataattgaagtattcttcaatggcatcttacttcatgcattcaaaaaaaaaaaaaaaaa

SEQ ID NO: 1098 - DNA, 3621 bp, Arabidopsis thaliana
  Clone ID: ARATH-23APR03-CLUSTER6245_2
gatttcttccccaatcttcttcttcatatccttgaaggagagagtatagagaatccgatccaaaaaccctaaaccccatttcccgccgattttctcccaagctgatacggagatcaaaatgggagatccgttggagaggttgggttatgaggcatcaatggctactgagtctgtcatgaaggaggacttgtgtttagagatcgatcctcacttaactaaataccattgccacctctgaagattggcgtcgtacctctcggtaaggttttgccttctgtcggagtactccgtaccacgacgtgtctggcccttgatatctgagtccgccggcacaagctatgctactagttttatccatgagccacgacgcaagataatccatatacagcgcaaagtaattaacgtggggtcaagatttgcagggtaaatcttcttagaacaagatgaaatacaaatctatcctgtatacagggatccggtccttaatttgggttacttttgttatgagccttggttttgatctccgttggtgttatctagtaaatccacttgccctatgggcatcgcttccgggactcgaaattagtgtccttggaaccgttcggagagaacattgtcccacactcgccggatttcggaaaaacctgtatcatcttgggtcagattaaagagagtctcccgattactgcttccgtccttgtcacaaccaccgccgcaagattatgatgagttgttaggtttttgcaatcgttaatgagtacggaaccatggctgtagcgtttcagagtggtgatcatcgcaatgtagcctcgggagttttcttacttccatccgaagtcgtgagtttcggacgctctaaggcaacattgtgaaccaaataatcaacaccagctccagggaaaagcgacactgcttgctctacaacatgtttgagtgactcttcgccgctagctaaatctaaaggcaaaaccttgacatcttctggtgcaaatttacctttaagctcactcttaacccgatccagttcagctttattcctagcagagagaataagcttggcatctaaacttgcaaactgtttagcaagaatttcaccaattccacggctagcccctgtgatccagacgaccttgccttgtatggcctcacgcttcacatgcttcttcgaaatcaaggtaaaatctccatcggcgaatgcaaatttgaagagcagaacgataagaagaagcgctccgagagagaagaagagtagagtcagcattttgtcggatttaagcgacctgcgaccgttgaagtatcagcaggcacgcaattttcgtttaccttgtggcctggcttatgttgcggaccctggatacatgctatttagagctggggtccctcgacatgctatcataaagaaggttgctaatgaggatatttccagtcttggagacttagtatctgttctttcaaagctttctaggggtgctcgtgttccattggaatatatgtctcacactgatcgtcatcgcaagaagtctgtgttagtcacgattgatcatcatgaatggtacgctcctcctcagttgtatacccgtaatgacagttccggtttatgggatgcgaaacctgcaattgaacctgcttctgtttcaccatctattggtaataatggctttcctataagccaagatatttctctatgccatcacgatacggaacccatgcatgaagtgaatgttcgtggggttactgatattgcagcgattatggaaacttctagtggggatggttctcagaatgattttggctcagaagcaaagaaacaaagagttgacgaggattcttcagatgggattgctgcaaacggttccttatatggcagtgaatttaaatctgatgatgcaatggaaacagatactacagttttaagagacttcgaaggtgcaacagcactgtctgctaatgcttcattggctgagcgtgctattgagcctgcacttgtcatgtttgaggttcatgtgccaccatcgtgcagtcttgatggtgtacactcacaacatttctttgggactggcatcattatatatcattcttctaacatggggcttgctgtggtggacaaaaacacagttgcgatttctgcatctgatgttatgttgtcctttgctgctttgtgtgacccttttcatacttacccaagaacctacgatttgctgcatgctgcgggtctgttttccattgaaagaaaaagatgcaacatgacaacaatgatgctagagatggaccggattttaagacctggaggacgtgtatacatacgggacacaatcaatgtaacgagtgagcttcaagagattggaaacgcaacgaggtggcacacgagcttacgtgaaactgctgaaggacctcactctagttccagggctctcttatatgaaaatcggtttaaatacgtattagaagtgtagacccaagaaggtagctcattttcagggaaaatgactgatgagcatggaagaattcgggctatttggggaagtttttcgacgcaggttatagatagtacggccaatggttaggttagctaggaggtcttttggaactttataaaaactatgggccctgaaacagtaaaaatcataaccggtggaaatggaccagctcttctcataaatggtgtcaaaaggccaatgccacttgttcggattttggaagttgaattgtatcctactttgctttcaaaagcccggagttttggtctgagtgatgaatggatccaagtcctagtcaagaaggatcctgttagacgtcaagttctgcgtgttaaaggttgcctggcaggatcaaaagctgaaaaccttcttgaacaaggcgatatggttctggcagtcaataagatgccagttacatgcttcaatgacatagaagctgcttgccaaacattggataagggtagttacagcgatgaaaatctcaatctaacaatccttagacagggccaagaactggagctcgtagttggaactgataagagagatgggaatggaacgacaagagtgataaattggtgcggatgcgttgttcaggatcctcatcctgcggttcgtgctcttggatttcttcctgaggaaggtcatggtgtctatgtcacaagatggtgtcacgggagtcccgctcaccgatatggcctctacgcgcttcaatggatcgtggaagttaatgggaagaagactcctgacctaaacgcattcgcagatgctaccaaggagctagaacacgggcagtttgtgcgtattaggactgttcatctaaacggcaagccacgagtattgactctgaaacaagatctccattactggccgacttgggaattgaggttcgacccagagactgctctttggcggagaaatatattgaaagccttgcagtaaaagccatttggtgtttctctgaaagtctcttatgtctctcattgctccaactttgttgtatttctatcattcttctactcaaattcttcattaattcatcatactaaaagacctgtcactacagtttacagaaaaactgaaggattttacatccagtaaaaatgttcaaatcaaaagatttcccatgttaatattttcttctaag

SEQ ID NO: 1099 - DNA, 978 bp, Arabidopsis thaliana
  Clone ID: ARATH-23APR03-CLUSTER6248_1
aggaatattccggtgatggctgaagatttttcggtggttgtgttggcttctgatctaggaattgacgctagacccttcttgacgagaagcgatgacgttgatgaacaagaaaactggcatgattgtccccaatacttaggagatgaagatttctctgatctcgatcttctccagttctttactctccagggcttggataggtccggtaaccggattttccgcatcgtcggaaagtatttccctgctcgtgtagtgagtgcggagcggctgaagaagtatatatcccagaagataagcaaccaatgtcctgagggacccttgtgcttggtttacatgcatagcacagtccaaaaggacgacaattcaccgggaattaccatcttacggtggatttacgaggaccttccttcagaaagcaaagacaggcttcaacttgtttatttcatccaccctggtcttcgttcaagacttgtcattgccactcttggccgccttcttttaagtggaggactgtactggaagattaagtacgtgagcaggttgcagtacctttgggaggacataaagaaaggcgaggtggaaattcccgactttgtgaagaaccatgacaatgtgctcgagcatagaccattaacggactatggaatcgaaccggatcctttccagttaagcgaggttcaatcttcatcgttctctctcaaccgctacgagaacagatgggtctcatagtacacattgctctttgttgagctagaacctctatatgtttgtgtctgttgtatagagtaatctaatgtattaaacactcgtgtatcatcaatctgctttttgattgattttggaccgaaccagtaccagtattagatttgttttcgaaaccgggtcgaattttgctctttgttgagctagaaaaaaaaaaaaaaaaaaaaaaaaaaaaaaaaaataaaaaaaaaaaaaaaaccaaaaaaaaaaaaaaaa

SEQ ID NO: 1100 - DNA, 1293 bp, Arabidopsis thaliana
  Clone ID: ARATH-23APR03-CLUSTER6261_1
aaaagaaaggataacgaatcgtttctcttcgatcgaaagaatatatatttggaagttttctctgcttttttgttttcgtttgatagaatgggaacagttctcgattcgcattttctggctctcactgctattgtcactgtggtttaccagttcatattcttcttcaacacggatcatttacatttgggagctagttccgcatttttcttttcgcttgatataatgggaacagttctcgattcgcattttctggctctcactgttatttgtcactgtgattttaccagttcatattcttcgtaatcacggctcttttcaaatttgatcaagtcactgactttgctggtagcacaaacttcggtatacttgctgtgttaacacttgttctcaaagcctcttggcattttcgacagatagtattgactttgctagttgtggtatggggtcttcgcttggggattttccttctaatgaggatcttgcaatggggggaagatcgtcgctttgatgaacagcgtggaaatatagtgagactaatcattttctggactcttcaggctgtgtgggtttggacggttagcttacctttaacacttgttaatgcaagtgatggtggtggatctcttaaacccgcagatgttatcggttggactatgtgggttttcggtttcttgattgaagctgcagctgatcaacagaagctatcattcaaaaactctcctgaaaacagaggaaaatggtgtgatgttggagtctggaagtattcaagacatccaaactacttcggtgagatgttactgtggtggggaatctttgtggctgcatcgcctgtgcttgaaggtgcagagtatcttgtcatattcggaccactctttctcactttgctacttctattcgtcagcggcataccattactcgaggcatcggctgacaaaaaacatggaaactcaggagcttacagatcctacaagaagacaacaagtcctctgattctgttcccaagaggagtgtatgggaacttaccaggatggttcaagacggtctttctcttcgagtttccattttacagccgaaatctccctcaagagttagggtagactccaaaacagcaaagagaaagaagtaaaagatgactgatttgtgatactcatatttgagttattgttcttcacaacactctttgataaaatttgtgtaaaaaattgcccgtaagaaactgaatttgtttgaaatattggacagtcttgacagattatctcagttgtatttggttcccaaaaaaaaaaaaaaaaa

SEQ ID NO: 1101 - DNA, 1809 bp, Arabidopsis thaliana
  Clone ID: ARATH-23APR03-CLUSTER6289_1
acacattaaactaaagaagagagaactttagaggttagagagatgaagacgcaacatcaatggtgggaagttcttgatccattcttgacacaacacgaagctcttattgcattcttgacttttgcagcggttgtaattgtgatttacttgtaccgaccctcctggtccgtatgcaatgttcccggtccaaccgctatgcctctagttggtcacttgcccttgatggctaagtatggtcctgatgtcttctccgttcttgctaagcaatatggccctattttcagatttcagatggggaggcaaccactgataataatagcagaagcagagctttgcagagaagttgggataaagaagttcaaagatcttccaaacagaagcattccttccccaatctcagcttctcctcttcacaagaaaggcctcttcttcaccagggacaagagatggtctaaaatgggaaaaacatctttcaaacagaagcattccttccccaatctcagcttctcctcttcacaagaaagggcctcttattcaccagggacaagagatggtctaaaatgagaaacaccatcctatctctctatcagccttcacatttaacaagtcttatccctacaatgcatagtttcatcacttctgctactcataatcttgattctaaaccgcgagatatcgttttctccaacctcttcctcaaacttaccactgatatcatcggacaagcggcttttggagtcgacttcggtctttccgggaagaaaccaatcaaagatgtggaggtgactgatttcataaaccagcatgtctactctacaacacaactcaagatggatttatcaggatcactctctatcatcttaggcttactgattccgattcttcaagagccgtttaggcaggtgttgaagaggataccgggaacaatggactggagagtcgagaagactaatgcaagactgagtggacaacttaatgagattgtgtcaaagcgagccaaggaggctgagactgactcaaaagacttcttgtcattgattttgaaagctcgagagtccgatcctttcgccaaaaacatcttcacatcggattatattagtgctgtgacttatgagcatcttcttgctggctctgcaaccactgctttcacactatcctctgttctttacttagtctctggtcatcttgatgttgagaaacgtctgcttcaagaaattgacgggtttgggaaccgtgatctgatcccgactgctcatgacttacaacacaagtttccatacctcgatcaggtcattaaagaggctatgagattctacatggtttctcctttggttgcaagggaaactgctaaagaagtggagataggaggttatttactcccaaaggggacatgggtttggttagcactaggagttctagcaaaggaccctaaaaactttccagaaccggagaagttcaagccggaaagatttgatccgaacggagaagaggagaaacatagacatccatacgctttcatcccattcggtatcggtccacgagcctgtgttggacagagatttgccctgcaagagatcaaactcacattactgcatctctaccgtaattacattttcagacattccctagaaatggagataccactgcagcttgattatggtataattctcagcttcaagaacggggttaagctcagaaccatcaaaagattctgattcttgaaacaagtgaaataaaagcaagactgaaatttatatttaaattcaaaactccaatgtagttccaaaggaaaaagaacaattaacgaca

SEQ ID NO: 1102 - DNA, 957 bp, Arabidopsis thaliana
  Clone ID: ARATH-23APR03-CLUSTER628_1
aacccacaaattgatctcttctctttgctcttacaccatcttcttcattcaccatgggaagatctccttgttgtgaaaaagctcacacaaacaaaggagcttggactaaagaagaagatcaacgtctcgtagattatatccgtaatcacggtgaaggttgttggcgttctcttcctaaatccgctggattgttgcgttgtggtaaaagttgtagattgagatggattaattaccttcgtcctgatcttaaacgtggtaattttactgatgatgaagatcaaatcatcatcaaactccatagcttactcggtaacaaatggtcattgatagctggaagattaccaggaagaacagataacgaaataaagaattattggaacactcatattaagaggaagcttcttagtcacggtattgatccacaaactcatcgtcagattaacgaatccaaaacggtgtcgtctcaagttgttgttcctattcaaaacgatgccgttgagtattctttttccaatttagccgttaaaccgaagacggaaaattcctccgataacggagcttcgactagcggcacgacgacggacgaggatctccggcagaatggggagtgttattatagtgataattcaggacatataaagctgaatttggatttaactcttgggtttggatcctggtcgggtcggatagtcggagtcgggtcatcggctgattctaaaccgtggtgcgacccggtgatggaggcgcgtttgtcactgttgtaataatttgtcaaaaaaatcccaaaaaatgggttttgttacttcattttttttttgcttgagtccttttggataaatatagaaattctttacttcagtttctttggtatatttgttttagtttttgttcatattaccttttgaagaaaaagaaaaaaaacgatacatggtttccaaaataaaaaaaaaaaaaaaa

SEQ ID NO: 1103 - DNA, 2351 bp, Arabidopsis thaliana
  Clone ID: ARATH-23APR03-CLUSTER6345_1
caagagtagaccgccgacttagattttttcgccgacgagagaatatatataaatggctcgtctttttccaaacgatttcttcttcttcgtcgtcgccggtttagggtttccgttgctgtagcaattttctctcgcttctctctccccttttacagtttctcttatattgctcttgccttgcgtccaatctcaagagttcataagagttgacatttgtgaacatcgaagaaatacggtgacgtttcttctctgattactttttgccaacatgaatactaatgtatttatcaacaagtgctacagcctgtttttttcgaagctgttggtgagttcccatccttagtactgctagacagttcggtgtgttagttgactttatattcaaggttataggtttagtgttgttagtagagaaaaatggaagccaaaatcgtcaaggtatcggatagtagttataaagatggtcttgggaagaagagaaagcatccagggaactatactccttatgattctggaaggtcatatgcaaagctgcaatgggtgctttcacccaacagttccacccagaagcttgagaaaaggagaaatttggatggtgaaaacaaagttattgtttctgagaatcatgttgagaagtctttggtcagatacttctcttattataagaagacaggagtgccaaaacgtgtaatgttccatgagaatggtgaatggattgatttgcctgatcatattctatgcgacatcaggaatgatcttgaagcaaagagagctacaattgagttcaattggtgcggtcgccattttctcctggatttcttgcacatgtatcgactagacttggaaacaggtgtaaaaacccagcttgcttggattgatattgctggcaaatgctttttccctgaaacttttgacaccctcgaaagggacggctgccatcatatccgtggggaagatccggaacaacatgatcaacgtgagatcaagctgcacattgaaattgatgtaaatagtggggagttaccgaggctgaatttgaatgtggtcactgacgagtctggtgacaatatggatgattttcaagctgttcagagatcctcaaatgggccaaatgacgaggcatcagaggatagctgcagccgtgagcttgatgatgctgttgagaaatgggacaaaacagaaactgatcggttctctggtgtcaagcctgctgaggaggagcttgataaagatgctgtcaaacaaatgtttgctttgggtgctgccactctagggcatgtagagtcgcttgatgtgtatcagttttcaagcgagattgcaaaggctcgtctatctcttttccagaagcaagctgacatcactaagaaacaccgaggagatgcaaacattagatatgcatgggttcctgcgaagaaggaagtgttatctgccgtgatgatgcatggacttggagtgggtggagcattcattaaaaagtctatgtatggtgttggggttcacgctgcaaactgcccttatttcagtgctagatactgtgatattgacgataatggtgtgcggcacatggttttgtgccgcgtaataatggggaatatggagcctcttcgtggtgataacacgcagtactttactggtggagaagagtatgataatggggttgatgatgttgagagtccaaagcattaccttatctggaacatgaatatgaacactcacatttacccagaatttgtagttagcttcaagctgtctatccccaatgctgaagggaatattcttcctactactcagagtaggcacgagagttcgggactcaccttggaaggacccaaaggttctccctcaaatgagccaggaagggtatcaaatggaggttcagggagcgaaaagaatagctccagcagtagaaggcccagatctcctataatgcctttccctctgctgttcaaagcaatctcgagcaaaattgctcgtaaagacatggatttgataattgctggttaccaggaactcagggagaagaaggtgtcgagaaaggaattttataagacgctgagtatgattgtaggagatgatgatctgctgatatctacaataacaggccttcaaaggagtttgggttagattaatgtgtcgacttctctttgctgtcgtgaaaccttaatagtttggattacgacaaacgtgacttgatctttagaaacttagtagtagtactgttatatttactcttttggtgaaactagtctccattatcctgtttttctttacttggaatcaaagagtcttttattcaaaaaaaaaaaaaaaacgttgtttggtatgtatgttgacggatctagtagaaaaac

SEQ ID NO: 1104 - DNA, 1491 bp, Arabidopsis thaliana
  Clone ID: ARATH-23APR03-CLUSTER6348_1
ttcttcttctctaaactccgtatctggaagtttgtggagtatagtaaaatgatatttttagatggagacattcaagtttacgaaaacatcgatcacttgtttgacctaccagatggctatttgatcagcaaacacaaacacacgactagataaactctaaatcctcacagcagatcacgtgctaatcacatggctccggggcttactcaaaccgctgatgctatgtccaccgtgacgataacaaaaccgtcactgccatcagtccaagacagcgatcgagcttacgtgacgtttcttgctggaaacggtgattacgtgaaaggagtcgttggtttagccaaagggttaaggaaagtcaaatcggcttatccactcgtagtagcgatgttacccgacgtcccggaggaacaccgtcgtatacttgtggatcaaggatgcatcgtccgtgaaatcgaacccgtttacccacccgagaaccaaactcagttcgccatggcttattacgtcatcaactactctaaactccgtatctggaagtttgtggagtatagtaaaatgatatatttagatggagacattcaagtttacgaaaacatcgatcacttgtttgacctaccagatggctatttgtacgcggtgatggattgtttctgtgagaaaacatggagtcacacgccgcaatacaagatcagatattgccaacaatgccccgacaaagtccagtggccaaaagcggagcttggagagccaccggctctttacttcaacgccggaatgttcttgtacgagcctaacctcgagacttacgaggatctactacgaacacttaaaatcactcctccgactcctttcgctgaacaggattttttgaacatgtactttaagaaaatctacaagccgattcctttagtgtacaatctcgtccttgcgatgttatggcgtcacccagaaaatgtagagcttggaaaagtcaaggtggttcactactgtgcagcgggttcgaagccgtggagatacacagggaaagaagcgaacatggagagggaagatataaaaatgttagtgaaaaaatggtgggacatttacgacgacgaatccttggattacaagaaacctgttaccgttgtggacacagaggtcgatctcgtgaatctgaagccgttcatcaccgctcttactgaagctggccggctcaactacgtgaccgcaccgtccgctgcttgaatgttgccaggagttaaaattgtcggtggatcaggtagttatttttctttccggtcagtaagaggttggggattatgtgtcgggtcgacaaccacacatactgtctctggttccaatgctttggacgttgacatgtgatttgctttacttttttgtctataatgtgtgttatcctcaattttagcgtctatcttcgaatatcaaacttgagtgacaaaataaatattccaaataacaggtcttcttcacacgaaaaaaaaaaaaaaa

SEQ ID NO: 1105 - DNA, 1588 bp, Arabidopsis thaliana
  Clone ID: ARATH-23APR03-CLUSTER6354_1
gaaaaatcctaaatcccaaataaaccaaacagagaaaaaagggagaaatatttaacaacactaggagtctacaagtccacggcttgatcaatttgttcttcatctatttccttattctcagggaaatccagggtttttgaattcgtactctctctctcgttgtccctctcaaatcagaaaagtatctgccttttttaaaattcattccccttcgatctttgctttttcatcgctgattgttcttaaaaggaatctctactttttcaataagcattaacattgtccgtttcctcatctttggttcttcgattctcttaaagaggattttatatttgatctgttgaagccctttttctggggttttgtctgcgtttgtttccttcttctaatccagaattaaaactagctctctgcgctcaaagttttaagttttattcaaagaggtgtaagcaaattctccaattgatgatcaactgtttaaaagactcaatacatgttttgatgagctgtttaaaagactcaatacatgttttgatgagtgttttgctgtccactagtgatgatgatggtcttacgaatgctgaggatagagaagaagtagatgcaaaggaagaagaaggtcaaattgttggggacactctcactctcaaaagtagtcttcgaaaggttgattcaaattcaacagaagctgagaagagggagaagaagaaggtacaatgggtggatgtgattgggaaggaacttgctgagattcgagaatttgaacctagtgatgaagatgatattgattctgatcgaggcaaaacctgtgtttgtattatcctgtgatccgtccacttaagtttaactgggagatttaaggcaaaagacaaagttggtggcttcagcattaaattccatatacatggagattgtggagcaagtttcaaatataacaattgctgtgcatatatatcttgcatttgtgttctatagccattcttaagtttgcacgcttgaagccatatgatgatgattcctgatttaacacggaagcattctttttcttcttctttagaagtagtttgaaagtataggtctttaacttcaattcgttgcttcaatcatttaatgaagttctttctcattcagattgtggagcaagtttcaaatataacaattgctatgcatcgatatctagttctgcgatttagttcaaatgactttgataaaagcttaggctttggagcacttctgttttcaatttcttccactttaccagaggctcagtgaattccatcaagaatgtgaatagatctgtggtccacaagtatgtaattgaaagaagtttgtagcacccaagaactggtttaagactcatctgttccgaaaaaaaaaaaaaaaatatttgggtgccaaaacagcaagtttgatagtgcagactatatctcaaggcttaggctttggagcacttctgttttcaatttcttccactttaccagaggctcagtgaattccatcaagaatgtgaatagatctgtggtccacaagtatgtaattgaaagaagtttgtagcacccaagaactggtttaagactcatctgttccg

SEQ ID NO: 1106 - DNA, 3024 bp, Arabidopsis thaliana
  Clone ID: ARATH-23APR03-CLUSTER6372_1
ctgcctcctcatcctcgccccgcccttgtgcgcacgcggctacccccctcggtcacacatgtaataaaccttactcatcccccccccccccccgatgtgatttctccacttcctctctctctctactgcaacttcctcctcctgcttcaacttcattcgggtaatgatgaactagcgtagagatttggatcttcttcttcgtcctctcaccaactcttcaccggttagatctctttttttcccgctaacgaatgaggagcgttgccgccgccgccgctgctgctgctgctgcttctaagccttctaatcctctcgtcgcctttgagcacaagagggatgcatacggatttcctgtcagacctcaacatgtgcagagatacagagaatatgctgatatttacaaggaagaagaagaagaaaggtcggacaggtggagcagtttcttggaagatcatgttgaatcgactgagttacctgcaaacggatcttctgaaaatagtcacacaccgtttagtgaaagtgagaaggaaaaagaaaaagaattaaacaaggggactggtgaagatctgcatactgacaagttaggttctgatgtaactcctgataatgccagtgaagaagaaggacaccccgatgcagagaagaatgttcacagagtgcaattatggactgagatcagaccgtctttaggatcaattgaagacttgatgagcatccgtgtcaagaagaagggggatttatcaaaaagcgagcaagatgctccgaaggtgaaggtttcaccttcatttgatgatgacaaatcttccaagggagcatctgatattgattctgaagacgagttctatgatgttgagaggtcggatgttcaggatggttcttcttcagatggtacaagtgtctctggtatccctgttgctgctgatgcaagtccactgtctacatgtccttggaaggaagaacttgaagtgcttattcgcggcggtgtacctatggctctgaggggagagttatggcaagcatttgtgggtgtgaggaaacgacgatgcaaggattattatcaaaaccttcttgcagcagatggttctgtaaacaccatagagcaagaggatatgcagcatgttgatgataaaggttcaagtacagaatctattgctgttgtggaaaaatggaaaggacagatagaaaaggacaaaaaaaaaaaaaaactcgagggggggcccggtactgatgatggtagaaatgctctacggcgtttgcttactgcttatgctaggcataatccttctgtaggatactgtcaggctatgaatttctttgctgcgcttttattgcttttgatgccagaagaaaatgccttttgggcactgataggactcattgatgactacttcaatggttattattcagaagaaatgatagagtctcaggttgatcaactagttctggaggagttagttcgagaaagatttcctaaattggttcatcatctggattatcttggagtgcaagtggctacatgaaattagattgcaagaattgcgaagcaagcataggccagctgtgatcgctgcacttgaggaaaggtcaaaggggcttcaagcttggagagattctaagggacttgcctccaaattatataattttaagcaagacccaaaatctgtattggtggatagcaaagcctcattgtcaaatgggagtttgtctcgatctgagtcaggatcaagtaatgcagatgaagtgttggttagcctaactggggatggggaggtagattctgttcaagatcttcaagcgcaggttctgtggttgaaggctgaactctgcaagttgcttgaggagaaacgatcagctctacttagagctgaagaattggagattgctctcatggagatagtaaaggaagacaatcggcgtcaattgagtgccaaggtcgaacagttagagcaagaaatggccgaagttcagagactcctctctgataagcaggaacaagaaggtgcaatgctacaggtcttgatgcgggtggagcaagaacagaaggtaacagaagatgcacgaagatttgctgagcaggatgcagaagcgcagagatatgctgctcaagtcttgcaggaaaaatacgaggaagctgttgctgcactggctgaaatggagaagagagcagtgatggcagagtccatgctcgaggcgactttgcagtatcaatctggccaactcaaagcacaaccttcaccacggcaagttaaccaagactcgtcagtgaaaaacatcaatgatcaaataccagaacctcctccaagcaggatcagtttgctagcacggccatttgggctagggtggcgcgacaagaacaagaacacaacatctaataaatcagggaagaaacgaggaggctattgctactcttgctgaaatggaaaagagaccaacttatggcagaggccatcctcgaggcaactttgcagtatcaatttggccaactcaaagcacaaccttcaccacggcaagttaaccaagattcgtcaccagaacctcctccaagcaggatcagtttgctagcacggccatttggactagggtggcgcgacaagaacaagaacacaacacctgaaaaatctccggagcatgttaatgacgagaagcaatcatcaacagaggcaaaagagactaactctgaaccaacggaaactaaggtccaagacatttcctaggtataatcaaccttgaagctctcttttccacttccatcttcaaatcgtagtagctaaatcgtcctacgtgtagtctcaatagcttctcagttctctcagtcacccttttttcataattccggattgaattttgggagaacttttaaatacattcatttgtttgtttgtggtatgctgctataaatatattcattttaaggtgatgggatacatacaagacataaatggtgtatatagttcattaatctctaagctagtaagtaaatgattctcttggataccctcagttttataatatatgaattttatc

SEQ ID NO: 1107 - DNA, 1741 bp, Arabidopsis thaliana
  Clone ID: ARATH-23APR03-CLUSTER6380_1
aaaaaatcttctttctcaaaatcttctttctctcgtctctgcgtttattctctctggatcgaagtagtaactttacgtccgcgatttggtctctctctctctctctctttctatccgataaatctcaggagaagttagtcgaggtagtctgcttctatgccattttgccgagaaaatgggagaagttaagggatgttggaaattaggacgaatgctttcaaaggataactctgcaaactcctacaacgtctcccttctcttatctcctgttgtttctgtttgggattgtattgtccgtaaaatgaggtatacctacatacctgagtgggtgtagtagtcattgagatcatcgcgccttggtgtagtgagtttggtagaatcaaagtaaaaggaaacaaccaactaaaagaagaagccagttaacaaaagcaaggcaaacaaagacttgtagcaatcatggatagcagtagctcgatgtgcaaacaagctcagccaattgttagaaaagccaggaagaaaaaagtaaaaggtgtagtggacccaattaaacaagctgagaagaaaaatagacgtcttgagaaagctattgctacttctgcagcaattcgggctgagctagagaagaagaagcaaatgaagaaggaaggacagctagaggcagcagatgaagaagattcagcagatgctgcaaagaagaagcaggagagagacgaactggagcgtatcaaacaagcagagaataaaaagaatcggctggagaaatccatcgctacttctgcagccatcatggctgagctagagaagaagaagcttagaaaacttgaggaacaaaagagattggctgaggaaggtgctgccattgctgagaagaaaaagagacgtcttgagaaagctattgctactactgcagcgatccgcgctgagctagagaagaagaagcaaatgaagaaggaaggacagctagacgcagcagttgaagaagattcagcatatgctgcaaagaagaagcaggagagagaggaactggagcgtatcaaacaagcagagaggaaaaagagacgtattgagaaatccatcgctacttctgcagccatcagggctgagctagagaagaagaagcttagaaaacttgaggaacaaaggcgattggatgaggaaggtgccgccatagcagaggctgttgctctgcacgtcttacttggcgaagattgtgatgactcataccgaaacacgctaaaccaagaaacaggtttcaagccatgggactatactaccaaaatcaatctttttagtggtggaataaacagattctttcctcaccaacggtgctcaagctacgcggttcatgataacaacagaacaagagacagtaactggtcgtcagtctcatatgagcctttcgcaaggggatgggataacaacaacaacaacatgggaatatcagctgatttgtttgatactcaagctgtgtcgtcactacagatctctgagaatactgacgttgacgcaattgtcttcaatgggatgttcagaagatgacgactgtatcataattcccaagcatttgtaacttattaaaagtttgtgtgctgttttttattttacacaaccaaaacaactttttcgtctcttacactgtgcaaatccttcatctctctttagctttttagtgaagtgagactcatacgatctgtgtttttgtttcctttgtggttgtacttaatttaatccttctcaatgc

SEQ ID NO: 1108 - DNA, 1631 bp, Arabidopsis thaliana
  Clone ID: ARATH-23APR03-CLUSTER6388_1
acattccaatttgagggcagtggaggtgtaacaacaatggcgcctctcaaacatctggagaaggaaaatccaatcatcgacgcatgtttccaagatttctgcgcctctcatggaattttaacaagttgtgttctacatcttctcttcttgtatctcgttttctcgtatcgattctatttgatttctcctgtttgcctgcaaaaaaacgactgtggttggcatatgaacatgagaaacacaattgcttagtccaattactttgaggatttccttctgcatgatctctacgaacttactgcattttctcaacggcagacaaatgcagatagattgaaagagggtatcactctcatcctctctttgatagaacgtcagtgtcggccattggtgaatggtttaaaactgttggaggatctacaccgtaataaacatactctgtcgactggagacaaagagacggactcattgcttcaaggtggattccgtgagggtcagcttacagaacttgtcggaccttcctcttctgggaaaacacaattttgcatgcaagctgctgcaagtgtagcagagaatcatcttggcagagtcttgtatttagacacagggaactctttttctgcccgacgcattgctcaatttatctgctccagttcagatgctactttagggcagaaagtcatgagcagaatattatgccacacggtctatgacatatatacactgtttgatacgctgcaagatctagagattactttgaggttgcagatgaatgtgaatgagtcccgactacgattgttagttgttgattcaatctcttctctgattactccaatccttggaggcagtggctcacagggacgcgctttgatggtggcaattggatatttgcttaagaagctggctcatgaacatagcatcgctatactggtgacaaatcacacggtgggtgctggaggagaaggtggtaaaaccaaaccagctcttggggaaacatggaaaagcatcccacacgtgagactttcgctatcacgtgaccataagaacagcaactgcaccatctccatcttaaaacacacatccttgccttcaggccaagctgcgaagaccttgactcgcaaggagaatcaacaatgtccataagcctccttggctatatattccacgcccatcgtttggatgtgcaagaagagaaccacataaatgaatgatcagatggatttcttgtttcggttttacatgtagaattatactgcagcaatgaaaattaaaatttgttgaacaaatgagtggtgtgtatataaggatcacatgaatatagaatcacattttaaaaacaaaaaaaaaaaaaaaaaaaaaaaaaaaaaaaaaaaaaaaaaaaaaaaaaaaggaaaaaaaaaaaaaaaaccaccgtattaacaagcggcgtaagcactggagctcacagagttggcaggaaaactcttattgtcgctgctgccgctgctcaacctaacaaatcttggatccctgccgataaaggtgggggcaacttccttgaccctgaatggctcgatggctcgctaccaggaaatttcaggttcgacccatcgggtttggggaaagacccggcttctctggaatggtacaaagag

SEQ ID NO: 1109 - DNA, 1401 bp, Arabidopsis thaliana
  Clone ID: ARATH-23APR03-CLUSTER6392_1
atctgattgatcttgatataacggaaattgtattgttttgagccatggaaactcttttccacactcttcttagattattactattcgtagccatctctcatactctgtcccctctcgccggttctttccggatttctaatgactttccggcggttttcaacttcggagactctaactctgacaccggagaacttagctcgggtcttggattccttccacaaccttcctatgaaataaccttctttagatctccaacttccggaagattctgcaatggacgtcttatcgtcgattttctaatggaagcaattgatcgaccatatttgaggccttatttagattcgataagtcgacaaacttaccgaagaggctgcaattttgctgcggctgcgtcaacgattcagaaggcaaatgctgcatcctatagcccctttggttttggtgttcaagtctctcaattcatcacctttaagtccaaagtccttcaattgatacaacaagatgaagagctccaaagatacttaccgtccgaatatttttttagtaatggattgtatatgtttgatatcggacaaaatgatattgccggagcattttacaccaagacagtagatcaagttcttgctctggttcctataatcttagatatatttcaagatggaataaagagattatatgcagagggggcaagaaactattggatacacaacacaggaccacttgggtgtttagcacaagttgtgtcaatttttgggaaagacaaatcaaagcttgatgagtttggttgtgtcagtgaccataaccaagctgctaagcttttcaatttgcagcttcatggtcttttcaaaaaactccctcaacaatatcccaattcccgtttcacatacgtagatatcttctctatcaaatccgacctcatcctgaatcattccaaatatggttttgatcattcgataatggtatgttgtggaaccggaggaccaccactgaactacgatgatcaggttggttgcggtaagacagcaagatcaaatggtacgatcataaccgccaaaccttgttatgatagttccaaatatgttaactgggacggcattcattacactgaagctgcaaatcggtttgttgcactacacattctcaccggtaaatactctgagacggcgtcatctttgaatctttagcaatgtaacaaagaaagttacattatcactttctttatggattacatatatatttagttgtatgttaactggtttatttatgattatatgaataatttccataaacttaactgtttcatttccaaaaaaggcattttccaattttctttcacaaagatagatgctttgtcacaataaaatgaatctttcaaatttcctgcaaaaaaaaaaaaaaaaa

SEQ ID NO: 1110 - DNA, 2402 bp, Arabidopsis thaliana
  Clone ID: ARATH-23APR03-CLUSTER6467_1
gatcttcatcatcgtctcttctcttctcttctactccaattcgtctcttttagtctcttacactttcctaattcttcagtggttggttttcacacagcgagagtttcaagcgtctatgcgtaattaagcagctccttaatggcttcttcttccaccagctccctcaatctccactctctccccaaggcttcttctgggttgggccaatggaagagtgggttccggtacgaattgttgggtagctccgtttctaggaaccgattgtttgtttctcctgtggtgattcatcaccgaagtccgagacttccggcgatcaaagcggcgtataactcagatggaggctcgaagcgtagtagggtttataaggagtcacaagcggctagtggttttcctaatgctaaagtgcagcagattgcgtcttccgtcttgcccttgggatcatttgctgtcgtcactttcgttttgtggaaagtggttgggaagttcatgtcgcctaagtctccaaagacttctgctggagaaaacaactcttctacacagggagtgaaatggtcgatcggggccggtactaatttgttacaaggatttgctgctaaggttgatagagaggccaagcagaggcttaatgaatttgcaaaagaacttaggtccttcagaagtgttgacatgtcaggatgcaactttggagatgaaggattattctttcttgctgaaagccttgggtataatcagactgtagaggaagtcagtttttctgcaaatggaattacagctgcaggagttaaagcctttgatggtgttcttcaatcaaatattatgttaaaaattcttaatctttctggaaaccctatcggtgatgaaggagctaagactttatgcgctacactgatggaaaattctagcattgagatacttcagctgaacagtactgatataggagatgagggtgcaaaggaaatcgcagaattgttgaagagaaattcgaccttgaggattattgagctgaataataacatgattgactattctggattcacaagtcttgctggagctcttcttgagaataatacaatacgcaatttacatctcaatggaaattacggtggtgctttgggtgccaatgctttagctaaagggcttgagggtaacaagtctttacgggaacttcatttgcatggaaactctattggagacgaagggactcgtgctttgatggctggtctatcttcccacaaagggaaagtggctttgctagatctcgggaacaactccatttccgcaaagggtgccttctatgtagctgaatacatcaagagaagcaagagcttggtttggctgaacctgtacatgaatgatataggtgatgagggagctgaaaagattgcagattctctgaagcaaaaccgttcaattgcaaccattgacctgggtggaaataacatccacgcggagggagttaatgctatagctcaagctctgaaagataatgcaattattacgacgttagaggttggttataatcccataggaccagacggagctaaagcattatctgaaattctcaagttccatggaaatgtaaagacgctcaaacttggttggtgtcagatagctgccaagggtgctgaacatgttgcagacatgttgagatataacaatacaatctcggttttggacttgcgggcaaatggacttagagatgagggagcttcctgcttagctcgaagcttgaaagtagttaatgaagctctgacatctgtggatctaggattcaatgaaatacgggatgatggagcattcgccattgctcaagcattgaaggccaatgaagatgtcacagttacatcgataaaccttgggaacaacttcatcaccaagtttggacagagtgcgctcacggatgctagagatcatgttcttgagatgactgaaaaggaagtagaaattttcttctaggagagacattgaagtgaagaagactttgtcactctgtaattttgcaccattagttgttgtttcattatttatgacgttgaaatgattcaagcgagagataaaacatttgttgttccttacggtgagatttaattttaattcaaggaagttttcatgaaaaaaaaaaaaaaaaaaaaaaagaaaaaaaatgaaaaaaaaaaaaaaaaaaaactcgaggggggggcccggttttttttattgggccccaaaatggatatcccatgactccccaatggttttgagggggcgccctggcttttaattggagggctcccgctctatattttaagcggttccgtcacccatcttcgggggccccacacacaacttatttaagggcccctgttattttttatggggcccgcgctttttggaaataatccttaacgcagcctggccaaaaagga

SEQ ID NO: 1111 - DNA, 1555 bp, Arabidopsis thaliana
  Clone ID: ARATH-23APR03-CLUSTER6498_1
actgcttctctttcatcaaaagttctttaaggaaaaaaaaaaacgtcaatggcgtcgtcgtcgttgtgtcatcgctattttaacaaaatcactgtcactcccttttttaacactaaaaaactccatcactcttcttcgagacgaatctctcttcgtgtaaatcgaagatccttctctatctctgcaaccatgtcttcatctactaagaaggttttgattcccgttgctcatggtacggagccgtttgaagcggtggttatgatcgatgtgctacggcgaggcggagcggatgttacggtggcttccgttgagaatcaggtcggcgttgatgcttgccatggaatcaaaatggtcgctgatactcttctctctgatatcaccgactcggttttcgaccttattatgctccctggaggacttcctggtggtgagactcttaagaattgtaaacctttagagaggatggtgaagaagcaagacactgatggacgacttaacgctgctatctgttgtgcgccggcgttggcgtttggtacttggggactactagagggtaaaaaagctacatgttacccggtttttatggagaaactagcggcttgtgcgacagctgttgagtcaagagtggaaattgatgggaagatagtgaccagtagagggcctggaactaccatggaattctctgtcacgcttgtggagcaacttcttgggaaagagaaagctgttgaagtctctggccccttggtgatgcgtcccaaccctggtgatgagtatactattactgagcttaaccaagtcagctggtcattcgagggtaccccacagattcttgtacccattgcagatggctcggaggaaatggaagctgttgctatcattgatgtcctgaagcgggcaaaagcaaatgttgtcgtagctgcgcttggtaacagtttggaagtggtagcatctcggaaagtcaagctggtggcagatgtgcttctcgacgaggctgaaaagaattcgtacgatctgattgtgttgcctggtggtctcggcggtgctgaagcatttgcaagttcggagaagctagtgaatatgttaaagaagcaggcggaatcaaacaaaccatatggagcaatttgtgcctctcctgctctggtgtttgagccacatggtttactcaagggtaagaaggcaacagcgtttccagcaatgtgcagcaaactgacggaccagagtcacatcgagcatcgagtcttggtggacggcaatctcataacgagcaggggtccaggaacctcattggagtttgcacttgcaattgtagagaagttttacgggcgcgagaaaggacttcagctctcaaaggcaacacttgtgtaaactcatgagtatcttaggtaagagtgactttaataagaaaaaggctttagtatcaaacgatcaatgagtgtaccgttgttgtggtgagctttgtactaagtgtgatgcttaaaactgtcttataaataaacgagtttactctgtttttatcagaaagtttttttgttaaaaagtaaaaaaaaaaaaaaaa

SEQ ID NO: 1112 - DNA, 1427 bp, Arabidopsis thaliana
  Clone ID: ARATH-23APR03-CLUSTER6520_1
cgccattgctaaaacatgaaagctctatcatcttcttctccaatattaggtgctagccagccggcgacggcgactgcgcctaccgcgcgatctggtcgttctgaatggctgagctcctgtgatattgtaacaagcaatgttatttctcatgtataatctcaattcttacctgtgcctccaggttccggcggagttgtgcctctcaacgaccataactcctccgccgcccgccttccctgattgaggcctgaagctagtgtcccagttggttaccacccgcggttggcctaaatccgtgctaatcacccctagcgcctaccgatgacgggtctctcgccggctccgatgcacggatctaatctacgcgtcgcttatcaaggtgttcccggtgcttactcagaaccagccgctggcaaagcgggattacccgctgagtttaagcatatcaataagcggaggaaaagaaactaacaaggattcccttagtaacggcgagcgaaccgggaagagcccagcttgaaaatcggacgtcttcggcgttcgaattgtagtctggagaagcgtcctcagcgacggaccgggcctaagttccctggaaaggggcgccagagagggtgagagccccgtcgtgcccggaccctgtcgcaccacgaggcgctgtctacgagtcgggttgtttgggaatgcagccccaatcgggcggtaaattccgtccaaggctaaatacgggcgagagaccgatagcgaacaagtaccgcgaggtaaagatgaaaaggactttgaaaagagagtcaaagagtgcttgaaattgtcgggagggaagcggatgggggccgggggagcgtactggtcggacgcggaacggagcaatcgcgtgagccaatcaattctagaactagatagacgcttcaagactagcattgtttttgcgcacgataaaggaaccagcgtgcttttcaaggtgctctctgctttcgccttcagagacattagcttgacgaagatcgaatcgaggccgaatcacaaccgtccgatcagggtcgtggatgatgccaatgtcgggacggcgaagcattttgagtacatgttttatgttgacttcgaggcctcgatggcggaggcgcgtgctcagaacgcgcttgccgaggttcaggagtttacatcgttcttgcgggtgcttgggagttatcccatggatatgactccttggtcaccaacatcatcaacttcatcgtaaccatactatagtctatacacacatgaaaatgtaaattttggagaagataacaaagttttatatttactgatccaaaaaaattaaaaaaattcttttgattcaagtcgtacaccgctagtttcaggtgctttgattctatttcactatactttccaatttctctttctatagtttcacacgcattattggc

SEQ ID NO: 1113 - DNA, 1959 bp, Arabidopsis thaliana
  Clone ID: ARATH-23APR03-CLUSTER6532_1
agagtattcaaaaggctgatgaaatttaagttagggtatctcttaatacggttcagagcttaagccggccactacagcgaccgacttctctcgccgtcgattaccggatcgtctccgttattgcgtgcttcatttaggtgtatcaagtaagcaatgagttcttcaccgtcgttggagattttagttagagaagctgaaggcttcactgtgtggaatggtcctccatttactaatggccagcccactctcaagcttgaacgagtttcatgctctaacacgaagttcagtgttgatggatcgaagttaatggcgatgaaatctgatggagttattagtatctatgatgccaccagcttgacagaagtgcggtcattcactatagcaaatgttacagctgctgagctatctccatgtgggacttatcttcagacttttcaaaaacccactactccccaagagaagaatgtctccatttggaatactgagacaggggatctagcacacagtcattaccaaaaatccattactaaagcctcatggccatcaattcgcttctgtcctgatgaatcttctgcgtgccggttagctacaaatgaggtccaattctttgacccgaaagatttctcgaaaggaataacatcccggatcagagttcctgggattgctgcatttgagctttctaaaacgccagcttcccatgttgctgtgtttgttccagaatcaaaggggagtccaggcagtgtccagatttttggatgtggggaagaattgcagagccagccaagtgctcgacgtagctttttccgatgttcctctgtgcagtttagttggaaccatggttccactggactcctagtggttgtacaatcagatgttgacaagaccaaccaaagttactatggggaaacgaagctacactaccttacaatagacggcacacatgagggccttgttccattacgtaaagaaggaccagttcatgatgttcagtggtccttttcgggttcagagtttgctgttgtatatggctttatgcctgcttgtgtgacaatctttgacaagaattgtaaaccattgatggaacttggcgaaggtccttataacactcttcgatggaacccaaaagggagagttttatgtgtggctggattcggtaacttgcctggtgatatggccttctgggatgttgtaaataagaagcagctaggaagtaataaagccgagtggtctgtgacaagtgaatggtctccagacgggcgttatttcttgactgcctcaacagcaccaagacgtcaaattgacaatgggatgaaaatcttcaactacgacggaaagcgttattataagaagatgtttgagaggctgtatcaggctgaatggaaaccagagtctccagagaggttcggtgacatcagtgaacttatcaagtcagttgaatcattgaaactcggcgagggcaaatcgcaaggacaaggatcagctcagaagaaaactattgcccccaatcctattgcacagaaaccggccgcatatcgacctccgcatgctaagcatgcagctgctgttcaagccgagttacttggaataagcacaacaggagagatgagcaagaacgctcttaaaaacaagaagaagagggagatccggaaagcggctgcggctgcggctgctgcttctggatctaacaacgcctgattgaagaaatcacactccgatatcaaattcaatggagatcacagttttgaaattcatttgatggtaataaagattctatagaagacagaaaacattatgtaaacagttgttttttttttgtcaaacatttttgttgtcagttacccgccaaaatcatttgaagcctaagaagaaagaagccgaaattttaccagacaaaaaaaaaaaaaaaaaaactcttgcaatgcgaccggggggcttttttatggtgatacctgttttcat

SEQ ID NO: 1114 - DNA, 2019 bp, Arabidopsis thaliana
  Clone ID: ARATH-23APR03-CLUSTER6554_1
aaaccttcttccttaaggttcttctcttcttcttatcgattgtccagtggatttacccaacacaattgaccagtacatataacacagtgagaaaacagagcaaaaacagagagatattacgatgtttttctctaaggatcttccttcacctacttcggttttcacagcttacgcatcaatggcgggttacatgatgatgataagatcaatggctcacgagctaatcccagctcccctccaagatttcatctacaggactctccggtctctcttcttccgttcttcttcctccactttgacgctaaccatcgatgacgacaacatgggtatgaacaacgagatctaccgagctgctcagacttatctctccaccaagatcagtcctgatgcagtcaggctcagaataagtaaaggccataaggataaacatgtcaacttgtatctcagcgacggagaaatcgtcaactgatgtgtacgaagatgtgcagctagtatggaggtttgttactgacggtggagacaagaaaggaggcggcggaggagtaggaggaagaggaggaggaggaggaagaagaggtggtatggacgatgacggtaaaagcgagtacttcgagctgagtttcgacaagaaacataaagatttgatattgaactcttatgtgccttacatcgagagtaaagctaaagagataagagacgagagaagaatcttgatgctgcattctctcaacagtcttagatgggaatcagttattcttgaacacccttcgacctttgagacaatggctatggaagatgatctcaaacgtgacgtcatcgaggatcttgatcggttcataagaaggaaagagttttacaagagagtagggaaagcttggaagaggggttacttgttgtacggtccaccgggtacggggaagtctagtcttgttgcagccatggctaattacctcaagtttgatgtttatgatcttcagcttgcgagtgtgatgcgtgactctgatctaaggaggctcttactagctacacgtaaccggtcgattcttgtcatagaagatatcgattgtgcagtggatttacccaacagaattgagcagcctgttgaaggcaagaaccgtggcgagtctcaggttagatttctactatgattggttttggtttaggattggccaattgaaccaaatttaccaaatcgaaccaaaccaaaatccgtatcaaccaaattttaatttagtgtaacaagactgactctgattagtatagagaattttagtatatttaaaattgtatttttttttgttttctatgaaaatgtgtgtttagggaccattgacgttatcggggctgctgaatttcatagacggactatggtcaagctgtggagacgagcggattataatattcacaacaaaccataaagataggcttgacccggcattgcttagaccaggacgtatggatatgcacatttacatgggacattgctcttttcaaggattcaagactttagcttctaactacttgggtttgagtgatgctgcgatgccacaccgtctatttccggagattgagcgtttgattgacggggaagtaatgacgccggcacaagtagcagaggagctgatgaagagtgaggatgctgacgtggcgctagagggtttggtgaatgttttagagaaaatgaggctaaaatctaaggaatcgaatccggtgatgatgaagcagaaagagagtagactggagatggaggagatgagactaaagagtgatactgagggttctccgaggaagaacagcaaaagatttaagaagcttgtattgttttggacataatccattaattagttcaaataagattatgaggaagcaaacaaaaatagacgtataagaggctaattacaactctttaagtgttttttaaaagaaatttcttgtatgtttattttctagggttgtgaaccattgtaagacccattaagagatatggaactttatttttccttaaaaaaaaaaaaaaaa

SEQ ID NO: 1115 - DNA, 1319 bp, Arabidopsis thaliana
  unsure (1)..(1319): unsure at all n locations
  Clone ID: ARATH-23APR03-CLUSTER66004_1
agnagaagaaaatgaaggtaaggcaggtctttgatacaagaaatcttcttatactctatacacatctttgagtaaatgatggacaatacatgaagtactactagacacaatacaattcactggcggtgaaaatcaatcaaattacaccaatattctcgatttgggtttctgtaaaagaatcaactatataaaactcaatatagaggcaccttcgtgttcagagaccagctgaaaccaaaccatgcaatgttacaattccaatcaatgtgttgtcttcattgaccactggtagaaactgtacaggcgatggcggtgattccatcttcttcatagcttcaactgccattgtttccggtccaattgtcctcggcttcctgttgcacatttctccaacactgagtttgaatattgcttctccactagccttgagagtccgacgaagatctccatctgtgaatgtaccgatcaaacgagaatgttcatcaaccacaagcaaacaaccacatcctttgctggttagctccactaattgatccattatcaagtctccttctttacacacaggaagctcttcttgctttttcataacatctttcaccttgaagattaagctcttgccgattctaccggcgggatgattagctgcatactcttccttggagagatttctagccgccatgagagcaacggcaatggtatcaccaaacaccatctgaatcgccgtagaagtcaccggagcgagattaaacggacacaattctctctgaagaggtaaatgcacattcatatcacaaacaccagcgagtggattcccagaaacagaggtaagagacaccagaaaggctcctttagctctagcgcaagggacaagacggagaagctcctcggtggcgccagatttgctgaagaaaacgagaacatcgcgtggcgaaagagcgccaatgtcaccatgaagcgcatcgagaggggagaggaaagaggaacggaagcttaaggaaacgagcgtctgtgaaaccttgttagctacgaaagcggatttaccgacgccggtgaagaaaacggtaccggtggtggaaaggagaatgcgtgagaaatctagggtttgagagagatcgagatgtttgaagaagtgattgagaagatcttgctgggatttgaagaggttgaggagattatcatgagagatctcttggtggctggatccgccatttttgagggaattgtgatcgattgatgagaaatctagcgatggcggtggaagagatcccatttttggatctctgaaagctttgatttgtgattgctttgtgctgagagag

SEQ ID NO: 1116 - DNA, 4340 bp, Arabidopsis thaliana
  unsure (1)..(4340): unsure at all n locations
  Clone ID: ARATH-23APR03-CLUSTER6600_1
tttctggncccctgcaggtccggtccggaaccccggactttctttttggctattcttctctctgtcatcgctgtctctgacttcattgtcttcctccttcttcctttttgcttttccgtcgtttttctccgccggatttttctctctccaccaccactacctacctcctcctttgtctcgctggaaattgtttccgagctcaaaattaagttcctgaagatcgggttctagtccttttccatctcggagaagcgtctttagatctgggcaagcactgccatcttcaaattttttaccttttttctccttctctatctctcttcaccaactggggtttggttacgggttaaattgatggtttccgaggcggctagaacctcgtgggctcttgtttgtagatgatgaacggtccttcgtgtaaggatcgaagagggtggttctcttctgctctgtttttcacatggaatggcagatcttgtgacctatagtaatgccgaccacaaccttgaacaggcattgattacattgaagaagggtactcaacttttgaaatatggtcgcaaagggaagcccaagttttatcctttcagactgtctagtgatgaaaaatctttgatctggatatcaagtagtggtgaaaagcgactgaagttagcatctgtatctaaaattgtacctgggcagagaactgctgttttccagcgttatcttcgcccagagaaagattacttatccttttctctcttatacaacggaaaaaagaagtctcttgacttgatttgtaaggacaaggttgaggctgagatttggattggaggcctgaaaacattaatatccactgggcaaggcgggcgctcaaaaatcaatggctggagtggcggaggcctttcagttgatgccagcagagaattgacatcaagcagtccaagtagcagttctgccagtgcttcacggggtcacagctctcctgggactccctttaacatcgatccaattacttctcctaagagtgctgagcctgaggttcctccaactgattcagagaaatcacatgttgctttggacaacaaaaatatgcaaacaaaggtatctggttcagatggttttcgagttagtgtctctagtgcccaaagtagttctagtcatggttctgcagcagatgactcagatgctctaggtgatgtttacatctggggtgaggttatatgtgacaatgttgttaaggttgggattgataagaatgcaagttatctgactacaagaacggatgtccttgtgccaaagccattggagtcgaatattgtcttggatgttcatcaaattgcatgtggtgtcaggcatgctgcatttgtgacaaggcaaggtgaaatttttacttggggtgaagaatctggaggaagactgggtcatggtattgggaaagatgtttttcatccccgtcttgttgaatctctcacagctacttcatctgttgactttgttgcttgtggagaattccacacttgtgctgttacactggctggagagctctatacctggggtgacggcacacataatgttgggcttcttgggcatggctctgatatcagtcactggataccaaagagaattgccggttctctcgaggggcttcatgtggcttcagtaagttgtggaccctggcacaccgctttgataacatcatatgggaggctttttacatttggagatggaacatttggtgtcttagggcacggggacaaggaaacagttcagtatccaagagaagttgaatctctatcaggattgagaacgattgcggtttcatgtggggtttggcacactgctgctgttgttgagatcattgtcacacagtcaaactcaagttctgtatcatctggaaaattgttcacatggggcgatggagacaaaaaccgtctcggacatggtgacaaggatcctcggcttaaaccaacgtgtgtgcctgcattaattgattacaactttcacaaaattgcatgtggacacagtttgacagttggtttgaccacgtctggacaagtgttcacaatggggagtacagtttatggtcaacttgggaatttacagactgacggaaaattaccgtgtttggtggaagacaagcttgcaagtgaatttgtcgaggagatctcctgcggggcatatcacgtggcagccttaacatctagaaatgaagtttacacatggggtaaaggagccaatgggagattagggcatggtgatctggaggatcgaaaagtacctactattgtggaagctttgaaggatagacacgtaaaatacattgcttgcggatcgaattacactgcagccatatgtcttcacaaatgggtgtctggtgctgagcagtctcagtgttcaacctgtagactggcttttgggtttacacggaaaagacataactgttacaattgtggacttgtgcactgtcattcatgcagttcaaaaaaagcattccgagctgcactagccccaagcgcgggaagactatatcgtgtctgcgattcttgttatgttaagctcagcaaagtgtctgagataaacgatactaacagaaggaacagtgctgtgcctcgtctttcaggggagaatagagacagattagataaatctgaaataagattagctaaatttggtacatccaatatggacctaattaagcaattggatagcaaagcggccaaacaaggaaagaaaactgacactttttcactcggtcgcaactctcagctgccttctttgttgcagctgaaagatgctgtgcagtctaatataggcgatatgcgaagagctactccaaagttagctcaggctccatcaggcattagctctcggtcagtgtcacctttctctaggagatctagtcctcctcgctctgccactcctatgccttcaacttctgggctctatttcccggtgggtatagcagataatatgaaaaaaaccaatgaaattctgaaccaggagatcgttaagttacgaacacaggttgacagtctaactcaaaaatgtgaattccaagaagtagagcttcagaactctgtaaagaagactcaggaagccttagcattagcagaggaggaatctgccaaatcaagagccgcgaaagaggcaatcaagtcgctcatagcgcagctcaaagatgtcgctgagaagttacctccaggtgagagtgtaaaactcgcgtgccttcaaaacggattagaccagaatggtttccatttccctgaagaaaatggtttccatccttcaaggtcggaatcgatgacttcatctatatcttcagttgcaccttttgactttgcctttgcaaatgcatcttggtctaatctccaatcaccaaagcaaacgcctagagccagcgaaagaaacagcaatgcttatccagcggacccacggcttagcagcagcgggtcagtaatcagtgagagaatcgagcctttccagttccagaacaacagcgacaatggttcgagtcaaacaggagttaacaatactaatcaggtagaagcagagtggatcgaacagtacgagccaggcgtgtatataacccttgttgccctccacgatggaactagagatttacgaagagtccgcttcagccgaagaagattcggggaacatcaagctgagacatggtggtcggagaatcgggaaaaagtgtacgaaaaatataatgtaagagtatcggaaaaatcaacggcttctcaaacgcatagagacagagatgaagaagaagaagacattcctcactagtagtcagtctcctaataacatttgtatgattttgccccataatttcctgtgtctctctgttttgccccaaaactgttcattgttctacttaagtcctttttttttttctctatctcgattcaatctgtgggagattaattttcatgtcctctacatgtatgttgtatatatatatgaagaccatcggttctaagattactttaggaagaaaaagaaaaacttaagtattgaatttgcctaaaaaaaaaaaaaaaaaaaaaaaaaaaaaaaaaaaaaaaaaaaaaaaaaaaaaaaaaaaaaaaaaaaaaaaaaaaaaaaaaaaaaaaaaaaaaaaaaaccctggggggggggccgggaccccattccccccaaaggggggcggaataaaatttccggggcggcgttttaaaaaggcggggaggggaaaaaccggggggtaccccaattaatccgcttggaagaaattccccttttccccggtgggggaaaaaggaaaaaggcccgcccggatgccctttccaaaagtggcccacccggaagggaaaagggaaatttgaaagggt

SEQ ID NO: 1117 - DNA, 2248 bp, Arabidopsis thaliana
  Clone ID: ARATH-23APR03-CLUSTER6623_1
tcttcaatgtagttatcgtcggaggaagaacattcggcggcggttgctctcaaacccaaacaagcccaccaatctcttcttctctgctcttctctctctgtagacactagaagaagaacaaaaatgctcaaacagtttcttcttctccaatccttctccttcttcctcttcaatgtagttatcgtcggaggaagaacattcggcggcggtttctcagcggaggagaatccatttactccaaaagcatctctagttcgttactggaacaaagagattcgtggccaatctcccagatcggagtttttaatctcaaaagcttcaccactcaacgccgtagactcagcaactttctcaaaactcgccgccgcgaactcgctgccgactcgttttcccgatttctgctccgccgcgaatctcttctgttttcctgatttaggagcgagtctcgagaaacacgacgacgacgttaaattctccgtttatgaccagaagaacttcactaactacggcaatgctcgtgccggaggagcagattcgttcaaaaactactcgaaagacggtaatgtcgtaaccgattcgttccggagatacagccgtaacgcggcgggtcacgacgataaattcactgtctacggtgaaaacagtaacgtggtagaggaaggattcaattcatacggaacattcggaaccggcggcgccggagatttcactaactaccaaaacaacgtgaacaatccaacgagtcgattcacggcgtattccgacggaggtaacggtcgatctcaaacattcaaaacctacacacacgaagctaacgccggtaacggtcaatcattcacaagctacggcaaaaacggaaacggagttcctaacgagttcacttcttacggcgtctcctccaatgtaatcggctccggtttctctaactacggcgagagtggaaacgcggcgaacgataccttcacaagctacggaagcgacggtaatgtacctcagaacaattttaataactacggtgcttccggtaacgccgccgtggataccttcgcgaattacagagacaaggccaacgtcggagacgattcgttctcatcctatgcgaaagattcgaattcggagaaggttaatttcgtaaattacggtcaatctttcaatcccggttcagaaactttcaccggttatggcaaaggagctgaaggaagcaaactcagcttcaaaacctatacaccaaactctactttcaaggactacgccaaaaagggcgtcgcttttgctaaatacaacgtttcaacaaccaccgcgaacaccgtcggcgatggcaaaaccgtaaataaatggatcgaaccgggtaaattctttagagaatcgtcgcttaaagaaggtacagtgattcctatgcctgatattaaagataaaatgcctaaaaggtcgtttttaccccggagtataattacgaaactacccttctctacttctaaactcggtgagattaagagaatcttccacgccgttgagaattcgacgatgggaggtataatcaccgacgcagtgacggagtgcgagaggccaccgagcgtcggagagacgaaacggtgcgtaggatcagcggaggatatgatcgatttcgcgacgtcggtgttaggtcgtagcgtggtgcttagaacaacggagaacgtagccgggtcaaaggaaaaggtagtgatcgggaaagtcaacggaatcaacggtgggaaattaacgaaagctgtgtcgtgtcatcagagtttgtacccgtatctattgtattactgccactccgtaccaaaggttcgggtatacgaagctgatcttctagagttgaatagtaagaagaagattaaccacgggattgccatctgtcacatggacacgtcatcatggggtccgagtcatggagctttcttagctctcgggtcaaaaccgggtcggatcgaagtttgtcactggatatttgagaacgacatgaactgggctatcgctgattagaccggtggttatggacttatcaaatagtatgattattactatcttatcgccgagttttaattacatagaggaatgttaattttctattatcattactataatattttgaagttttttcagtaacatgtaaagaatgcttgttactgatttgtggtggtgcaaaataatttttatgaagattttagtgaaaaaaatgttgagcgttgacgcaatttatgatatctggttggattggtcgatattt

SEQ ID NO: 1118 - DNA, 701 bp, Arabidopsis thaliana
  Clone ID: ARATH-23APR03-CLUSTER6652_1
aactcgaacaagaaacagtaagagaacttataaatagagaaggctatatggggaattgtgcactaaagccaaaagttctgtcagaaaccggagctccggcgccggaggagctcaaggattcacttcttgaataccataagatggacgctgcaaaatctcttagcaacttgttccttcaagacaaggcagataagataacgaaagaagacgagaagatcacaccggaaaagataccggttactgatgatctgaaaacagctttggaggaggaaaatactccgaccaaagaggcaaaatctccggcaacagagacaaagtattcggtaacagagaaaagagctccggctgacaagaagataacaccggaaatgatgccggttactgaagatctgaaaacagttttggaggaggaggcaaaacctcctgcaacagagacaaaagctatggttgatgatcagaaggtgaagaacgaagtggccgttcgtgaagagaaaatcattgacctcgtgactgtgaaagagaacgaaacagaggcgaaaacagagtaggtgggaaaagaataaacacagtgaaacagccttgaaacgctagtttctgcgttcttgatagcaaaatgcttgtttttgtttagattatatttttcctcgatagataaacgcaaacgctgtattctttatatgaattgaaaacttcaaatttcc

SEQ ID NO: 1119 - DNA, 1490 bp, Arabidopsis thaliana
  Clone ID: ARATH-23APR03-CLUSTER6672_1
gaaaccaccaattctctcatccgtaccaaagaacaaaaaaaagataaaatggcggttcatattcacaaccctaactttttccacactcatcatctccgagcatctcttacttctgcctctgcatcaccttcctcatatctctttcatagacactctgcttcaaagtatcctagcttcctctgcaaatccaataacaaagatgactatctcattgatgctcctgtttctgttggagatggattctcttttagtggagggaagtattcggatcaaccgagtccatcagatgagtggttgaagcaagggaaatgggttaaagctcatagagttggcggctctggtgtagaagcaaaagatccgattttcggattaacaatgggagctagctctcaagcttcaaaagatcttttccgatggtttagtgtagaatccgggagtgtagatagtcctcctgttatactcatccatggattcccatctcaggcttattcttaccggaaaactattcccgttctttcaaagaactaccgcgccattgctttcgattggctaggatttggattttctgacaagcctcaggctggatatggattcaactatacaatggacgagtttgtttcttcgctggagtcattcattgacgaagtaactactagtaaggtgtcacttgtggtgcagggctacttctcagctgctgttgtaaaatatgcaagaaaccgaccagacaagatcaagaatctcatactcttgaatcctcctctcacaccagaacatgctaaacttccatcaacattgtctgtattcagcaactttttgcttggggaaattttctctcaggatcctctaagagcaagtgacaagcctttaacaagctgtggtccttacaaaatgaaagaagacgatgcaatggtttatcgaagaccttatcttacctcaggttcttctggttttgcacttaatgccataagcaggtccatgaagaaagaacttaagaaatatgcagaagagatgaggacatcactaatggataaaaactggaaaatcccgatcaccgtgtgctggggacaacgagataggtggttaagctatgaaggagttgaagagttctgcaagagttcgggacacaacctcgtcgaattaccaaatgctggccatcatgtacaagaagattgtggagaggaacttggaggaataatctcaagaatcataagcaaatctgctctattctaactggaaccactccacaagaatattgaaagaacgtaaagaaccatttgtataaactcagctttattcaaaacatactctagttccagtggtacattacatataagtcaccagtaagatttttgtgcttaactttgaggctctataaagtaggagattctccagttctctagtacaaatttgtaacatcctaaaaagaatgtagcttgatctacatgtataccttctcttttgcttccttgaggtatgcatgtgctttctat

SEQ ID NO: 1120 - DNA, 1404 bp, Arabidopsis thaliana
  unsure (1)..(1404): unsure at all n locations
  Clone ID: ARATH-23APR03-CLUSTER6673_1
tnccncgaggagagagagagagagagagagagananannanngtaaatgcttttggggagccccccccgtcacatgacatcttacttctctcttccttttgctttcgcatcttcttcttcgtcaacgaatcctcggactctccggcgatgccccgtcgattaaacgacggcgagcctggccgttttaccgccaccgttcttcttttaatcggtttaatctcttgtgttatcgtctacgctgttttctcttctgtcctccgtccatcccaagatcctacactcgttgattccgcggttcgattcaaagaggagccgcgagatcacgatgcaactgaagacggtgaaggtgggtgttgccgtggaattgataatctggagctttggggtccggcggtgaagtggggcacggattttaagtttaattcgtctgatggatgttgtaaagcttgtaaagttatgtgtagtggcaacgatggaccttgcttgtgcgattcatgggtgttttgtgggaacaaagaggattgtggctcgaagtttggagagtgttggttgaagaagcaaaaagatgtcttggtgcctgatcgacaaggaggtggcgagaaagtaatgtggacatctggacttatcttcggacaaggccagggcattgttggttttgagacggaacacggcgtaattcatgtcaaacttcaccctgaatgcgctcctcactcagtatactacattctgagtttgttaactctacgccattgtgcaggctgccagtttcatcgagcagagaaccggggatcatattgggactcagaaggcaatcatgtaaagaatgctccctttggtccaccatacgctatgattcaaggaatactccaggccgagggaaacattttcacaccgatcccaaccgagcactgcccaactataagccgtggctcggtggcgtgggtcggctcgggtccagaattcttcatcagtttagcaaaccaccacgaatggaaacaatcttacacggtattcggcttagttctaccagaagacatggatgtcgtggagacaattgccggtttaccaacaagagccgatgtctggaacagcgtcaatgtctctgtgctggagaaaccggtttccttaaccgtacggagaatgaagacgggccaagaacaagaagaaaccggttcatgaagaacatagaaatgagttcagaatagttattgtttcttttttggaattttacaatttctctttgttcatagatagaaaactgaaattttcttggtcttctggccatttcaatgaaaaattattggttaccacatctcaaaaaaaaaaaaaacctcgggggggggccccgtacccaatcccccccttgtggggcgccttacaatcactggcccgtcgtttacaagn

SEQ ID NO: 1121 - DNA, 2327 bp, Arabidopsis thaliana
  unsure (1)..(2327): unsure at all n locations
  Clone ID: ARATH-23APR03-CLUSTER6674_1
gactataaacgttccttttgcttccccgattcttcgaaacacttattgatatcttcagacacaacaaattaattacagagacagttacagaggaaaaagatctatgacggaaactggtgatgatcttgctacggtgaagaagccaatcccatttctcgttatcttcaaagatttaagacatgtattcagtagggacacaactgggcgagagattctaggcatcgcgtttccagcagctttggctttagctgctgatccaatcgcttctctgattgataccgcttttgtcgggcgtttaggagcggttcagctagcggcggttggagtttccattgccatattcaatcaagcttctagaattacgatattcccacttgtgagcctcacaacttcatttgtggcagaggaagacacgatggagaagatgaaagaagaagcaaacaaagccaatcttgttcatgcagaaactatacttgttcaagattctttggaaaagggcatttcttcacctacaagtaacgataccaaccagccacagcaacctccagctccggatacaaagtcaaatagcggaaacaaatcgaataaaaaggagaagaggaccattagaacagcatcaacagctatgatcttggggttaatccttggccttgtgcaagctattttcttgattttcagttcaaagttgcttctaggcgtcatgggagtgaaaccaaattcaccaatgttatcaccagcacacaagtacttgagcatacgagctttgggggctcctgcattgcttctatctcttgctatgcaaggcatctttcgtggattcaaggacaccaaaactcctctctttgccactgtcgtagcagatgttatcaacatagttctcgaccccatcttcatttttgtgcttcgtctagggatcatcggtgcagccattgcccatgtcatttctcagtacttcatgactctaatattgttcgtcttcctcgcaaagaaagttaatttgattccaccaaacttcggggatttgcagtttggaaggttccttaaaaatgggctactattgctggcgaggaccatagcagtgacgttttgtcagaccttagcagcagcaatggcggcgcggctgggtacaacaccaatggctgcttttcagatttgtttacaagtatggttaacttcttctcttctcaatgatggtcttgccgttgctggtcaggcgattctggcttgttcgtttgctgagaaggactataacaaagtgactgctgttgcatcccgtgttctacagatgggttttgtgttaggacttggactgtccgtttttgttggactaggtctctactttggtgccggagttttctccaaggaccctgctgttattcacctcatggccatcggaataccgtttatagcagcaacgcagccaataaactctctcgcctttgtattggatggagtcaattttggagcatctgattttgcttacactgcatactccatggtgggagtggcggccataagcattgcagcagtaatatatatggcaaagaccaatggtttcataggaatatggatagctcttacaatctatatggctctccgggctattactggaattgccaggatggcgacaggaactggaccgtggaggttcttgcgtggacgatcatcctcttcatcttcctaggacttagtttatttataacgagttgcatctcttcttccttcttcgtttttgtttatggttcttgtgtttgtttttcaacattttgttcgagagaccgttatcatattatcagtttcacataaataatgcatatttttaagtcattaaaatatggagccctctgccctcactggcttttctacccaaatagaatattctgtatgagtatgtttcagctagactagatggttcaaagatatccggtgtccaagtgtcgatttggtgttggttaaaaaaaatgtaagaaaaaaaagctggatcttatccttttactaaataaaatctgaccatagttatttccttagttaagagccaaaattaggctcagattttaattaattgaaccattagatttgttcttactcaatttctatgtattttaataagtttcacttctaaaagtgttttctaaagttttacaactacttcaaatcttaagactgtttttaatgaattcaaaatttacactttaattcaaattttcaacttgtgattaacanataattatactttatcggtattaatttccttgcactttttggaatgtcctagattatacttcttggtaattcgttaactcanaacatttcatattacaataata

SEQ ID NO: 1122 - DNA, 1068 bp, Arabidopsis thaliana
  unsure (1)..(1068): unsure at all n locations
  Clone ID: ARATH-23APR03-CLUSTER6687_1
ncagggaaaaagaaaagaaaagtagagtactatcttcctcttaaaatgttgcgtactatcttcctcttatctcttctctttgctctctcacatgcctttgttccagcgagaagcccacagaagggtacggctgcgagaagacgacagaaggggagggaaaaagaaaagaaaagtagagtactatcttcctcttaaaccaaccattcaaaatgttgcgtactatcttcctcttatctcttctctttgctctatccaatgcctctgttcaagatttctgtgtcgcaaacctgaaacgcgctgaaacccctgcgggttacccttgcattcgtcccattcatgtcaaagctacagactttgtcttctctggcttaggcactcctggaaacactacaaacatcatcaacgccgctgtcacacccgctttcgcagctcagttcccgggtctgaacggtctaggcctctctacagctagacttgacttagctcctaaaggtgtgatcccaatgcacactcaccctggtgcctctgaggttctctttgtccttactggctccattaccgctgggtttgtctcctcggcaaacgctgtctacgtgcagacactcaaaccaggacaggtcatggttttcccacagggcttgcttcatttccagatcaacgcgggaaaatcctctgcttcagccgttgtcactttcaacagcgctaatccgggtctgcagattctcgacttcgcactctttgctaacagtcttcccactgaactcgtcgtgggtactactttccttgacgccactacagtcaagaagctaaagggtgttcttggaggaactggctaaaaaaagacttaggactactccttgactaaaacaccaaaacctgtttcttcatctttttttctctttaattgattcttgtcttctctgttttgtgtgccttgtaattcttcaaaacctgtcaaaattgttacattgtatgtgagttttttcaattaagatcctgagttggtcacaaaaaaaaaaaaaaaaaaaaaaaaaaaaaaaaaaaaaaaaaaaaaaaaaaaaaaaaaaa

SEQ ID NO: 1123 - DNA, 1843 bp, Arabidopsis thaliana
  Clone ID: ARATH-23APR03-CLUSTER6711_1
ggctctgccgcttttaaatctctcatcttcttcctcgtgtcactctttctctcacactctgcaaaaacattttcttgtctctcctctgcccaaattttttttctttccaggaatatttcctagaaaaacccaagcaaagctttaaccccttcctcctccaaaagtagcatcttcctctttttctatttctcctttcctcttcttatctctctctcgtttgtgaacgattccttaagaatataaccaaaagcccttttctcctttcttcaactttccgggaaaaatcttcacgcagcaaggtttctctctcggctctcgcagtgtttttcgtgccttttgttctttctataaaaaaaaaattcgcgtcctttaagaaaactttttccacctagagaagaagaagagtatcactcttgttgttcaagtttctctctttaataaaaaatccatctttattctttgtcttctttcctttttgctttccctaatctctatgttataaacacacagagagaaacaaagtcacagtctcgagtcaaaaacagagaatacgaaagaaaaatggaagcggagaagaaaatggttctaccgagaatcaaattcacagagcacaaaaccaacacgacaacaatcgtatcggagttaaccaacactcaccaaaccaggattcttcgtatctcagtcactgacccagacgctactgattcctccagtgacgacgaagaagaagaacatcaacgctttgtctctaaacgccgtcgtgttaagaagtttgtcaacgaagtctatctcgattccggtgctgttgttactggtagttgtggtcaaatggagtcgaagaagagacaaaagagagcggttaaatcggagtctactgtttctccggttgtttcagcgacgacgactacgacgggagagaagaagttccgaggagtgagacagcgtccatggggaaaatgggcggcggagataagagatccgttgaaacgtgtacggctctggttaggtacttacaacacggcggaagaagctgctatggtttacgataacgccgctattcagcttcgtggtcccgacgctctgactaatttctcagtcactccgacaacagcgacggagaagaaagccccaccaccgtctccggtgaagaagaagaagaagaaaaacaacaaaagcaaaaaatccgttactgcttcttcctccatcagcagaagcagcagcaacgattgtctctgctctccggtgtctgttctccgatctcctttcgccgtcgacgaattctccggcatttcttcatcaccagtcgcggccgttgtagtcaaggaagagccatccatgacaacggtatctgaaactttctctgatttctcggcgcccttgttctcagatgatgacgtgttcgatttccggagctcagtggttcccgactatctcggcggcgatttatttggggaagatctattcacggcggatatgtgtacggatatgaacttcggattcgatttcggatccggattatccagctggcacatggaggaccattttcaagatatcggggatctattcgggtcggatcctcttttagctgtttaataatattttaaataaataaatagttataccggccgttactaaacggaaccggagaaagttttgtataccggtgacataaaatctcggttatgttcgtaatctttttttctttgttatatataaaaatatgaatgaaactgaattaatgtaagttaatggtgataattattaacgttttaagttttgaaaaataattttcgtctgttaacgataatgggaggtcgagtttctttttgcttcaaaaaaaaag

SEQ ID NO: 1124 - DNA, 901 bp, Arabidopsis thaliana
  Clone ID: ARATH-23APR03-CLUSTER6757_1
gaagcaggaaaattccggaggagcaggaagatgttcaagaacacgtttcaatctgggtttctgtctattttgtacagtctaggaagtaagcctcttcagatatgggataaagaagttgtggatggacatgtgaagcgttgccatgatgatgacattcaatccaatgtgcttgaagtagttggatcaaatattcagtctacatacattacatgtcctgctgatctttccgctactcttggtatcaaacttccttttttggtcttggtggtgaaggatatgaagaaatatttctcattcgagattcagattctggatgacaagaatgttcgccggcgtttccgagcttctaactttcaagctgtcactagagtaaagccgtatatttgcacaatgccactgaagatggacgagggatggaatcaaatccagcttaacttagcggatcttactaggagagcttatgggactaattatgctgagacattgcgagttcagattcatgctaactgccgccttaggcgcatatattttgctgatcgtctctactctgaagaggagcttcctccggaattcaagctgtatctcccagtgcagaaagcatgataagttcattccgaatgctgctgccgttgtcgtggtatacaggaaatctactgtttaagtgttgactaattcagatagagcaagagcgtgatagttttagtgtcgcttgtagcatcccatggaacttggagtttgccataccttgggcatgctttaactttgttgtgttaaactcttcctgtaatgggattatatagtctcttaagattttcaatgaatattgtacatgatcttgggtcaatgcagacaagtaacgtgcaaaaaaaaaaaaaaagggcggccgcccgcgatctagaac

SEQ ID NO: 1125 - DNA, 1520 bp, Arabidopsis thaliana
  Clone ID: ARATH-23APR03-CLUSTER67729_1
ttttttttttttcgttgcatgtaaactatattcattttatgaaaaatagacaaactaatttacatttttatatctattgagtttttactttctatgtccagaagaagccatgagaactgcaacagctgaaatgaacataaacaacatacagaagagaagtagataagttttccgtgacgatcttctgtattctccaaacaaaaccactccccaaaatgtactcacaagtggaagagcctgaacggagtcagcagccgcgtatcctgcggcttgaccgcccataaactgaagaccgtttccaaaaccgcaaagaaaccccgccaaaaaggcccagtaacgaccattccagtcatttaagtaagctttaaaagaagattttggaagaccaagaacaggatagtagaggaatacaacgttgagtatcaatgcaatgataaaacaagaaacagagaagtagaagaatgctgtgtaaacgactagctttggcactccttgtttcaatctgttccattgatcgttagtggctaagttaaatgctggagagaagagggagaaacaaagacctgcgaagaaagtaatcgctagtccgattatctttcgttttccgaacacctttatggctcttgtgttctcaagctctataagaaatcttgctgtcccttctttaggttttgtcgtaacattagtctccaggtcttttgatgagtttgttcctatttcggtagatggacctgaagcttcttgcttagccgtttcaaagtctcttagcttggccttgttatcgtctgcattggatctatgaactgctgaaccaagacaaaccgcgatcaagaaacaggccacaccggggaaaaggatctcggctttgttgatcttatcatccaagaaatagttcaaggttgagcctatgactacagtgatgcttgatgtgatgacttctgtaactgataagcctactaaagcccatgcatattgagttgatagattcccgaggctaagcacgataccgcccgccattgcaaacataacagacggccaattatcttgagcaagctgagtgatgaagtttgggctatcgggttttgtagacccaatttgaccaaaagtgaaagctataataatagcagccaacaagttagtgatggagtaatcaagataggtgtgttgaggaagacggccacgtctctctaaaagtgttaaaactgctggccaagtccctagagatagtaaggctaaaagcatacaagctatggcacctcctttgctctccactagatacatattctcgggctctaaatggatcagccctgcaagcaaaaatgttggtttaggcaaaagatatgcttggagaatttcagaattatctaatccttaaaagcagataaacaatccacataagactagagaagattcttgattgtttctcatgttgatggaagatacatatgtccattaactattcatgacaagagagtttgagatttaaaagataagtagaaccagatcagccgaacgcgtag

SEQ ID NO: 1126 - DNA, 1247 bp, Arabidopsis thaliana
  Clone ID: ARATH-23APR03-CLUSTER678_1
ccccccccccccccccccccacccggggttcctgttttttcccctttggcgcccccccccggccccaagagaaacctcccagctcggtttcactattgaacgtgtaacactggtcgaaagaagacgaacataaactcgtctccatgactacttcatcttcttcgtacggaacattctctacagtcttcaacagttctagacctaattcctcagcaacctttctcgtcccttccttgaaatttggtcgaaagaagacgaacataaactcgtctccggtaaccaaaaatggtttccatgactacttcatcttcttcgtacggaacattctctacagtcgtcaacagttctagacctaattcctcagcaacctttctcgtcccttccttgaaattctccaccggaatatcgaatttcgcgaatctgagtaatgggttttctctaaaatctccaattaatcctgggtttctcttcaagtctcgtcctttcactgtccaagctagagctgctgcagaaaaaaccgttcacgatttcaccgttaaggacattgatgggaaggatgttgctttgaacaaattcaaggggaaagttatgttgattgtcaatgttgcttcaagatgtggtttgacatcatcaaattactcagagctttcacatctgtacgagaaatacaaaactcaaggatttgagattctagcttttccctgcaatcagtttggtttccaagagcccgggtcaaactccgagatcaaacaattcgcttgcacccggtttaaagcagagttccctatatttgataaggttgacgtgaatggaccaagcacagcgccgatctacgagttcttgaaatcaaacgcaggaggattcttgggtggtctcattaaatggaactttgagaagttcttgattgataaaaagggaaaggtcgttgagaggtaccctcccaccacatcccctttccaaatcgagaaagacatccagaagttgcttgccgcttaaaaacttttgctcatgagtgagcatatagagactgatggttaaagtaaccgtaaattgtgacataaagtttccggttattgcttgtataccttcttacattctaagttgtactaatcgcttaataatttgcgtataatggtaatgttatatacattatattataaaaatggtgttatatatacaaaaaaaaaaaaaaaaaaatcgatacctttgaccccgacccggggcccggagcacaagccccccccccc

SEQ ID NO: 1127 - DNA, 1320 bp, Arabidopsis thaliana
  unsure (1)..(1320): unsure at all n locations
  Clone ID: ARATH-23APR03-CLUSTER6813_1
gtattttgttgttcttcgtcatcgacccctgcgattatctctccctctcaaaattccttatctcgtcgattaatttctctcagatcatgttgactgaaactccatttaggccacgagagaagcttctggagaaacagagattgttccagagcatccaaaggcacacttacttgaaaggaccaatggacaagatcacttctgtttattccgtcttgccaaataattgcttagttgcagacaatgtcgaaagctaaagatgtttgatgttataaagttccaatattttggggattttctatttgcatttatgccaagttgaatcctataggttttgttacttccacgttctactaaactttgtagtttgtaagcatccgtcttctattggaaagagaagaagacaccaggcgagcgccttttgtattttgttgttcttcgtcatcgacctacgctgcgattatctctccctctcaaaattccttatctcgtcgattaatttctctcagatcatgttgactgaaactccatttaggccacgagagaagcttctggagaaacagagattgttccagagcatccaaaggcacacttacttgaaaggaccaatggacaagatcacttctgttgctattcctattgccttggctgcaagttctctctacatgattggaacaggaatctacaacatgtcgaatggaatcggcaaaaaggaataagcagcttcttgatttttccttcttttttatatgcttttggtttctcaatgtatcagtcactgcccatatgcagtagcagactaaggttgcactggtctttttcttgaagctgtttattccgtcttgccaaataattgcttagttgcagacaatgtcgaaagctaaagatgtttgatgttataaagttccaatattttggggatttacaaaaaaaaaaaaaaaaaaaggcggcggccgggaaccaatcccggcaaaaaaaaaaaagagcgcggcccaccccccggagcctcccggcgggggcccggggccccccccccccccacccacctgccgtcgcctttgcnncacattcccccttttcgccanctggggtaanagccnaaaaagggcccccncccgacccncccttccccaacanttgccgccnnccctnaatggccgaaagggnaaattgggangccnctannnttnttcttaaaaaattcccgnttaannctntntctcnnaccnaccctnatnnttatnancccntnngcccnancntgngccacncccccctntnncnacnncacaanacactnnnccncnnnnnanggntntnnag

SEQ ID NO: 1128 - DNA, 1567 bp, Arabidopsis thaliana
  Clone ID: ARATH-23APR03-CLUSTER6850_1
ggtggacaatatagtttctgaaactataataggataagaaaaaattaacgagcttagggatatatattaatgtcatatcatgtcataaacatggtcggcaaaacttgggacggcagtttaccagaataatccggtcgacagaattcaacagttcctctctctaaaagatatgaaggagattaattttgtctttgttagccaagatggccggtcctcttctggcaaagccggcttttaccagcggggtggcccggcttttatccttcctccgcttcatcggttcttcttagattgcttagttctcttccgtcttctctcataatttcgtcttaattggagattgacttggccacgatacccacattaagtttcggatgggtcactgagagagagagagtgagagagcccaccttagtgccccccccccccccccccccgggcatatttgaatagttcaaataatatgatcacctctctcttctctccttcatatcttttagagagaggaactgttgaattctgccgaccggattattctggtaaactgccgtcccaagttttgggcttttgcccggcatctttttggctttgttagcaaagatggccggtcctcttctggcaaatccggcttctacaagcggttttggccggcttttatccttcctccgccgttcgatcggttgttcttactgattgctttagtttctttttcagtttttctttcaataatttctaaagatttcaattggagattaattttaggtcataatagcctaagattaagttttcggatttgtatctttagaaagtttgatttgcagaattacctcaagtatgaaaggaagttttgtttccagcatattgggattgcctgtagccgtttctacatgtttatggagcttcgatcgatcaaatttgaggaatactcagatttttctttcctcattacctgtttttgccaaatctcttggttgatgattttggcatgcagatggaattgaattctctgtttgtgtatcctcccttctctgtttagcagtttccggtgagaaaaaaacaaaaatcgatgtttgccctttttcgacgttgattgtgttcaccggatcggagtctttgacggcaaaggatgacaggaacgtttcatcgcttctcttgcaacacgtgtcttgttatacgatcgtgttttgttaaagagatatccttcctttaaagaaatgtaactaagtggacctttgttgggatgtattctgtggatcattaataaacataatctttccagtgaaaaaaaaaaaaaaaaaaaaaaaaaaaaaaaactccgagggggggcccggtacccaattcgccctataggggaggcgaataaaattccccgggccgcgtttttaaaaggccgggaggggaaaaacccgggggttacccaactttatacccccctttcaactcacctcccccccctgccgccggttctaaattctggcccccccggggtcctttcccaccgcgggccacccgagacggcccgccggtggaacttcatcggcccacaccctcgctctccaccacacga

SEQ ID NO: 1129 - DNA, 1785 bp, Arabidopsis thaliana
  Clone ID: ARATH-23APR03-CLUSTER6852_1
ctgcaatttttactctcctccttcacgtcttttcctcttaattttttctaggaaaattctcaaatccatctccgcgatacgaacagagagaagaagacttagaaaaatggctgttcaacctacaagaataggtctagctggacttgctgtgatgggtcagaacctagctctcaacattgcagagaaaggcttcccaatctctgtttacaacagaactacttccaaagttgatgagaccgtcgaacgagccaaaaaggaaggcaatcttcctctttacggcttccatgaccccgagtcttttgtcaagtccattcagaagccacgcgttattatcatgcttgttaaggctggttctcccgttgaccagaccatcaagaccctctctgcttatttggagaaaggtgactgtattgtcgatggtggtaatgaatggtatgagaacactgagaggagagaaaaagccgtggcggagaacggtttcctctaccttggaatgggagtttctggtggtgaagaaggtgctcgtaatggcccatctatgatgcctggaggctcttatgaagcctacaagaatatcgaagacattgttctcaaggttgctgctcaggttagggatagtggtccctgtgtgacttatatcggtaagggcgggtctggaaactttgtcaaaatggtccacaatgggatcgagtacggtgatatgcagctgattgcagaagcttatgacgtcctcaagtctgttggtaaattatcgaatgaggagcttcacagtgtcttctctgactggaacaaaggtgagcttgagagtttcttggtagagatcacagcagatattttcgggatcaaggacgataagggagatgggcatttggttgacaaggtcttggacaaaaccggcatgaaaggcacaggaaagtggaccgtgcagcaagctgctgagctatctgttcctgctcccaccattgaatcctctcttgatgcgaggttccttagcgggcttaaagatgaacgtgtgcaagcagctaaagtcttcaaggcaggtgggtttggagatatcttgaccgatcagaaagttgacaagaaacagctagtcgatgacgtgaggaaggctctttacgcatccaaaatctgcagctacgcacaaggcatgaaccttatccgtgccaagagcatagaaaaggggtggggattgaagctaggtgagttagctagaatctggaaaggaggctgcatcatcagagcaatcttcctagacaggatcaagcaagcttatgacaggaacgcagagctagctaacctcttggtggatccagagtttgcgaaagagataatcgagagacagtccgcgtggagaagagtcgtctgcttagctatcaactcgggtatcagcacaccgggtatgtctgcgagtctagcctactttgattcttacaggagagagagattgccggcaaatctagtccaagcacagagagactactttggtgctcatacatatgaaaggactgatgtggaaggatctttccacaccgagtggttcaagattgcaagacaatctaagatctgagatctctcatcctcttgtattcttcttctccttcaataataagttccacacagtatgtttctttcctcaatgtgtgagataccttggcttatttatgattgtagaactgagtttctcatctttgtgtttctttttcttaaaaagattaaaactgaagtctttggttataattttttacttttggttccaaaaaaaaaaaaaaaaaactcgaggggggg

SEQ ID NO: 1130 - DNA, 2296 bp, Arabidopsis thaliana
  Clone ID: ARATH-23APR03-CLUSTER6856_1
gattgtcacttgcctgcgcaaattagggcttctccttcgcaagactctcttcgccagcttaaatcagtgcaaagtgctgaatataccttaggagctaaatgtcggatgatcctggacagatgttgctcatctatgatgatccttcagatcagcgatccttgtctttagatgatgctagtagtactgaggaatctccagacgataacaatctctctttagaagcagttcacaatgccattccctatctcggacaaattttccttacacatgatactgcttacgagttctatagtacatttgcaaagcgttgcgggttctccatacgccgtcacaggacagaaggaaaagacggagttggcaaaggacttactaggcgctactttgtttgtcaccgtgctggtaacacacctatcaaaactctaagcgaaggaaaaccacagagaaacagaaggtcttctcgatgtggatgtcaagcatacttaaggattagtaaacttactgagttaggttcaacggaatggcgtgttactggttttgctaatcaccacaatcatgagctcttagaaccaaaccaagttcgttttcttcctgcgtacaggtccatatcagatgcagataaaagtcggattttgatgttttccaagacaggaatttcagttcagcagatgatgaggctcttggagcttgagaagtgtgtcgagccaggatttttaccattcaccgaaaaggatgtcaggaatttgcttcagtcattcaagaaactcgatcctgaggatgagaacattgatttcctgaggatgtgccaaagcataaaggagaaagaccctaactttaagttcgagtttactttggatgcaaatgataagttagaaaatattgcctggtcgtatgcttcttccattcagtcatatgaactctttggagatgctgttgttttcgatacaacacatcgcttaagtgctgttgagatgccacttggaatatgggttggagttaataactatggtgtcccttgcttcttcggttgtgtgcttctacgggatgaaaatttgagatcgtggtcatgggcactacaggcattcacagggttcatgaatgggaaggcacctcaaacgatattaacagaccataatatgtgtctcaaagaagccatagctggagagatgccagccactaagcatgcactctgcatatggatggttgttggaaagtttccatcctggtttaatgccggtcttggggagcggtacaacgactggaaagctgaattttatcgcctctaccatctggaatccgttgaggagtttgagttgggttggagagacatggtgaactcttttggactgcacacaaacagacacatcaacaacttgtatgcctcacgttccttgtggtctttaccatacctgagaagccattttctagctggaatgactttgactggccgatccaaagccattaacgcctttattcagaggttcttgagcgcacaaacccggctagctcactttgtagaacaagtggctgttgttgtggattttaaagaccaagctacagaacagcaaacaatgcagcagaatctccaaaacatcagcctaaaaactggcgcccccatggaatctcacgcagcctcggtgctcactccttttgcattctccaagctccaagaacagcttgtgcttgctgctcactacgcatcgttccagatggatgaggggtatctcgtgaggcaccacacaaaactcgatggaggaagaaaagtgtattgggttcctcaagaaggcatcataagctgcagttgccaactgtttgagttctctgggtttctctgcaggcacgcactccgtgttctctccacaggaaactgttttcaggtccctgataggtatcttccacttaggtggcgcaggatcagcacgtcgtttagcaagacgttcagaagtaacgctgaggatcatggagagagagttcagcttctgcagaatctggtttcgactctggtctcagaatcggctaaatcgaaggagaggctagatattgcaactgagcaaacctccatcctcttatcccgtatcagagagcagcctgtctcctcacttgctatcagagacatttcttcttctgtgcagaggaatttttgataccacaaatgctatgcgtgtctaactatttttagataacataattactttattaacctaatcttacaagattgtaactcttatcttaacttatgcattgttaaaaatatcaatcttatattcgttgacaaaaaaaagaaagataagtcaaccct

SEQ ID NO: 1131 - DNA, 1407 bp, Arabidopsis thaliana
  unsure (1)..(1407): unsure at all n locations
  Clone ID: ARATH-23APR03-CLUSTER6859_2
tggttcttctgttctnnccattcatcccataggaaaaagataatgtagttctgctgtcgtccccatttctgatttttggtatcagtttttgtattngtgtatagtaaatctgaaggagtttccaaaagacaaaccaaacatggaagaccgcgtcttgatcaagaacgatgtcactgaattgataggtaacacaccnaatggtgtatctaaataaaattgtggatggttgtgtggctcgtattgctgccaagcttgagatgatggagccttgctctagcatcaaagatagaatcgcatatagtatgatcaaagatgctgaagacaaaggattgattactccgggaaagagtacattgattgaggcaacgggtggtaacaccgggattggtttagccagcatcggggcttcaagaggttataaagtgatccttttgatgccttcaacaatgagtttagaaaggagaatcattctaagagctttaggtgcagaggttcatctcactgacattagcataggcattaaaggacagttggagaaagctaaagagatattaagcaaaactcccggtggttacataccacaccagtttattaatcctgaaaatccagagattcattatagaaccacgggtccggagatttggagagattcagcagggaaagtagatatcttagtcgccagtgttggaactggtggaacggttactggaacagggaagtttcttaaagaaaagaacaaagatattaaggtttgtgtggtggaaccttccgaaattgcggtactcagcggaggaaaaccaggtccacatttgatccaaggaataggctctggtgaaattccagccaatttggacttaagcattgtgtttaaacacaataaagttggaactggaggggggaaaaagtccggtactaagcgggggtcacccaggtccacatttgattcagggaattggctctggtatcgtcccattcaatttgggcttagccattgttgatgtaattattcaagtggcaggtgaagaggcttattagacagccaagcttcttgcccacaaaaaaggaattactggtggggaatatcctctggagccgcagcagggagatgcgttataggtagcaaagcggccagaaagcgcggggaaactcaatgtggtggtttatcctagtggaggagcacgttatttatagactaagctggttcgatttcgattagatattgaagcagagaatttgcctattgaatgtatgttggacgtgtgccggtttcgtgtgtaataagagacgttcgtttcaagagtccgagatttcaatttgattaccccccgtcaatgtgtaatgtatttgcagttgancaggcggttatggataaaattagtagactacatccaaaaaaaaatcccaagg

SEQ ID NO: 1132 - DNA, 1693 bp, Arabidopsis thaliana
  Clone ID: ARATH-23APR03-CLUSTER6869_1
gatcaccacacttctctcacattctctcaagttccaagctttctttaatggcgattatcacagaagaagaagaggatccaaaaaccctaaatccaccgaagaacaaacctaaagactctgactttacgaaatctgaatcaactatgaagaaccctaaaccccaatctcaaaaccctttcccattttggttctactttacagtagtcgtctcactagccacaatcatcttcatatctctctctctgttctcttctcaaaacgatccaagatcttggtttctctcactcccaccagctcttcgtcaacattactcaaatggacgaacaatcaaagtccaagtaaactcaaacgagtcaccaattgaagtctttgtagctgaatcaggttcgattcatacagagactgttgtaatcgttcatgggttaggtctaagttcgtttgcttttaaggaaatgattcaatctcttggatcaaaagggatccatagtgttgctattgatttacctggaaatgggttctctgataagtcaatggtagtgattggtggagatagagagatagggtttgtggctagagttaaggaagtttatggtttgattcaagagaaaggtgtgttttgggcttttgatcagatgattgaaactggagatttgccttatgaggagatcataaagcttcagaattcgaaaaggagaagcttcaaagctatcgagttagggagtgaagaaactgctagagttttaggtcaagtgattgatactttgggtttagctcctgtgcatttggttcttcatgattcagctttagggttagcttcgaattgggtttctgagaattggcaaagtgttcgaagtgtaactcttattgactctagtattagtccagctttgccgttgtgggttttgaatgtaccggggattcgagagattttgttagcgttttcgtttggttttgagaagctagtgagcttccggtgctcaaaggagatgactttatcggatattgatgctcataggatacttttgaagggaagaaatgggagagaagctgttgttgcttcgttaaacaagttaaaccatagctttgacattgcacaatggggtaattcagatgggattaatggtattccgatgcaagtgatttggtctagtgaagcgtctaaagaatggagtgacgaggggcaacgtgtagctaaggctcttccgaaagcaaagtttgtcacacattcaggcagccggtggcctcaggaaagcaaatccggcgagcttgcagattacatatcagaatttgtctctctcctccctaaatccatcagacgggttgctgaagaacctatccctgaggaagtacagaaagtgttagaagaagcaaaggctggtgatgaccatgaccatcatcatggccacgggcatgcccatgctggttactcggatgcttatggtcttggtgaggaatggactactacttgatatgccttttgaagttcttgttattattttacgatgtactcttaatcttatgactattttgagatttttcttttgggagtttaaagtctgagatactacttccaaatatgaatctgtgttttgtactttttgtttgtaagtcatcaaatttcaatagaaaaatatcttaaagtcatcaaatttttaaatatccaaaaaaaaaaaaaaaaaggatcaagctacgt

SEQ ID NO: 1133 - DNA, 1328 bp, Arabidopsis thaliana
  Clone ID: ARATH-23APR03-CLUSTER6877_1
ggaagagcacataatgatgaccaaaaactctatcgaattcgatccttacatcgagcgtaaagctttcgacgaaacaaaacaaggtgtgaaaggcctcgtcgacgctaaaatcactgaagttcctcgtatcttccaccaccgtcaagatatcttaaccaacaagaaaccttctgcttcggtatcagacctagagatccctatcatcgactttgcaagcgtccacgcggacacagcctcacgtgaagccatcgtagagaaagtcaaatatgcggtggagaattggggattcttccaggttatcaatcatagtattcctttaaacgttcttgaagagattaaagatggggttcgtaggtttcacgaggaagatcctgaggtcaagaaatcattcttctcgcgtgatgccggcaacaaaaaatttgtatacaacagtaacttcgatctatacagttcttcgccgtctgttaattggagagattctttctcttgttacatagctccagatcctccagctcctgaggagatccctgagacttgcagggatgctatgtttgaatactcaaagcatgtgttgagtttcggtggtttactatttgagcttctctcagaagcacttggtttgaaatctcagacccttgagagcatggattgcgtgaagactttgcttatgatctgccattattacccaccttgtccacaacctgacctaacgttagggataacgaaacactcagataactccttcctcacgcttcttctccaagacaacattggtggtcttcaaattcttcatcaagactcttgggttgatgtctctcctatccatggagctcttgtcgtcaacattggagattttttgcagctgataacgaacgataagtttgtaagtgtggagcatagagtgcttgcaaatagacaaggaccaaggatttcagtagctagctttttcagctcaagtatgcgtccaaattccagagtttacggaccgatgaaagagcttgtgtctgaagaaaaccctccaaaatacagagacataaccataaaagagtattcaaaaatattttttgagaaaggtctcgatggaacgtcgcatctctcgaatatcaggatatgaaaaacgaaaacgacagaaatttcttaatgagtttctttgcatcaattatactgtttgtttatgtctcttcaataatcaaaccaatgcatgtaccaaatataagaaataattgtgtgtgtcgttgtgtgtaaactatgtatatctgtatattcgttgagctactgtgtatttaaatcttatcacttgtaaaatgttatcaagtgatattgaccgc

SEQ ID NO: 1134 - DNA, 773 bp, Arabidopsis thaliana
  Clone ID: ARATH-23APR03-CLUSTER688_1
attgcgccccaaaagtttgtcttttatcaatggaaagagaacaagaagagtctacgatgagaaagagaaggcagccacctcaagaagaagtgcctaaccacgtggctacaaggaagccgtacagagggatacggaggaggaagtggggcaagtgggtggctgagattcgtgagcctaacaaacgctcacggctttggcttggctcttacacaaccgatatcgccgccgctagagcctacgacgtggccgtcttctacctccgtggcccctccgcacgtctcaacttccctgatcttctcttgcaagaagaggaccatctctcagccgccaccaccgctgacatgcccgcagctcttataagggaaaaagcggcggaggtcggcgccagagtcgacgctcttctagcttctgccgctccttcgatggctcactccactccgccggtaataaaacccgacttgaatcaaatacccgaatccggagatatatagtcaatttatatacatgtagtttgttttgtttgattagaagattacatttacatacaagatacacatagatactggaaaatataggtatgtatacattcataaattatcttatgtatcaaagaattttatagattctgattagctttttgtttttgtttttgataagaactctgattagttgtccggagacaaaaccggctaagagcaatccatgagaagctagcgagtgttttttagttcaagttgtaatataaatgcatattaattctttagtaattttgt

SEQ ID NO: 1135 - DNA, 1417 bp, Arabidopsis thaliana
  Clone ID: ARATH-23APR03-CLUSTER6935_1
aaaattaagatccctcgagcctctctctctctctacaataagcggtttcatattattcttcttcatcgattcttgattttgcaagaagacaattcaagaaagcgatttagaagacggaggagttcttaccggagatcttatacttatggatggaatgtacaatttccattcggccggtgattattcagaatggatggaatgtacaatttccattcggccggtgattattcagataagtcggttctgatgatgtcaccggagagtctcatgtttccttccgattaccaagctttgctatgttcctccgccggtgaaaatcgtgtctctgatgttttcggatccgacgagctactctcagtagccgtctccgctttgtcgtcggaggcggcttcgatcgctccggagatccgaagaaatgatgataacgtttctctaactgtcatcaaagctaaaatcgcttgtcatccttcgtatcctcgcttacttcaagcttacatcgattgccaaaaggtcggagcaccaccggagatagcgtgtttactagaggagattcaacgggagagtgatgtttataagcaagaggttgttccttcttcttgctttggagctgatcctgagcttgatgaatttatggaaacgtactgcgatatattagtgaaatacaaatcggatctagcaagaccgtttgacgaggcaacgtgtttcttgaacaagattgagatgcagctacggaacctatgtactggtgtcgagtctgccaggggagtttctgaggatggtgtaatatcatctgacgaggaactgagtggaggtgatcatgaggtagcagaggatgggagacaaagatgtgaagaccgggacctcaaagataggttgctacgcaaatttggaagccgtattagtactttaaagcttgagttctcaaagaagaagaagaaaggaaagttaccaagagaagcaagacaagctcttcttgattggtggaatctccattataagtggccttaccctactgaaggagataagatagcattagctgatgcaacggggttagaccaaaaacaaatcaacaattggtttataaaccaaaggaaacgtcattggaagccatcagagaatatgcctttcgctatgatggatgattctagtggatcattctttaccgaggaatgaatttatttatggtacttatttaacgttgattaatcaaaggaaaaaagaaaagaaagagtgaagcatggacgacacatgaattaatgaatattacactcactcacatgtagtagaaggaacaagggaacaagtcaaaatgctttgtaactattattatcggtgaataaaaataacttcttttgtcaaaaaaaaaaaaaaaatttgtcttaaaaaaaaaaaaaaaaaaaagaaaaaaaaaaaaaaa

SEQ ID NO: 1136 - DNA, 3971 bp, Arabidopsis thaliana
  Clone ID: ARATH-23APR03-CLUSTER6_1
accaaactacgtgccccaccaccttcacacatgtgagcttcatctactactcatattgcttatattttcctacaacactctctcaacaaaaaaacaaaaaaaaaagacgttctttctttgtttgtatttagaagaaaaatggctaccaattacaacgagaagcttcttcttaattatgttcccgtttacgttatgcttccgttgggatctgtgaatgcggaaaatgtatttggctgacacaaaaagtttcttgaaaaattcttagcaagagatacacgtcagttacttatgcaggtttcgagaaggatcccatctggtgaaggcgtagagatgccaggaagatccgagaccaaccggatcagacggaggagccacgggtcaggtctgagggttcgggtagcttgcacttgctcaggacggcctggttcaacgaagtgtgcacggcacgggtttgtggtgccaagcgatgagaggcttatgcggaaggcgagtgacggaagcagagaggtgttgcgaagagctttgacacctccgatccggcggatgaatctccggtggttaaatttccggccaacacctagccgtctctgtaaaatgtcttctgtttgatcatgaaactgggactcaaaaaatcaaggctgagaactttttggtttgaatgtaaatagagctcaaagcttttctttttcttgtaatgttggaaatccaataagaatcatacccaattgcagagagttgaaactcttagcactctgtttatggacaagaaagtcttagaacgttttggatgtaaagaaagaaaaagaatcaagtggattcgttgatgttgttgttttgaacaggcaaactaaggcggtcttggccttcaattagttttgcagatttgatgatatctccagtcttgatctgcccgagaatatcttttcctgctattgtgtatccgaagaccgagaactgtccttcgtcaaaggataatcctcctaagccagagtttcttttatcgtataggtagaagaagaattggtaaggagaagagtattcttctgagttttcgctgtgcgccattgctacagctccataaaccgataaaggaagcactggtaactccccatcctggacactcaatggcgttctgtagagaggttcgaattgtccagaaggcattacttccaatggaacactaacactctccaccttaccactcccatcctctgtgataacagcctggtttacagtattgagtttggctccatcatatgcaccgctagttaccagttttgcaaaattccctgcggttagaggtgctgaatatccatctataacgaaatcagctgtagcattctttctggcctcacggggttcaccaaaacggtaagccgaagcttagaatgtccggatttacttaccttcggttatccgatactgtctttcaagaaaacaactttgagctgtttaagaagttggtgaggaaaatgcacgctgatcaagattattgtggagacgcagcgaagtacgggcatgagattgtgccgttgaaaacgtcgaattcgcagctgacgctggaggatatcgccgacgcggctcagccaagtggagcatttaagtgggactctgaaaccgatttgaaggtcgacggttagttatattttatatgatcgatcgtctaatcacaaagaaagtaagggaaagaatcaaggaagtaagaataagaagataataaataaagagaataagaagaggcatttgcaactttaagaggttaaaatttcttaaatgagtctgagtttcgttgtgtgttttgggtgtaccataagaaataaaacgtacggggttgctatgtattttgtgaagtgtgtatttctggttgaatattagtctgcgtaataaaaaaaagtatgtgtagtaaaaataaataactgttatcccgtaaacgtagcaaccaatttctcgaggtttttagatccagcttcaaaagtgttcaacttcgaatcaattgaagaattgcaggaatgtataagttccttagtgccagttttactggatgtagaatgcagacgcatgcggaaatctccggaattggttcgattaaagggtaatttgggttttacgaagaggaatttgcgattgagaggtgaaggatggagaaaaaaaaggcggtgagagacgacggtggaagaagacaaaggagaagccattgatgggaagcttgcaagttacagagacaaggatagggagaataaactatgatttttcttctttggtgggaataaaattttagtatttcatacatcacaaatcacatcattagaaagtataaagaataaaatacaccaaatgaaaaagttgacgcagttattagaacatgtgttgtatcttatcgtcttttgcagttttctctattttcccaatcttttaaaagtgttttcatattttattttctttatggataaaaaaaaagtattttcatagtttaacaacttcagggataaagacagggtatcgttcgatacaatccgaccacgctccatccgttggtgtcttgatcgtacggttacatttccaaacggcggagttacacttgaatccacttccgaaagcgatctgccaaaccctatcgtttctcttcattctcccttgagcctctatgtagctaagctcataccataatgatgacgacgatgtattaccaaacctatgtagtgtcattcttgaagcttccacgtgttctcccgacagctgtagattcttttgcagctcatcaatcaccgctcttcctcctgcgtggatgcagaaatgctcgaaggcctgcttgaaatctggtatgtacggcttccactttggattgaagattttacgtccgataagggatgagaggaagagaagctgctccgatgccggaaggaccaaaggacctatggtagtgatattagctttcaaggcttctccggcaatggtcatgagatctttagacaagttgattcccacgttaccatttttgtcttcctgttccataacacagttgtaggatttgtcatccgcaccgcgatgggtcctaacaaggtggcataacttgtacttagctcgccacctgtcggatctgcggttagagaggagaatggcggcgcctcccatacggaagaggcagtttgggagcaacatggctctctcattacccttatagtaattaggagtaatgatctcagtgctaattatgattgcgttggagttaggatggacttgtaacaaatcacgtgctacatcaactgagataagactagcgctgcatcccatcccggaaaggttatagcttttgatgttactcctaagcttgtacttgttgataatcatagcggagagagacggcgttggtgagaacagagagcaattaacaatgaggatgtcgatgtctttaggtttaagacctgtattcttgaagagatcttccatggcggtgaagataaccatttgggcctcgtttcttgcggattccatggttggagttggagggatgtaatgaatagctggagggagacaagtctcttctcctagacctgatcgctcgaggattctcatttggaattcgacactcttgggattgtctttgaggatgagacgagagtgttccatgaacgaagagaacgggacacggcacgtgacaggaggtttgtagcaagagtagtccacaaggtagacggtacgtggcttggacatgaagtaaacggttgaaacaaagataataaggaaagaggaacaaaggatatgaagaagctcgaagtggagtgagttcaagacactgagaatctcttccggacccattcggagaagctcgatggcgacggttgctatgactggaatcaaaagaagagtaaggaagttgttgataaggtattggtaaccgagtttaacatatttaagcttcacggagctcgagaaatcagacattttggaagagttttgctatgcctatgatt

SEQ ID NO: 1137 - DNA, 1763 bp, Arabidopsis thaliana
  Clone ID: ARATH-23APR03-CLUSTER7019_1
ggaactggtgactttgaagactcactcttgttcattcgtcttctccaccatggaaggtgtggctatgaaactcccgtcgttccctaacgccatctccatcggccaccggagcttctcccgcgttcgttgctcctcttcgctatccgtttgttccgccgccgccgcttcctccgccaccatctccactgattccgaatccgtctctctcggccatcgcgttcgaaaagatttccgaattctccaccaggaagtgaatgggtcaaagcttgtgtacttagacagtgctgcaacttctcagaagccagcagctgtattggacgctttgcagaattactatgagttctataattccaacgttcatcgaggaatacactatttaagtgctaaagctacagatgaatttgagttagctaggaaaaaagttgctcgtttcatcaatgcttctgatagtagagagattgtttttacaaggaatgccactgaagccatcaatcttgtagcttattcatggggtctttctaatcttaaaccaggagacgaggttatacttacagttgctgaacatcatagttgcattgttccttggcaaattgtatctcaaaaaactggagcagttctaaagtttgtgactttgaatgaggatgaagtccctgacataaacaagttgagagaattgatttctccaaagacaaagctcgtcgctgttcatcatgtttctaatgttcttgcatcttctcttcctattgaagagattgtggtatgggcacacgatgttggagcgaaagttctagtggatgcttgtcaaagtgttcctcacatggtggttgatgtccagaagcttaatgctgattttctagttgcgtcttctcacaagatgtgtggacctacaggcattgggttcttatatggtaagagtgatcttctacattccatgcctccattcttaggtggcggagaaatgatctcagatgtatttcttgaccattcaacttatgcggaacctccatccagatttgaagctggaacacctgcaataggagaagcaattgcccttggagcagcagttgattacttgtcaggaattggcatgccgaaaatccatgaatatgaggtagagattggtaagtatttgtacgagaaactgtcttccctgcctgatgtgcggatatacggtcccagaccttctgaaagtgttcacaggggtgctctttgttccttcaatgtggagggcttgcacccaactgatttggcaacctttcttgatcagcagcacggagttgcaataaggtcaggacaccactgcgcacagccactccaccggtatcttggagtgaatgcaagtgcacgcgccagcctctacttttacaacacaaaggatgacgttgacgccttcatcgttgcgctggcagacactgtgagcttcttcaactctttcaaataagtggaacaccttcctgctggatctctcggctggtttgtatggtatattgcttcagaggctacttatttaaatctgctttatatgatcaatgggagtggattttgtttcttcaagtccgaagggcaatttgtgttgtagttagcaatttgtatgaaaaaatagaccgacagtagtcatgaacaatttcaggcctctacttgatcatatttgtacgaatacacacgaaagcaaatgcttcgttgttaatttgtaagtttcataaaaaacaaactcaacatgaagaaaagttactaatatgaatcatcaaaggaaaggtttcgac

SEQ ID NO: 1138 - DNA, 1943 bp, Arabidopsis thaliana
  Clone ID: ARATH-23APR03-CLUSTER7043_1
ctctcttgcccgcttcgtgcccgtctcttctctcttcttcgtattctctctccacagacatgaattccctttttgactaacctcctttttcccctaataagtgaatcttacttcttcttctcgccaagatcaaatttctgggattcttcttcttctctctaattcccttgcgtttgtttcctctgatcaagttccgtcctttttcctttttttgttcttgagttctcgtttgagctgctttttgggggagatgggtttcgattctgttaaagttatggagaattggcaatccaagacatctaatgagaatgagaagaagaagaagaagcggaggaggaagaagaacaacaatgtcagaaacagtgaacattatgaagaagaagcaaatgggtgttgggtcaaatttaggtatatagtctgttgcgcttcttcaacatcagacgttgagacctctctcactctctctactagcactgtgggaagtcagtccgcaattgtgcaatcaaatgaccaaccggttggcccagtctcttctactactacaactagcaatgcagaaagctctttgtccactcctatcataagtgaagaacttaacatctattctcaccttaagaagttttctttcattgatctcaagttggctactagaaatttcagacctgaaagccttctcggagaaggtggctttggttgtgtcttcaaaggctgggtcgaggagaacggaactgctcctgttaagcctggtactggccttactgttgccgtcaaaaccttaaatcctgatggccttcagggtcataaagagtggcttgctgagattaattatcttggtaatcttctccatcccaatcttgttaaactggtgggttattgtatcgaagatgatcaaaggctgcttgtatatgagtttatgcctcgaggaagtttggagaatcaccttttcagaaggtccttgcctcttccatggtcaattcggatgaagattgcattaggtgctgcaaagggtctcagtttccttcacgaagaagctttaaagccggtcatttatcgagatttcaaaaacctcaaatattttactggatggggagtacaatgctaaattatcagattttgggcttgccaaagatgctcctgatgaaggcaaaactcatgtgtctactcgagtcatgggcacttatggttacgctgcccccgagtatgtaatgaccggtcacttgacatcaaaaagcgacgtttacagtttcggtgtggttcttctcgaaatgctgactggtagaagatcaatggacaaaaatcgaccaaacggtgaacacaacctcgttgaatgggcgagaccgcatctcctggacaaaagaagattctaccggttacttgatccgaggctggagggtcatttctcagttaaaggagcacaaaaagtgactcagcttgcagcacaatgccttagccgtgactccaaaataagacccaaaatgagtgaagtggtggaagtacttaagcctctcccacacctcaaggacatggctagcgcttcttactacttccagacaatgcaagctgaacgtttgaaagctggttctggttctggttctggtcgtggattcgggtcaagaaacgggcaaccagtgtttcggacattgtctagtcctcatggtcaagctggttcgtcgccttatcgtcatcagattccgtctcctaagcctaaaggtgcaactacttagattggctcgcaagtgtggacgcaagcaaacgtcttttttaaccgatgtaaaaccgacattgttaaccgatttaaagaaggaaaattaaggttgttccgaagaagatccgaatttgtgtatttactacctttgtgacctcatgtttcttcgtctgttgtaactcttgaacaaattgtctgttagggtaatattgtcattatgtattagtcgtttcgtaac

SEQ ID NO: 1139 - DNA, 1890 bp, Arabidopsis thaliana
  Clone ID: ARATH-23APR03-CLUSTER704_1
aacttttgcttcttcttcgcattcactcaaaccaaagtagaagacggaatccggcaaaagcacttccgcaatcgtttcgagatgtacctttcggtgtttgttcggcggagattgtttctttctagtatatggatattggcaacaatgtttgaactcaaagagcgtttgcttcctccaagacctgcttcggctattaaccttagaggtgatgcaggctctcgtccttctccttcagggagacaaccactccttggagttgatgttttgggtctcaagaagcgtggacaaggccttaagtcgtggttttgtttctgaaatttctcaaaaatgtctgagctaaaagagcgcctgcttcctccaagacctgcttcagctatgaacctcagagatgcttctgtgactcggccttctgcttctggaagccctccccttcttggagttgatgtcttgggtctgaagaagcgtggacaaggcctacgctcttggattcgtgttgatacttctggtaatactcaggtcatggaggttgacaagttcactatgatgcgtaggtgtgacttacccgcccgtgatttaaggctgcttgatcccttattcgtgtatccctctactatcctaggccgagagaaggctattgttgtcaacttagagcagatccgttgtattattactgcagacgaagttctgcttctgaattcccttgacaactacgtgctgcgctatgttgttgagttgcagcagagactaaagactagtagtgtaggtgagatgtggcagcaggaaaattcccagttgagtaggaggaggagcaggagttttgacaatgcttttgagaattcatcccctgattatttacctttcgagtttagagctcttgaaatagcccttgaagctgcttgtacgtttctcgattcccaggcttcagagttggagattgaggcatacccgttattagatgagcttacctcaaagatcagtacactaaacttggagcgtgtgcgtagactaaagagcaggcttgtagcactgacaagaagagttcagaaggttcgggatgagatcgagcagctaatggatgatgatggagatatggcagaaatgtatctaacagagaagaagaggagaatggaaggatctatgtacggtgaccagtccttattgggttacaggtcaaatgatggtctatctgtttctgcaccggtgtctcctgtttcttctccacctgattcccgaagacttgataaaagcttgagcattgcgaggagtcggcatgacagtgcaaggagttctgaaggtgcagagaatatagaagagctagagatgttgctggaagcttactttgtcgtcattgatagtactctaaacaagttgacatcgttaaaggagtacattgatgacactgaagatttcattaacattcaactggataatgtgcggaatcagctgatcgagttcgagttgcttctgacgactgcaacgtttgttgtagccatatttggggtcgttgctgggatctttgggatgaactttgagatagacttcttcaatcagccaggtgcattcagatgggtactcataattactggagtatgtggctttgtgatattttcggcattcgtctggttcttcaagtacagaagactcatgcctctataagaagagagacatgaatgtgctccccagaaagtagacatcaacttatattgttatgttgcttacagatattaatgatttgtttcctttaatcaaacttaaaattagttaatgttgcttacagatattaatgatttgtttcctttacacaatggaatcttgggaatttttatcataggcattgtcaatccaaatgtgatagaatctttgatctttttattaaaaaacggataaccg

SEQ ID NO: 1140 - DNA, 1421 bp, Arabidopsis thaliana
  Clone ID: ARATH-23APR03-CLUSTER7082_1
gagacacagagagataagagagagtctgtgtaatcctctcaaagacaaagaagaagattatgttaccctcaagaaaaactaagagagtcttctcctgtgactttactccgggaagaaaacgccgacgatgtgttgttgttccttcctctgtttctccggtaccggaaaacacaaccggagccgatttgctagattcaattccagacgatcttgttatctctatactttgtaaacttggctctacttctcgatgtcctgctgatttcatcaacgttttgctgacatgtaagagattaaaaggattagctatgaatcctattgtgttgtcgagattatctcctaaagctatcgctgttaaagctcataattggtcggaatattctcaccggtttttaaaaaggtgtgtcgacgccggaagtctcgaagcttgttacactctaggaatgattcggttttattgtttacaaaacagaggaaacggcgcgtcgttaatggctaaagccgcgattagttctcacgcgccggcgttatattccttagcagtgattcagttcaacggaagcggtggttcaaagaatgataaagatcttagagccggtgtggctttatgcgcgcgtgccgcttttcttggacacgtcgacgcgctacgtgagctaggtcactgtcttcaagatggttatggagttcctcaaaacgtctctgaaggtaggaggtttttagttcaagccaacgctcgtgaactcgccgccgttttatcttccggtatacaagctaggtcaacgtggctttctttatcacagccaccacctccggttgttcctaaccatggtcaacaaacttgtcctttgcttagtgattttggatgtaatgtaccggcaccggaaacacatcccgcgaataggtttttagcggattggttcgctgttcgcggcggagattgtcccggagatgggttgagattgtgttcacacgctggttgtggacgaccggagacgaggaagcatgagtttaggagatgttcggtttgtggcgttgttaattattgttcacgcgcttgtcaagctttagattggaaactccggcataaaatggattgtgctccggtgcaacggtggctagaggaaggtgacggtggtgaaggtaacgttcagattgacggaaatggtaacggtgataatgttttgcttccaatgagttaacggcaatgtaacggctgctttgaatagtaaaaaaaaacgacgagagatgaggtaaacggaagctagtttcgtttttttttttttgctattagtagaaaagattaggataaaaaattactatcgagtagagtaatttttgtaattccaatctattgtaaagaagagttataaaatgaacggcttttatttttcatggtataaatcttactttagtttgcaaag

SEQ ID NO: 1141 - DNA, 1073 bp, Arabidopsis thaliana
  Clone ID: ARATH-23APR03-CLUSTER7116_1
gaaaagctgtgccccgaagatcagtcccacaaagctgtgaccagaagatcagtgattgttcgatgaacgaagaggagccagacaaagaacacgtggcggattctactatggccagacaaagaacacgtggcggattctactatgtcggcggcggcgattgatggtgtggcggctctgagatcggtgtttcagcgggtaaaccaggcggcggagaaagcgggtcgtgggtcggatcagatacgggtcgtagcggtgagtaagacgaaaccagtttctctgattcgccaagtatacgacgctggtcagaggtcttttggagagaattatgtgcaagagatcattgagaaggcacctcagcttccagaagatatagagtggcatttcattgggaatttgcagagcaacaaagtgaaagcctttgctatgtaaattgtctttgctatttctaagctcgtcatctttagtttttttgtattgagttactaaataggttgtaaaactacacacttgagttctatgcttaattgtatggtttgaagaacgcttgctcgaatcttgagttttctggtttgatgacaatagggatggctgattacacttcaaccccagagaatttcaagttgcttgcgaaatgcagaagtgaagtgtgtaaggagcttggaataccggaggagcaatgtgagctatctatggggatgtctggtgactttgaactagcaattgaactgggaagcacaaatgtgagaataggatctactattttcggggcgagagagtatcctaagaagtaatgatgtaaactactgagtgatgagattgattctaagtttgaacatcaaaaccagtttcagggaagaataagagcttagtttttaatgttgaaatcatgtagatcttctctcttcttttgttttgcattgtatttggtgatgttgcttgtaagttgtaaccaaggtacattattactatttttctaatttcatggatataaacacatgaaagaagaataaaaaaaaaaaaaaaaaataaatatggcggccgcaaagaagaatattttttttactaattgcttt

SEQ ID NO: 1142 - DNA, 1465 bp, Arabidopsis thaliana
  Clone ID: ARATH-23APR03-CLUSTER7139_1
gactctctcacactcgttgaccaaaaaaaaaactctctctttcactgagaaatgctctgcttcactcatgtcccacctcttcctctgttctccacctccggtatctatcttccggcctccagacgattcactagtttcaggattagaatgtcttcttcttcctccatcgattctgttcctcctccaccggataacgcaatcgtccttggttgtggtggaatcgctgtagatttcttagcgacggtggattcttatcctcaagctgacgacaagatccgaagcactagcctaaaggtgcaaggaggtggaaatgctgcaaatgcgttaacttgtgctgctcgtttgggattgaattcgagactgattagtaaggtagcgaatgactctcaaggaaaaggcatgttggaggagcttgaagctgatggtgtggatacttcttttattgtggtctctaaagagggtaattcaccatttacctatatcttagttgacaaccaaacgaaaacgcgtacttgtattcacacgcctggagacccacctatgttaccaactgacctttctcaatcgagtatgctatcagcgctagaccgagccagcattgtatactttgatgtaagattacacgaaacagctttggttattgcaaaagaggcaagtcgcaagaagatacctattttagttgatacagagaaaaaaagagatggtttagatgatctcttgccattcgccgactacgttgtctgtccagaaaatttccctcagacatggacagaagtgtcttcaactcctggtgcacttgtttccatgttgttgagattgcctaaactgaaatttgtgatcgtgacctcaggtgaacatgggtgcttaatggttcaaagagcttcaaaagcagaagtatttgaatctcaagagacagacattgaaagcttgttggagacactgaagcatagaaaagactcaacgacaacatttccaacatgtgtttcatcggagacaacaaagctgaaggccaacggggtaggaacaatgaccggaagattgtttctcggaacagcggagaaaattcctccagaagagcttgtagacaccactggtgctggcgatgcattcataggagctgttctatatgccatatgcgccggcatgcccccagagaaaatgttaccatttgctgctcaagtggctggttgcagctgccgggctttgggagctcgcacgggtcttcctcaccgtacagatcctagacttgtaccctttctggtttgacactctctgtgttcctttgtcaacctttctgagtcactactttactccattgcccactttcatatattttgaatgttcttctacttattagatgaaataaaagacatggtggtatgcatcaaataatattctggttaggtttgacttttttcttattataaaaagtagtaacatatatgatgaaaaaaaaaaaaaaaaa

SEQ ID NO: 1143 - DNA, 1487 bp, Arabidopsis thaliana
  Clone ID: ARATH-23APR03-CLUSTER7165_1
attattattccactctctctctctagactctgaattagctcattcttgcctccaaacaaatattcctgacagaccagaccactcgtaagacagaccaaaccctaaactaaaagcatccacgttctttgtttttgtattgatggtctgatctcatatccatggagatggagaatcaccgccccggcagtttcacctacatgggccgcaaattcagcgatttaagtctcaacgatgactcctctgctttcagcgattgtaacagcgacagatccggcgaattccccactgcttcctccgagagccgtcgtctcctcctctcttgcgcctctgagaattccgatgatctcatcaatcatctcgtgtcgcatcttgattcctcctattcgatcgatgagcagaagcaagctgctatggagatcaggctcttatccaagaacaaacctgagaatcggatcaaaatcgccaaggccggtgcgattaagccgttgatttctctgatctcttcttcggatcttcagcttcaggagtatggtgtcactgcaatcttgaatctatctctctgcgacgagaacaaagagtcgattgcttcttccggtgcgattaagccgcttgtcagggctttgaaaatgggaacaccgactgctaaagagaacgctgcttgtgctctgctccgtctatcgcagatcgaggagaacaaagtcgccatcgggagatccggagcgattcctctgttggtgaaccttctagaaacaggcggattcagagcgaagaaggacgcgtcgacggctctgtactcgttgtgctcagctaaagagaacaaaatcagagccgtgcaatcgggaattatgaagccgcttgttgaattgatggcggatttcggatcaaacatggtggataaatcggcgtttgtgatgagtctgttaatgtcggtgccggaatcgaaaccggcgattgtggaggaaggaggagttccggtgctggtggagatagtagaggtgggaacacagagacagaaagagatggctgtgtcgatattgctacagctttgtgaggagagtgttgtgtatagaacaatggtggctagagaaggagcgatacctccgctagtggctctgtcgcaggcaggaacaagtcgagctaagcaaaaggctgaggcgttgattgagcttctaaggcaaccaagatccattagtaatggtggtgctagatcatcgtcccaactctgatgtgagcttttcttatttatctttttttaccacactctttcttcgtcttttactgttaatgcgagggtgtatacaaacaaccagaaaaaaaaggggggaaaaggaaactgtaaatagtttgtgtagaaaattagtgggcttgttgtaatttatcttgagtttggcttttcttttctttttgtgatccatttcataaatttcggtttggttttaacagatttctcattacaaaaaaaaaaaaaaaaaaaaaagggcggccgc

SEQ ID NO: 1144 - DNA, 1733 bp, Arabidopsis thaliana
  Clone ID: ARATH-23APR03-CLUSTER7186_1
gaaacattatgaatcctcctatgagcaaatcacttttaaatttgttaacactcttttaaaagaacaaaaaaagcaaaaaaaaaataaagatattatcaccatggctaacgcaagaagtttggtcgccaaggcaaacaatattaacgtaggttcattgattctaatggccttggtgtttggttcttgcgtggctaatggtgaatatctcggcggccgccgtggtctcgctgctaattccggtaaccccacggtctatgatattactaagtttggagccgtaggagatggttccaccaatacttttaaggcgtttttgaacacatggatacaagtgtgtgacagtccagtaccagcaacgctactagttcctaagggaacatttttggctggtccagtcattttcgccggtccatgcaagagcaaagtgaccgtcaatgttataggcacaatcatcgctacgaccagcgggtacgcaactcccgagtggttcttgttcgagcgtgttgacaatctcgtcctcaccggaaccggcacattccacgggaaaggtgaagctgtctggaaagcagatggttgtggtaaaaaggtccaatgcaatcttcctccaacgtctctcaaattcaggaacatgaaaaatgttgaaatcaatggcataagctcggtgaacgcaaaggccttccacatgttcttagtcaaaactgagaatgttaacatccaaaacattaagcttaccgcaccagctgaaagccccaacaccgatggtatccatttgagcaatgcagacaacgttagcatcctcgacagtaccatagcgactggagacgattgtgtttcagtcggtcgtggctccaacaacgtaaccgtcgaacgtgtgatttgtggtccaggacacggtctaagtgtcggtagtcttggtaagtacaagaacgaggaagacgttagcggaatccacgttaacaactgcacgatgattgagaccgacaatggtcttaggatcaagacatggggtgggtcagacccaagcaaggctgtggacattaagtttgaaaacatcatcatgcagagtgtcaagaacccaatcatcattgatcaaaactacggttcaagaggcggagattcacaagttgctataagtgatattttgttcaagaacattagaggaacaacaattacaaaagatgttgttcagattatgtgtagcaaatcggtgccgtgccaaggagtaaacgttgttgacgtgaacttggactatgtaggcaagacaggaggagagaagaagtcgtcatcaggcggtttggtcggagctctttgcgataacgccaatgttatcttcggtggaaaacttagtttccctatgtgtcccaaataagctttttggtataaataatttaatattaaaaaaaaaaatcaaaagtttcacaaacattgttttgtttgtgagttagtttgggaatttatcaacaagaaataatcagtggaatatttgacttttgataatgttttttttcccgattttttttgattttttttttggttttatgtataaataaacagatccttcagctggttgcttaatagtttctggttagaaaatttggtctgtgggtattagtgtgtacaatcattttattgctctatctaaagtcatcgatttctttctttctaagtggcaaaatatctctttcataaaaaaaaaaggaaagaataataaataaaaatatctctttcattct

SEQ ID NO: 1145 - DNA, 1590 bp, Arabidopsis thaliana
  Clone ID: ARATH-23APR03-CLUSTER7193_1
ggttccttcttccttccttcttcttcttcttcttctctaattctggtttcaaaaatcttctttttcttttctttagttggataatttagtgattataattattacaatcagcttttgcgccgcagagtaaacaaaaaaaaagctcgttggctttgttcctttgaatctgttgattgttttatcgagtgagaaatgggtaattgcttagattcatcagctaaagtggatagtagcagccacagtcctcatgctaattctgcttcattgagctcaagagtttctagcaagacaagtcgttccacagttccttcaagcttaagcataaattcttacagcagtgttgagtctttacctacaccaagaacagaaggagagattttgtcatcaccaaatcttaaagctttcacctttaacgagctcaagaacgctacgaggaactttcgacccgatagtcttttaggtgaaggaggttttggctatgtgtttaaagggtggattgatggaactactttaactgcttcaaaaccgggttctggaattgttgttgcggttaagaagcttaaaactgaaggttatcaaggtcataaagagtggttgactgaagtgaactatcttggtcagcttagtcacccaaatctcgtcaaacttgttgggtattgtgtagagggagaaaaccggttactggtatacgagttcatgccaaaaggaagcttggagaatcatctttttagacgtggcgctcagccacttacgtgggctataaggatgaaagttgcaataggggctgccaaaggacttacttttctccatgatgcgaaatcgcaagtgatatacagagactttaaagctgctaacattctacttgatgcggaattcaacagtaaactttcagacttcggtctagctaaagcaggtcctaccggtgacaagactcatgtgtccacacaagtcatgggtactcacggatatgctgccccggaatatgtagcaacaggtcgattaactgctaagagcgatgtatacagtttcggtgtggtactactggaattactctcaggacgaagagcggtggacaaatcaaaagtgggaatggaacagagtctagtggactgggcaacaccgtatctcggcgacaagcggaagctctttagaataatggacacgagattaggcggtcagtatcctcaaaaaggagcatacacagcagctagtcttgcattgcaatgcttaaaccctgacgcaaaactgagaccgaaaatgtcggaagttttggccaaattagatcagcttgaatcaacgaaacctggaactggagttggaaacagacaagcacagattgattccccaagaggtagtaatggatctattgtacagaaatctccaaggaggtatagttatgatcggcctctcttacacataactcctggtgcttctcctttgcctactcacaatcactctcctcgtgtaagataggaatcactgtaatagttatcttttgtctttgtctgttgtatgctgtttgtaaaatgtgttgtgtaatggaccaaagtttcattcttggctcaatttataaaatttggtttcagtatc

SEQ ID NO: 1146 - DNA, 1643 bp, Arabidopsis thaliana
  Clone ID: ARATH-23APR03-CLUSTER7194_1
gtctctctctctctttctcttgttttctttttccctcttctccaaggaatctggaaaaaattaaaccttttttctaaatccctggaaatcagaaaacttcctattgagaaaccatagattcgatccaagcctttgattgtatcaaaatctctgctttaccaagaatttgggttgatacagaagaaaaaagttaaatggttgaggcagagcgcgcggagaatagttggattgcttcggaaacgtctccgtcgtcgtctccggtggtaatagaaagcagtgatttttcgataactgatggaatgagagatgtgagcggatttggtatagcttctcgacctcagttggacaagggtttgtcggaaaacaatatagggttcacggaaagagttttctctgccgccggagctgcggttttgtccgccgttactctaaatcctcttgacgttgtcaagactcgattgcaagctcaagccgccggaatgtcgtactctcacccactcagtaactccattggacgcatggcattttttggcccaaacatgatgtttgcagacttgagatgttctccttcatgtgcacgcgctggtgttgaaggtactgtttctatttgcccaccggattgtttccagtacaaaggaacatttgatgtcttcaccaagatcatacgacaggagggtctgggacgcctttggagagggactaatgctggtcttgccctagctgtgcccatggttgggatatatctcccattctatgatatgttccgcaaccggttggaagaattatctcgggagaaagctcctgctatgacattttgtgtgcctactgtggcagggtctttagcgcggtccttagcttgtacagtctgctatcctattgatcttgcaagaacgcgtatgcaggcattcaaagaagcaaaagccggtgtgaagcctccgggagtttttaaaactctagttggtgttttctctgaagtcaggacagcaaataaccttgaaagtagcttgcacaactatcgtggtctctggagaggcttgggtgcacagcttgcccgtgatgttccattctcagcaatctgctggtcgaccctcgagccaataaaaaagaggctccttggagttgcgggcaatgatacaaatcttgttggtgttttcggtgcaaccttttctgctggatttatagctggaagtatcgctgctgctgctacttgtcctcttgacgttgcaagaacaagaagacagatagagaaggaccctggtagggcattgatgatgacgacacgacagacactaatagaggtttggagggatggagggatgagaggactgttcatgggaatgggtccacgagtggcacgtgcaggaccatcggtagggatagtggtttccttctacgaagtggtcaagtatgttctgcatcgccatgcttcatcatgaccctgcaaagtcactaatctcctaaacatggatctgtggatacggctttaggttgtagcttcttttttcaagttaacagaataagttaaacaggctcaatgctccagaaacccgagtttcctctgtttatgagccttaattttgtccagttattaaataccggctgtttttaatgtttaaaaaaaaaaaaaaaaacccgatcgtact

SEQ ID NO: 1147 - DNA, 1950 bp, Arabidopsis thaliana
  Clone ID: ARATH-23APR03-CLUSTER7198_1
atgttgagatgcacgtacataataactatttcttaaatctcgataacttttctagattatcttttcctttctgctatatcatcaatggcactatccgatgatttgatgtcgaaatgctcggaacacatgagtgcttacaaatctgcttgtgaagaacacccaaaactcaaatcctttgatgcttcccttcagcagcgaaccaacaaaatgatagactcactcaccgttgacgccaagaacgggtcgtcctccccacacgacgcacacatggagctctccaagcacttagttgaagttacccaaggtgtggcagacttcattaccgaaatagaagacgatgtgtgggacaaccaagctctaaagtatttggtcctggcctattttgaaaatactaaaaagactttagagattttcaaaactatagagaactgcgtcgagaacgcagaaatgggccaacttctcattcgagaggccttggccgagtttgagaaagagtcggcagaaaaagatgttggtgggaaaaagaagaagtatgaaaaaacattggaggacctcaagagttttaaagagatgggagatccctttgacggcaaagttctcacgactcagttcgagctgatggcgttatccaaagatttgatgttgaaatgctcggaagacatgatgagtgcttacaaatctgcttgtgaagaacacccaaaactaaaatcctttgatgcttcccttcagcagcgaaccaacaaaatgatagactcactcaccgttgaagacaagaatggttcgtcctccccacacgacgcacacatggagctctccaagcacctagttgaagttacccaaggtgtggcagacttcattaccgaaatcgaagacgatgtgtgggacaaccaagctctaaagtatttggtcctggcctattttgaaaatactaaaaagactttagagattttcaaaactatagagaactgcgtcgagaacgcagaaatgggccaacttctcattcgagaggccttggccgagtttgagaaagagtcggcagaaaaagatgttggtgggaaaaagaagaagtatgaaaaaacattggaggacctcaagagttttaaagagatgggagatccctttgacggcaaagttctcacaactcagttcgagcggatcaaaaagcagcaagaatcccttctggaggaagtgagtgagactagaaaaaagattcaggacgaaattagtaatctagagaaaaaaactttaattacgaacgtggttttcggcgctgcgtttgctattgttgcggttgcatccatagctctaattgcaacaggcgtgggtgcggctgccggctttggggctctagccgcaccactgcttgcggcaggatgggctggagtctacactaccttggataaaaagaaggatgctctgaacaaacagttagaaggtctaaagaaagtggaagagatagaagaatcggtggagaaaggtataaaaaccaacgaagaagcgacggagaccgtatcgattttagtcgacgggctagaagaccgtatcaaaaatatgttgaaacttgtagataatgctattgaccatgaagataatgaggcggccacgagaattgtcctaactcagatcagtaagaaagtagagaaattaacaaagaaaatcacggaggttggtgaaagtgtggaagatcatagcaagttgattgcaaaggccagacttcaagttctgcaaaagatcaaccgttaatcttttgtttaacgatgtttgttgttcaaaatccatattttagtatgttttaatcatcccattgtacctttttaaaatattatatgttttgtaatttcaccatccgagagattggttgatatgtacctctatcccgtatattcgtgaaataaagtttgaaaaaaacttgtgcgttaaaaaaaaaaaaaaaaaaaaaaaaaaaaaaaa

SEQ ID NO: 1148 - DNA, 1546 bp, Arabidopsis thaliana
  Clone ID: ARATH-23APR03-CLUSTER7214_1
gaggacaaggttgatgaagctcgtcgtctctgcaaaatcccttcccttctttctttctatccacaaacaaaatttcgaatccatagagaagaaaacatgaagcaatgtgatcgtagtagtctatctccttttcctataagttcttcttccttatcttcttctttcgttgcttctgaatctgatcctgaagattctttatggagtgatttcactttcgatttctcattcttaacatccgaagaccacaagattagtcccaatgatgataatgatgcgaccactgttcctaaagggaaagaattgaatcctttggcacctcagtttctaccattcaatgctaagaagaacctaaacaagaatgggagagaaattgaagtaaacagttccaaccaaaacactagaataggcgtcctgatccatgatgcagatgagagtttgggtttagtatctcaagatagtgtttccaacactatgagtatgttagatattagcaacgagttccaaaagtctaaaaagctggatccgttagctcctgtttttgttcctgcttgtgcaaaactaagtgagaagcacggtgcagcagatcacatgttaactatggagacaaatgttggctcaacttctggtgtaagttcttcagacagtatgttgcttaatacttttaaggttgttgggacacattctttagtggtcgaccgcagtttaaggaatagatactctaatacaagattggataggtccagcaacaagtctcatggtcggaagaagctaaatcctctggctcctcggttctcactagcagatcataaacaaaatgtatatggctgtgaggtaaaccaagctgcaaatgactttggtgatagacatggctgttccacatcatcaccatctcaaaaagtggatgttaagaaactacttacgacgattcatggattgtcagagttgctaacacatgtacacagttcagaaacttcggatttaccaaatgagcagtatcttgatctcatcaactgtactgtgcagaatctcaactcctatatcaataacagagttcaggagcatagtggggattatgcaagtgctgtacatagttcatgtgatttatattcgttgcctaatatgcgtaaggttataagaaatcatcatcaaacagaagagcaaatcaacccagaggtgtgtttttataaaagcttatggctcaaggctaaggcagagagatcgttgatggaacatgaaacatttctttcaaaagcaagatcttgagcaattagtgaagagttatataaggttagcgtgtagaaattcaagcggctgaatcgaggcggtgttactagctagagaagttttgctagcaaatgtatgtgtaggtcgaaaagagggacactcatgtcaattctagacaaagacttgaatctgtattttgtgttgtagaaacttgaaatactttatacacaaatctagctttgtttcttgaaccaaatttgtattttgaagctacatttcaatgaatatatgtaaagagattacccaaaaaaaaaaaaaaaaa

SEQ ID NO: 1149 - DNA, 1448 bp, Arabidopsis thaliana
  Clone ID: ARATH-23APR03-CLUSTER7266_1
gttttgatgggccgctttgctcgcgacaccctttttgaccctcggggcaccaaaaatcctttccccccttcaggtcaaccctgtatagtatttaccgagcttgccgtgttgcttatgtgaaaggccattgaagttctagttgagcttgcttctctccagacattctttcttgacccttgatgaagcaatcaagagagagctccctagtcccccccccccccccttttctttcttctcgacgatcacagcgacgaggtcgaatacgatcttcttacccctgtcgacagttctgaattaatatcaattttcattgtcttcctatctctctttctctctttggcttcttccaatctaatttcagtgatttacttgttaagaattcaccttttgagaggcccagttttgaaatatggctggccaaaacgcgcgtttgaatgtggttcccactgttactatgctcggggttatgaaagctcgtcttgttggcgctacaagaggtcatgctctcctcaagaaaaagagtgatgctttaactgttcagtttagggcacttctcaagaaaatcgttacagctaaggagtctatgggagatatgatgaagacatcgtcttttgctcttaccgaagtaaagtatgttgctggtgacaatgtcaaacatgttgtcctcgagaacgttaaagaagctactttgaaggttcgttctcggacagagaatatcgctggagtgaagctgcctaagtttgatcacttctctgaaggtgagaccaagaatgacttgaccggtttagctagaggtggtcaacaggtccgagcttgccgtgttgcttatgtgaaagccattgaagttctagttgagcttgcttctctccagacttctttcttgacccttgatgaagcaatcaagacgactaaccgtagggtcaacgctctggagaatgtggtgaaaccaaagctggagaatacaatcagttacatcaagggagagcttgatgagcttgagagagaggatttcttcaggttgaagaagattcagggatacaagaggagggaagtcgaacgacaggcagctaatgctaaggagtttgctgaggaaatggttcttgaagacatctctatgcagagagggatttcgataaacgctgctcgtaacttccttgttggtggtgctgagaaggattcagacattattttctgaggtgtgggctctctctctctctctctctctctctttgtgccttctgtgtttgctcggtttctattttcgccttcgcgctgttattactctcttcatcagacttatgtttcttcaaataaaatggatttgatgtagatgaaatactgtatcatcttggattgtgctttgatataaaatttttcgagagatttgtgattaaaactgtattgagtaataaaaattcccctgtttcaagaccccaaagggcggccgc

SEQ ID NO: 1150 - DNA, 1812 bp, Arabidopsis thaliana
  Clone ID: ARATH-23APR03-CLUSTER7273_1
gcaaaatcgtcgtcgtcgtcgtgtcttcttcgtcagcagagaagctccggcgatgggtttacacaaattgagactcgcagcggcggttcctgtaaccttctcctctcgcctcttcctcaagccatttaccaatactcttaccctaggtttgttttcccgccatcttcaaccccgtaataagcctctccttgtcagagctttctccgcttccgccgccgtacaagatattccggccacacagacctccgattcctctgtagcagcaaggcctctgtggaaggcagcgattgatttcaaatggataagggacaataaggaagcagtcgaaatcaacatcaggaacaggaattcgaatgctaatttggaagctgtgctccagctttatgagaacatggtcaatctccaaaaggaagttgagaggcttcgtgaggaaagaaacaacgttgccaaaaagatgaaagggaagctggagccatcagaacgtgagagactcgtagaagaaggtaaaaatcttaaggaaagtcttgttactctggaagaagacctcgtgaagcttaaagatgagctccaacatgtagcacagtctataccgaatatgactcaccctgatgttcctgttggaggagaggattcatcggcaattagacaggaggttggtagtccacgtgagtttagttttccaataaaggatcatcttcagcttgggaaggatcttgatctcattgattttgactctgctgctgaggtaagtggttcaaagtttttctatctgaagaatgaggcagttctattggagatggctcttcttaattggacattatcacaagtcatgaagaagggttatacccccctaacgactcctgaaatcgtgagatcttctattgttgagaaatgcggtttccaacctcgtggggataatactcaggtctattcgatagatggaactgaccaatgtctcattggtaccgctgaaattcccgtaggaggaatacacatggattctattcttcttgaatcagcattgcctttgaaatatatagcattctctcattgcttccgtactgaagcgggtgctgctggcgctgccacaaaaggtctttaccgagttcatcagttcagcaaagcagagatgttcgtcatatgccaacctgaagatagtgaatccttccaccaagaactcattcagatcgaagaagatttattcacttctctaggattacactttaaaacattggatatggccacagccgatttaggcgctccagcatatcgcaagtttgacattgaagcatggatgcccggtttaggacgatttggcgagatatcaagcgcatcaaactgcacagattaccaaagtcgaagactgggaatccgttaccgcccatctgaaccgcctcagacgggtcctaagaaagggaaagcgaatcttccagccactaagtttgtccacactctaaacgcgactgcgtgtgccgtcccaaggatgatggtgtgtttgctggagaattaccagcaagaagatggatctgtggtgatccctgagcccctgaggcctttcatgggaggcattgaactcatcaaacccaagcacaagtagtttttaatggttagctctttgcaattcttgctgtgattcctcttgtacttgaggttttgttcattatacttttcacaggcgctgagttttttgtgttcttgtctcagaacataccatttatagtttatatcatcataaccgatgttctttgatccaataataacgaaagggaagtatacattaaaaaaaaaaaaaaaagaaaaaaaaaaaaaaaa

SEQ ID NO: 1151 - DNA, 1087 bp, Arabidopsis thaliana
  Clone ID: ARATH-23APR03-CLUSTER7310_1
aacaaccgacggacaccatcgaatcaaaacaaatctcagtcattgaaatttaacatctatcccaaaatgttttcttttctcatcctccaagtgtcggaggtttttcaggtggttattgctgccgtggtctctatagtcttcttagtgttagcggtgtctaacactggcaggttcagccacggcattaaccataaccacaccgctttttatcatattcagtccgattctcgtaccagccacgatagccactgctgtcataaccacaggactcaccgctggtggcgcactcggaacgatggccgccgcttctctcctcagcctgcgacgtaggttcgggcgtaggagatttgggggaggtaggagatttgggggaagatttggaaaaccagggggtggaggattaggaggtggaggtttacctggaggattaggaggattaggaggtggaggtttacctggaggacttggaggattaggaggaggcgaaaatccgttagctaaaatctcaaaaatgttcggaccaggggccgcaggtggaggtttacctggagcattaggaggattaggaggtggaggtttacctggaggattaggaggattaggagggggcgagaatccgttagctaaaatctcaaaaatgttcggaccaggggctgcaggggccgcatgaggagatgcacctcccgcagaaactgcacctgccgctggagctgcaccagccgctggagctgaaccggctgcaccacccacatggtaaaggaaataagtcaagttgttccaacatgtagcatatatatatatacgtttatgctcgtatgtaatctcaaagctgcttatactgaaataaagaaacacaagactacaattttattaaaaaaaaaaaaaaaaactacaatgttcattaatttatagtataaatcatatagctcgatgaacaaatgggaacgtataatgtataatgtacggtcgactcttagaccatgtacattgcacatttagtcggcattgtagtctgtaaatcatactatatcaattcttaaggtttttatatactaagtaattttaaattgaaaaaaaaaaaaaaaaa

SEQ ID NO: 1152 - DNA, 1865 bp, Arabidopsis thaliana
  Clone ID: ARATH-23APR03-CLUSTER7338_1
gaatcgtcgttacctcatgtgatgctcgtatcattcccagggcaaggtcacattaagccctctctcagattagagatcgttcatgattcgaaaaagcttaaaagacaaagaagaagagaagtgtatgtttttgccactcgttttgttactttcttttgatattttgttttaggtgttcacataaatttgatagtgtaaagaaaacaaaaccactttctagttcttaaagaaactagaaatccatggacccgtctcgtcatactcatgtgatgctcgtatctttccccggccaaggtcacgtaaaccctctacttcgtctcggaaagctcatagcctctaaaggcttactcgtcacctttgtcaccacagagaagccatggggcaagaagatgcgtcaagccaacaagattcaagacggtgtgctcaaaccggtcggtctaggtttcatccggtttgagttcttctctgacggcttcgccgacgacgatgaaaaaagattcgacttcgatgccttccgaccacaccttgaagctgtcggaaaacaagagatcaagaatctcgttaagagatataacaaggagccggtgacgtgtctcataaacaacgcttttgtcccatgggtatgtgatgtcgccgaggagcttcacatcccttcggctgttctatgggtccagtcttgtgcttgtctcacggcttattactattaccaccaccggttagttaagttcccgaccaaaaccgagccggacatcagcgttgaaatcccttgcttgccattgttaaagcatgacgagatcccaagctttcttcacccttcgtctccgtatacagcttttggagatatcattttagaccagttaaagagattcgaaaaccacaagtctttctatcttttcatcgacacttttcgcgaactagaaaaagacatcatggaccacatgtcacaactttgtcctcaagccatcatcagtcctgtcggtccgctcttcaagatggctcaaaccttgagttctgacgttaagggagatatatccgagccagcgagtgactgcatggaatggcttgactcaagagaaccatcctcagtcgtttacatctcctttgggactatagccaacttgaagcaagagcagatggaggagatcgctcatggcgttttgagctctggcttgtcggtcttatgggtggttcggcctcccatggaagggacatttgtagaaccacatgttttgcctcgagagctcgaagaaaagggtaaaatcgtggaatggtgtccccaagagagagtcttggctcatcctgcgattgcttgtttcttaagtcactgcggatggaactcgacaatggaggctttaactgccggagtccccgttgtttgttttccgcaatggggagatcaagtgactgatgcggtgtacttggctgatgttttcaagacaggagtgagactaggccgcggagccgctgaggagatgattgtttcgagggaggttgtagcagagaagctgcttgaggccacagttggggaaaaggcggtggagctgagagaaaacgctcggaggtggaaggcggaggccgaggccgccgtggcggacggtggatcatctgatatgaactttaaagagtttgtggacaagttggttacgaaacatgtgacgagagaagacaacggagaacactagtgataatgatgtctcgaaaatatccgactatttgttgtaccgcaaaaaccttaaccactacaaccttttcttttttcttgtcaataaatcgtatcaatctcatttcatttttcgaaagtgttttttctcacttctaaaatcaataattacgtattgtcttcttatcaaaaaaaaaaaaaaaaa

SEQ ID NO: 1153 - DNA, 1513 bp, Arabidopsis thaliana
  Clone ID: ARATH-23APR03-CLUSTER7358_1
ctcgctgctttttcccttgtccttttttgtctttcttttctctaattaattacttttctctgagacacagcaatggcgtcgacgaagcccgattccgcaatcaaccttgaagaagaggctgaaggcgacggtgtagccgtagacgatccgattttcataccggagaccacgaacttactcgtccgttactcgccattcgacgacagggacatcgattgcaatccttatttccctttcacaggcccgatttcagattctggatcaggttcttactcggattctgagcccgatcccaacagctgtcccatcgatttcttcgatcgagattcttccgatgttgacgtggctgagtacttggaatcaggagggctgaccgccggtgattataatatttggggcttttatgaccccaaggaagacgaggaagaggaggagatagttttggggacttccgggtcggatctgcaaccgggtgattcaggggagcaagggcttcgagtgaccggtatcgattcagattccgattgtgaagatggcgtgtttgattttatctctgaggatagtagcgggaataggggaaatgattcgggtcgggtcgaggttggtacgggtcttcctcctgtgtgggatcatctcttcggagagggaaccgtgttggctgatgaagaatgggaggaggtgcagaacgcgattaactggacagcttttagtggacccgaagatgaggacgaagaagatgaattgtcttcactatcaagggatgatgaagaagaagatcatgaactggactggcaggttttgttaactgttaacaatgttgttaattatatcgaacaagctgaaggaatcatgctaaatcctgatgatatcgatccggattattacctgtatctatctggtttggatgaatttgatgaaaatcagagtggacattatgatgctgatgctattcttgggcaaatgtttgatgacgagactggaatcaggggaaatcctccagcagccaaaagtgtaattcaggatcttccggttgtggagcttgctgtggaagagttagacaaagggaacaatgtttgtgcggtatgcaaagatgaaatgttagtggaggagaaagtaaggaggcttccttgtagtcatttctatcatggagagtgtatcataccttggttggggataaggaatacttgcccggtttgtcggtatgagctgcctactgatgatcttgagtatgaaagacataagagctcagaaaggggcgatactggtttggcaaggaacgtgttgccgggtagatatagttaattgaatatttgaagtgatctattcttcaagttaatagacatggtttcagaggcaagatccttgaaccactttgtttatggtaagcacttatcgtgaatgtgataatgtttaagttgtatatattccttttgttttgtgaaataaatcatgttaaactttgaacccttatcttgaagtgtttgtgaagttaattcaaaaaaaaaaaaaaaaa

SEQ ID NO: 1154 - DNA, 1234 bp, Arabidopsis thaliana
  Clone ID: ARATH-23APR03-CLUSTER7369_1
atcccgcttagcattgcatctatattaggttacattcactcacacaattcatatatacttcacatcttttctttcacactttccctgaaaggtctagcaaatgagtttgaagcgttcttcttcttctttctttatctttctcttttccttcttcttcctctcttctcatgtctcctcacaagcctgccaaaaaacatgcggccaaatacccatcaagtacccgctcggaaccgggtcaggttgcggtgacccacgtttcacacgttacatcacgtgtgaccctgaccaacagactttgacgctcaccacccacacaggcagttaccctatcacttctgtcgactacgccaaacaagagatctacgtcactgatccgtccatgtctacgtgtgcatgtacccgacccagccatggattcgggttggattgggacgctccgttttctttccatgacgacaccgtttttacgctccttgactgttccgtagacgaatcccctgtattcacaccgttaagtaacggtagcggacgtgtttccctctgtgatcgtcaaagctcctccatttgcaccttcttgtactcaaattgcagggccataagcctcataaacctccaagtatcaacgtgttgcgtctacgtgcctctagacctcggaccatcgttcgaaatggatttgaacaaactcaagtgctcgtcatactccggcttctacaacctcggtccaggccaagaatcccacccggagaattggaactacggaatcgcactcaagtacaagttcaacgtttttgatgagtaccctggcgtctgcggtagctgcgagcgtagtaacggtgcttgtggcttcaacacacagtcaagctcgttcgtttgtaactgtcccggtgggattaacacgacatcggattgcttcttcctttataactctgcttctattcttgttccttggttctcaagagaatgggtaatgtaccctttgtcatggtttgttgtttggatggtgatggttctgcgttaaaggagcatcaaaggatggagaggttcaaagaggaagcttaatagatcgaatctttgcttcttctttttataactttgtgatatcacagtatgagattcttcgatattgcttctctctttgcaatattattcaaatcaccatttatcttatttgcttttcctccactttccagctcataaggaatcaccatactatattaatgctaaacacttgccc

SEQ ID NO: 1155 - DNA, 1594 bp, Arabidopsis thaliana
  Clone ID: ARATH-23APR03-CLUSTER7376_1
actacaccataaaaagagaaaggcgtaaaaaggaaaaagaaaaaaaaaggtaaacgttataataaaagaaaaaaaaaaatatgacaacggcgttgttttcaccgtctaaccgtagaaaacgccgtctcacacacttcttcttcaccgtactcgctttcatcttactcgccgccttcatctacggccacgatttcatctctttctctcgtcgatctcttcactctccgacgatcgtccaccaatccgcaatcgtcgttgtagttgacgaacctcctccgcctccaccaacatctcctcctccgccttctcctccaccaccgtctcctccaccaccatctcctccaccgccatctcctccgccacctgcttttgcagtaggtaaaacgccggaaggatgcgatgtcttcaaagggaattgggtcaaagactggtcaacgcgtccactttacagagaatccgagtgtccgtacattcagccgcagctcacttgccgcacgcatggccgtcccgatagtgattatcagtcatggagatggcgacctgattcctgctcacttccttcgtttaatgcgacggtgatgttggagagcttaagagggaagaagatgatgttcgttggagattcgttgaacagaggaatgtatgtttctctcatctgtcttcttcattcacaaatcccagagaactccaaatccatggatgctttcggatcactcaccgtcttctctctcaaggattacaatgcaacgattgagttctattgggcaccgtttcttctagaatcgaattcagataacgcaacagttcatagagtatcagatcgaattgtgaggaaaggatcgatcaacaaacacggtaggcattggcgaggggctgatatagttgtgttcaacacatacttgtggtggaggactggcttcaaaatgaagatcttggaaggttctttcaaggatgagaagaagagaatcgttgagatggagagtgaagatgcttatagaatggcgttgaagactatggttaaatgggtgaagaagaatatggatccattgaagacgagggttttctttgctaccatgtctcctactcattacaagggcgaggattggggaggcgaacaaggaaaaaattgttacaatcaaacgacaccgatccaagacatgaaccattggccatcagactgcagcaaaaccttaatgaaagtgataggagaggaattagaccaaagagcagagtttccggtgacggtacttaacattacacaactctctggctatcggaaagacgcgcacacgtcaatctacaagaagcaatggagcccattgacgaaggagcagctagcaaatccggctagctactcagactgtatacattggtgcttgcctggtcttcaagatacttggaacgagcttttctttgccaagttattttatccatgattcttttctctaaattcaagatttttttagaactgtaattgtaaattatggttataatttttgttaattacgtaaaaaaaaaaaaaaaaattctctaaattcaagatttttttagaactgtaattgtaaattatggttataatttttgttaattacgc

SEQ ID NO: 1156 - DNA, 1531 bp, Arabidopsis thaliana
  Clone ID: ARATH-23APR03-CLUSTER7395_1
tcaaaaaaaccttccaatggcttcttcacttcctctgttacccaaacccatttccccattctttaaaacgccgccgttttctacctccaaaccactcgtcttcctcaactttcaaactcgtcttacgtcgagatcttccgatgtatcggtcaatctcaagaagaagaataatccgtggctcgacccgtttgatagcggtgaagacccggataacgaatacgggtccttgtttgccgacggaaaacaagacgaggatccaagaccaccggataatcctgataacccttacggcttcttgaagtttccaaagggttacaccgtcgagcttgcttctttaccgttgaaaatcagaggagatgttagacgatgttgctgcgttatctccggtggcgtttacgagaatctactctttttcccgactattcagctaatcaaagacaggtatcctggtgttcaggtagatatattaacgactgaaagaggaaaacaaacatacgagctaaacaaaaacgtgagatgggccaatgtgtatgatccggatgatcattggcctgaaccagctgaatacacagacatgatcggactcctcaaaggaaggtactatgacatggttctgtccacgaagctagcagggttaggccacgcagcgttcttgttcatgacaacggctcgagacagggttagttacatttacccgaatgttaactctgcaggagctggtctgatgctgtccgagacctttacagcagaaaataccaacctttcagaattaggttatagcatgtatactcagatggaagattggttaggaagaccgtttaggagtgttccaaggactcctctgttgccacttagggtatcgatttcacggaaagtgaaagaggttgtggctgcaaagtataggaatgctggagcagtgacggggaagtttatagtgattcatggtattgaatcagattctaaggcatcaatgcaatcaaaaggagatgctgatagtttactttcacttgaaaaatgggctaagattataaagggtgtaaggggattcaagccggtctttgtgattccacatgagaaagaaagagaaaacgttgaagattttgtgggtgatgatacatctatagtgttcatcacaacaccaggacagttggctgctctgataaacgattctgctggagtcatcgcaacaaacacagctgcgattcaactagctaatgcgcgagacaaaccatgtattgggttgttctcttcagaagagaaagggaagctctttgtaccgtatgcagaagagaagagtaactgtgtaattattgcttcgaagactggaaaactagcagatatcgacattggaactgttaaaaatgcaatgcaggtctttgaaggatcattggctctcgtgtagataactttacagtttctgaaacaagttctatatatagagcatttatgtgtataaatcagttatgtagtctctgttctgatgttggcctctcatcaagaattggattattcagcaaaaaaaaaaaaaaaa

SEQ ID NO: 1157 - DNA, 1528 bp, Arabidopsis thaliana
  Clone ID: ARATH-23APR03-CLUSTER7405_1
tctctctcacttttctgaaaaagttgtacgtccaaaatctccaaacccttttttaagaacaaatctcaatccatggcaatcatcgatcaaaattgagaatcacacaagcttcacaatgtcatcatcatcatcaacgacgacgaacacaacaacagaatcagattcatcatctctacctactcacatcggtagatcaaattccgacggaatcatcgacactacaccatttcttcctcccaccgttacaagaaccataagcgtagatgaagaatccaatccaattcatcgatccgctagacgacaaggtctaagagaagcagcgaggttcctccgtcacgctggtagccggagaatgatgcgtgaaccatcgatgctcgttagagaaaccgctgctgagcaattagaagagagacaaagtgattgggcgtattctaaacctgtggtgtttcttgacattttgtggaatcttgcttttgttgccatcggtgttgctgttctgatacttagccgtgacgagaagcctaatatgccgttgagagtttgggttgttggttatgggattcaatgttggttacatatggcttgtgtttgtgttgagtataggcggaggagacgacgacgtcacccggaggatggtggtggttctgggttgacgaattcttcgtcgcagcaatatgtttcgttagcgcaattggaggatagaggagagactagtaatcctgcgaagcatcttgaatcagccaatacgatgttctcattcatctggtggataattggattctactgggtttctgcaggaggccaaacactatctagtgactctcctcagctctattggctgtgtatcatttttctcggtttcgatgttttctttgttgtgttctgtgttgcattggcttgtgttatcggccttgctgtttgctgttgtcttccatgtataattgcaattctatatgctgttgccgaccaggagggagcatcgaagaacgacatagatcaaatgccgaaattcagatttacaaaaactggcaatgttgaaaagctctcaggcaaagcacggggaataatgacggaatgtggaacagattcacctattgaacgctcgctctctccagaagacgcggaatgctgcatctgtctctgtgaatatgaagatggagttgaacttagagaactcccttgtaaccatcactttcattgcacttgcatcgataaatggcttcatataaactcacgttgcccgctctgcaagtttaacatcttgaagaacgcaaacaacgaagtctagtaaaatctgttctggttctaggatcaatccgaacgaaccatcccagaccagaacgtttcagatatatgtaaactctggttcgtgttttagtgttgtgcagttagaaactctagtccatatctctttctcctgatcttctattacaatgcgtcaatgcgcctattgatagtatgtaggaataaatcgttggattagtcctactttattttttaatgatgaacgaaagcgtaggtcggccgc

SEQ ID NO: 1158 - DNA, 3705 bp, Arabidopsis thaliana
  Clone ID: ARATH-23APR03-CLUSTER7575_1
gatcttcttcttcccccttcctctctcagcttctctcccaccactaaggaggaacgttccaaagatccctttctcagagaattcccagaaaaatcttcaacaattgaaaccctaatggagaatcattcggatccttgaatcctttggtttgtctctcacctccatttctgaaatttcattgctttgtgattcttctgcagattcgttttgaagagaagaaagaaatgtcatcgaacacttcacgaagctgttctactagatctagacaaaactctcgagtttcttcacaagttctcgtcgacgcaaagctacacggaaacttcgaagaatctgagcgtttatttgactattcagcttcaataaacttgaacatgccaagttcttcctgtgagattccttcttcagctgtctcaacgtacttacagaagattcagagagggatgttgattcaaccctttggttgtttaatcgttgttgatgagaaaaaccttaaagtcattgcctttagtgaaaacactcaagagatgttgggtttgattccacatacagtaccaagtatggagcagcgtgaagctttgactataggaactgatgtgaaatcattgtttctgtctccaggttgttctgctttggagaaagctgttgactttggtgagattagtattttgaatcctatcacgcttcattgtaggtcttcaagtaagcctttttatgcgattctgcatcggattgaggaaggtcttgttatagatttggagcctgtgagtcctgatgaggtgcctgtgactgctgccggggctttaagatcgtataagcttgcggcgaaatcgatttcgaggttgcaggcattgcctagtgggaatatgttgttgttgtgtgatgctttggttaaggaagttagtgaattaactggttatgatagggtgatggtgtataagttccatgaggatgggcatggggaagtgattgctgaatgctgccgggaagatatggaaccttatcttgggttgcattactccgctactgatataccgcaagcttcgagatttctgtttatgagaaacaaggttaggatgatttgtgattgttcagcggttccggttaaagtcgttcaagataagagtctctcacagccaataagtctttctggatctactttgagagctcctcatggttgtcacgcacagtatatgagtaatatgggatcagtggcgtctcttgtcatgtctgtaactatcaatggtagtgatagtgatgagatgaacagagatttacagactggcagacacttatggggcttggtggtttgtcatcacgcaagtcctagatttgttccgtttccattacgatatgcttgtgaattcttgactcaagtatttggcgtgcagatcaacaaagaagcggaatcagctgttctgttgaaagagaagcgtattttgcaaactcagagtgtgctatgtgacatgcttttccgcaatgcaccaataggtatagtcactcaatcaccaaatataatggatcttgttaaatgtgatggagcagcattatattacagagacaacctctggtctctaggagttactcccacagagacacaaattagagatctaattgactgggttctcaaaagtcatggaggaaacactggctttaccactgaaagtctaatggagtctggctatccggatgcttctgttcttggggagtcaatatgtggaatggctgccgtatatatttccgaaaaagatttccttttctggttccggtctagcactgcaaaacagatcaagtggggtggtgcaagacacgatcctaatgacagagatggtaagagaatgcatcctagatcctcattcaaggcttttatggaaatagtcaggtggaaaagtgtgccctgggatgacatggaaatggatgcaattaattctctgcagctaataataaaaggctcattgcaagaggagcattcaaagactgttgtggatgtcccacttgtggataatagggttcagaaggtagatgaattgtgtgttatcgtgaatgaaatggtgcggttgattgatacagcagctgttcccatctttgcggttgatgcctctggtgttataaatggttggaattctaaagcggctgaggtaacaggattggcagttgaacaagcaataggcaaacctgtatcagatctcgttgaggacgattctgtagaaaccgtgaagaacatgttagccttggctctcgaaggtagtgaagaacgtggtgctgagatcaggatcagagcatttggtcctaaaaggaaaagcagtccggttgagttagttgtcaacacttgttgtagcagagatatgacgaataatgttcttggtgtatgcttcattggacaagatgttacaggccagaaaacgcttactgaaaactatagccgcgtgaaaggagattatgcccgaatcatgtggagcccttccacactcattccaccaatttttataaccaatgaaaatggggtatgctcagagtggaacaacgcaatgcagaagctctctgggataaagagagaagaagttgtcaataaaattcttctcggggaggtttttaccacagatgattatggttgctgccttaaagaccatgacactttaacgaagctgagaataggtttcaatgctgtgatttctggccaaaagaacatagagaagcttttatttggcttttaccatcgtgatggtagcttcatcgaggcattgctttctgcaaacaaaaggactgatattgagggaaaggttaccggggttttatgctttttgcaagtacctagtccagaactccaatatgctctacaggttcagcaaatatcagagcatgcaattgcctgtgccctcaacaaattggcatatctccgccatgaagtgaaggaccccgaaaaggcaatatccttccttcaagatttgctccattcatctggattaagtgaagaccaaaagcggctcctgaggacaagcgttttatgcagggagcagttagccaaagtcataagcgactcagacatagagggaatcgaagaaggctatgtggaactggattgcagcgaattcggcctgcaggaatccctggaagcagttgtaaaacaagtgatggagctgagcatagaacgtaaagtacaaatcagctgcgattatcctcaagaagtttcatcaatgagattgtatggagacaacttaaggcttcagcaaatcctttcagagacactattaagcagcatacgcttcacgcctgcattgagaggattgtgtgtctcattcaaggtaattgcacggatagaagctataggaaaaagaatgaaaagagtcgaacttgagttcaggataatacacccggcaccaggactgcctgaggatctggtaagagagatgtttcagcctttgagaaagggaacatcaagggaaggtttgggattacacattacccagaagctggtgaaactcatggagagaggaacattgagatacctcagagagtctgaaatgtcagcctttgtgatcctcacagaatttcccttgatttgaagctgaagacctgtctacaagatttacattttattgaataagtgtggtgtttttgaaagtcttcatttttttttctcacatatataaatgtatgtttagttaccgtaacttaattacatatatatatataggaaagttaaatttg

SEQ ID NO: 1159 - DNA, 1565 bp, Arabidopsis thaliana
  Clone ID: ARATH-23APR03-CLUSTER758_1
acaatctccaaagtgcgtgagtgtgtccccatccccccccccccccccaggccgagaaaaaaaaaaaatgttgccggtcacaagtcgccgccacttcacaatgtccctatatatgctccgttcatcttctccacacatcaatcatcactctttccttcttccttcttttgtttcctccaaattcaaacaccatactttatctcctcctccttctcctcctcctcctcctcctatggctgcgtgcatcgacacctgccgcactggtaaaccccagatttctcctcgcgattcttctaaacaccacgacgatgaatctggctttcgttacatgaactacttccgttatcctgatcgatcttccttcaatggaacccagaccaaaaccctccatactcgtcctttgcttgaagatctcgatcgcgacgctgaagtcgatgatgtttgggccaaaatccgagaagaggctaaatctgatatcgccaaagaacctattgtttccgcttattatcacgcttcgattgtttctcagcgttcgttggaagctgcgttggcgaatactttatctgttaaactcagcaatttgaatcttccaagcaacacgcttttcgatttgttctctggtgttcttcaaggaaacccagatattgttgaatctgtcaagctagatcttttagctgttaaggagagagatcctgcttgtataagctacgttcattgtttccttcactttaaaggcttcctcgcttgtcaagcgcatcgtattgctcatgagctttggactcaggacagaaaaatcctagctttgttgatccagaacagagtctctgaagccttcgctgttgatttccaccctggagctaaaatcggtaccgggattttgctagaccatgctacggctattgtgatcggtgagacggcggttgtggggaacaatgtttcgattctccataacgttacgcttggaggaacggggaaacagtgtggagataggcacccgaagattggcgatggggttttgattggagctgggacttgtattttggggaatatcacgattggtgaaggagctaagattggtgcggggtcggtggtgttgaaagacgtgccgccgcgtacgacggctgttggaaatccggcgaggttgcttggtggtaaagataatccgaaaacgcatgacaagattcctggtttgactatggaccagacgtcgcatatatccgagtggtcggattatgtaatttgaaaaagtctttgtttttggttgttgttgttgtttatggcttttcattgttctctcggcttcttctgttattgaagctggtgaagtatatgatatgcgatgatgctgtttccataatcagatcatttgtctctccataagataacactgattaagatgggattggaaagtaaactcggaaactctgaactctgtttagtggagtttcctgtggttggtttctgattagcagagacttaagatatgtttagtatgtaagtgcttatttggttaaaccatgatttctgtatcaagattgttgggaagaaactgaagattcatcatt

SEQ ID NO: 1160 - DNA, 1694 bp, Arabidopsis thaliana
  Clone ID: ARATH-23APR03-CLUSTER7611_1
ggaagatgatgaaacctgagtttctgagacagaaggaagagcttttaacatcccttctgtttatggtcggattccaactccggacttcttggctttaaccctttacgtccgatcttgtcgctgaaatctttctttctccttttacatggttttcacgacgacaaaagtttgcctttttctagttgctgccttgacttcagatagcatcacaaggttcggcttcagataacatcacaagttgaggaaaacatgaattcgacatcgacacattttgtgccaccgagaagagttggtatatacgaacctgtccatcaattcggtatgtggggggagagtttcaaaagcaatattagcaatgggactatgaacacaccaaaccacataataataccgaataatcagaaactagacaacaacgtgtcagaggatacttcccatggaacagcaggaactcctcacatgttcgatcaagaagcttcaacgtctagacatcccgataagatacaaagacggcttgctcaaaaccgcgaggctgctaggaaaagtcgcttgcgcaagaaggcttatgttcagcaactggaaacaagcaggttgaagctaattcaattagagcaagaactcgatcgtgctagacaacagggattctatgtaggaaacggaatagatactaattctctcggtttttcggaaaccatgaatccagggattgctgcatttgaaatggaatatggacattgggttgaagaacagaacagacagatatgtgaactaagaacagttttacacggacacattaacgatatcgagcttcgttcgctagtcgaaaacgccatgaaacattactttgagcttttccggatgaaatcgtctgctgccaaagccgatgtcttcttcgtcatgtcagggatgtggagaacttcagcagaacgattcttcttatggattggcggatttcgaccctccgatcttctcaaggttcttttgccacattttgatgtcttgacggatcaacaacttctagatgtatgcaatctaaaacaatcgtgtcagcaagcagaagacgcgttgactcaaggtatggagaagctgcaacacacccttgcggactgcgttgcagcgggacaactcggtgaaggaagttacattcctcaggtgaattctgctatggatagattagaagctttggtcagtttcgtaaatcaggctgatcacttgagacatgaaacattgcaacaaatgtatcggatattgacaacgcgacaagcggctcgaggattattagctcttggtgagtattttcaacggcttagagccttgagctcaagttgggcaactcgacatcgtgaaccaacgtaggtttgagttattttgtaacaaccaaatgaagaaaatggaaagacctcaaaaaatgaagaatgagtgcatctgaaaacagaggactactctgaataaatagaggggttgctgctgatatttatttttactctgcggcggaattagaaaatttgaaaaacatcatgtattgataagttgtaaatatcagaaaaaggtgggggtgcaaaaatttgtactttttagcttttgaaagaggcaagtttttcgaatgtttgtttgatttgtaaacaatttcagaattatataaacttggttccaaaaaaaaaaaaaaaagggcggccgcaaaaaagggcggccgc

SEQ ID NO: 1161 - DNA, 2057 bp, Arabidopsis thaliana
  Clone ID: ARATH-23APR03-CLUSTER7627_1
aaactccaacagcatcatcatcatcatcatccttcaaattatttttcctattttgaaaaatttatttgaaatctcataatttacgttaatggagattgctccatctacaagtagattcaagctctacgatcaattcgagcttctggagtttcctgacaagtacgtcgtcaaacccatcgaatcgcctgaggaaggcttctccgtcaatcggcgcgatggcaatatcaaacctcttgatgaaaacgcatcttctgggagtcctactagagtctctactatctatggcgtaggaggaactattaggctcttagcaggaacatacttgctagttataacgtctcgggaggaagttggaaattttctcggtttaccgatttttagagttacggctatgaaattcttaccttgcaatgaggctttgaggtttgctactgctcaagaaaaaaaggacgaaacatattttaggactctgttacaagcacttgagacaacccctggattgtatttttcgtatgaaacagatctaacattgaatcttcaaagaaggtgcaagctagctgaaggttggaatcgtaagcctatgtggaagcaggctgaccctcgatatgtttggaactggcatcttttggaggacttaattgaatgcaaactggatggttttattattcctatacttcaaggaagttaccaagttgctgagctaaagctcaagaattctcctgctgtggtatcgataatgtccaggcgctgtacacgacgtctaggtacacgtatgtggagaagaggagccaatcttgaaggggacgctgctaattttgtcgaatctgaacaaatagtggagattaatggtttcaagttctcattattgcaggttcgaggttcaatcccacttctttgggagcagatcgttgatttgagttataagccacggcttaagataaataagcatgaagagacgccaaaagttgtacagcgccatttccatgatctttgccaaagatatggagaaattatggcagttgacctaacagatcagcatggagatgaaggtgcattaagcaaagcatatgccaccgagatggagaagcttcctgatgtgagatatgtctcctttgacttccatcaagtctgtggaactacaaacttcgacaacctgggggtactgtatgagcagattggggatgaatttgaaaagcaaggatatttccttgtagacgcagacgagaacatcctagaagagcagaaaggagttatcagatctaactgcatcgactgtcttgaccgcacaaatgttacccagagtttcatgggccaaaaaagtctgaatctacaacttcaaaggatcggagtgtgcgattccacagagtgtatatccacgttcgaagatgattacacaaagttcagaacaatttgggctgagcaaggggacgaggttagtttgcaatatgccgggacatatgctcttaagggcgacctcgtaaggtacgggaaacagactatgactggagctatcaaagatggcctcagtgcaatgtcgagatattatctgaataatttccaagatggtgtaaggcaggatgctttggacctcataagtggtcgctacacagtgggcacacacagcccttcacaactccagcccattggatcacaaccgtcttttctgccggtagcatcagcattgttgataggtggtgtaacagtgacatctttcacaattcatcaagcgggaagaaacacgcagcagtatctggcgtcggctttgtgggctggagtgactgcaggagttgtggcgatgatcaaagccaatggaaggcacttgacttcaaggcctcgtctttgccatctaatttgattccatttgaattgagattatttgcgtctcacattcttcccaaaacccacacccactgtccctctttgctttctcgttcaacgtccgcacaaaccaaaaatcgaactaaaagtctatattactgaacttctttattcaatgcaatcagttttataacccaaaataatataagaagatttcttccataaaaaaaaaaaaaaaa

SEQ ID NO: 1162 - DNA, 1824 bp, Arabidopsis thaliana
  Clone ID: ARATH-23APR03-CLUSTER7659_1
aaaaaaattaatcttcttcgacactccaaaaattcaagacctttcagagacaaaaacgtgaaacaacacaacttcgatgaaagccgccgttttccgtaacgaagacggagacgaggaggaggaagaagaagaagaagaagaagtctgtaatgttttcgacggcggcgaggtagagtctaagagaaacaacgaaaccaaaaacctcaaaggatttttcacttctttgcttttgatggaggagcacgagaagcaagaccaggaagctcgtaacgctgcttctcgccgtgaaatgtctgattttcaatctaattaccggaaaagagctagaactatgtccgattactactccgatctcaacgattactacgctgatgctgaggaaagtggagatatcaatctgaagaagtcacgcgtctcacgcgccgtcgcttccgttgctgttgctgctgcttcggagattgaggcggagagcagtgagataaccggatccggatcggttcgtggtaccggttcgggtcagcaaagacggttatgggttaaagatcggagcagagcttggtgggaagagtgtagccgattggattatccagaagaagatttcaaaaaagcgtttcgaatgtctaaatcaacgtttgagttaatctgcgatgagcttaattcagcggttgctaaagaagacaccgcgttaagaaacgcgattccagtgcgtcagcgagtcgcggtttgtatatggagattagccaccggtgagccacttcgtcttgtctccaagaagtttggtttaggaatctcaacttgtcacaagcttgttcttgaggtatgtaaagctattaaggacgttttaatgcctaagtatcttcaatggccagatgatgaatctcttagaaacattagagaacgtttcgaatcggtttcgggtattccaaacgttgttggctctatgtatactactcacattccgattatagctcctaagattagtgtagcctcttatttcaataagaggcatactgagaggaaccagaagacgtcgtattcgattacaattcaagccgttgtgaacccgaaaggtgtttttactgacttgtgcatcggatggcccgggtcaatgccggatgataaggtgttagagaagtcattgttgtatcaaagagctaacaatggaggtttgttgaaggggatgtgggttgctggtggaccgggtcatccgttgttggactgggttttggttccgtatacgcaacagaacttgacgtggacgcagcatgcgtttaatgagaagatgagcgaagtgcagggagtggctaaggaagcgtttgggaggttgaaagggcggtgggcgtgtctgcagaaacggactgaagtgaagctgcaggatttgcctaccgttttgggtgcttgttgtgtgcttcacaacatatgtgaaatgagagaggagaagatggagccagagctgatggttgaagtgattgatgatgaggttttgcctgaaaacgtattgagatcggttaatgcgatgaaggctagagatactatctcacataatctattgcatcacggcctcgcgggtacttctttcctataaaggataatggaaatgttcttttaatttccttctatatgataaactaaacttactttgattctttggtttatgcataatgtattattgtacctttagatcacagatgttatatgaggcaatagaagaaaattaaattatatacacatactatacatttatttccaaaaaaaaaaaaaaaaaaagagacatgaatgtataataagctcaatgagattttcattcgaaaaaaaaaaaaaaaa

SEQ ID NO: 1163 - DNA, 1509 bp, Arabidopsis thaliana
  Clone ID: ARATH-23APR03-CLUSTER7676_1
gatccgccggaaaattcgtaaatttgacccttcgtcttcggaaatggcggctatttctccggcgaatgcaaccaccgctgcttcactctccctgcctcaatttagctcaacttcttcctcgttatcttcttcttcgtctccatcgtttcttaatttcaaaactgcttcagtcagtaatcgctgcgtcaagtgcggagtcagaagcttagagaaccactctggtcaccggagcctcgatttcttatccaatggggatccgatcagcctaattaatccgaattcatcgtctcctataaccatggccgcggcgacgtcggaatccggttcgaagagctctaagcgcgtctgtctcttccacagcgacgagactagagatctcgccgagagaatcgtcgcaaaatctgattgcattgagctacgaagcatcaattggaagaaatttgatgatggattccctaatttgttcatacaaaatgctcaaggcattcgtgggcagcatgttgctttcttggcttcattcagttcacctgctgtgatcttcgagcagctttcggttatttatgctctgcctaagctttttgtttcttcgtttacacttgttcttccattctttcctactggaacttctgagagaatggaagacgaaggagatgtggccactgcttttactctcgctaggatactctctaatattccgacttcgagaggaggaccgactagcctagtgaccttcgatatacatgccttgcaggaaagattctactttggtgatactatacttccatgctttgaaagtggtataccattgctcaagagcagactccagagtctacctgattctgataacatatctattgcattcccagatgatggagcatggaagcgtttccacaagcaactccaacattatccaacgattgtttgcaacaaagtaagaatgggagacaaacgaatagtgcgtatcaaagagggagacgctgaaggaaggcacgtcgtgattgttgatgatttggttcagtcgggtggcacattaatcgaatgccagaaagtcttagctgcacatggagcagcgaagataagcgcatatgtaacacacgggatcttccccaggagttcatggaaacgtttcaagcttgacaccaaaggtgatcccgcggaaggtctgagctatttctggatcacagactcgtgtgggatgactgtgaaagaggtgatgaataaacctccttttgaagttcttagcctggctggctccatagcttctgctcttcaagtttaagcttatgtgattcgagaagaaatccagccgcaagtaatttttgggtttgaacaaatctgatttataaactttggtgtatagttctcgatcaaagcattttccacggaagaggttatttgttgttaatgttctgtaggaaaatccaataatgtaataatgtttcttctgtcaaagagagaaaaaaaaaacaatgtttcatttcacttcttttatacttgttgatagacagg

SEQ ID NO: 1164 - DNA, 1824 bp, Arabidopsis thaliana
  unsure (1)..(1824): unsure at all n locations
  Clone ID: ARATH-23APR03-CLUSTER7682_1
caaataaaaacaactttataatataaacaacaaatatcgttcaggaaaatcaaatgaaatgtggtaggtgaaggatttgacggaactacccttcaagacacgtcaagactttctttcttttacaacattccactatataaacacttccttctccaccatcatctctcagcttgcaagttctctctgaaccatagaactccaagcttgaactgtactctactcgtcgtttatatcttactcttttgtttcctcttaccagaaaaaataaataaacagcaattttttcatttttcgactcaaatcatgcaaaccatttcgcctgcgttctcgtgcgatctcaaatccgtaattcaaccgaatctaacggctaagaaagcgcgttactctcacgtaaatggaaagcgcgtgtctgttcgttgcagttacaggtctgagtcgtttagcttccctaacggtgttggctcaagccgagccgattggcaaagctcatgcgccatcttagccagtaaagtagtttcggctgagaattcaagctccgtcgccgtcgttaacggacacagtaacggctccgttgatttaagccttgttccgtcaaagtcgcagcacaacggaaagcctggattgattcagccgttaacgataacagatctatctcccgcgccgtctcatggatctactcttcgtgtcgcgtatcaaggagttccgggagcgtactccgaagcggccgccggaaaagcttacccaaactccgaagctattccttgtgatcaattcgacgttgcgtttcaggcggtggagctttggatcgccgatcgtgctgttctcccagttgagaactctctcggtggttcgattcatagaaattacgatcttctcctccgtcaccgtctccacatcgtcggagaagttcagatcccggttcaccactgtctcttagctcttcccggagttcgtacggattgcatcacgcgagtgatttcgcatcctcaagctctggctcagacggaaggatcgctcaacaaactcactccaaaagcagcgattgaagcgtttcacgacacagccgcggcggcggaatacatcgctgctaacaacctccacgacacggcggcggtagcgagcgcaagagcagctgagctctacggacttcagattctcgccgacgggatccaagacgacgcaggaaacgtcacgcgcttccttatgttggcgcgtgatccgatcattccccgtaccgatcgtccgtttaaaacgagtatcgttttcgcagctcaagaacataaaggaactagcgttttattcaaagtgctttccgcgtttgcgtttcgaaacattagtttgacgaaaatcgaatcgcggccgcatcagaattgtcccgttagagtcgtaggcgacgaaaacgttggaacatcgaagcactttgagtacacattctacgtcgacttcgaagcgtcgatggcggaggcgcgtgcacaaaacgcgttagcggaggtgcaagagtacacgtcattcctcagggtgctgggaagttacccaatggatatgacgccatggtccacgttacctagcgaagacgtatgacacaattaaaaaatttatctgaattttaaataacattatggtaaaattatcataagtaaaatacatggaaactaaagtagaatttgtagaactcgttttgcatgtgaagtgggaggataatattattttatttctcttaaaccaaatattttgtgtgtatgtatttgctactattggaacaagaccggtttgtagtttggttctgatgattacaattgaagatatttcttaagctaagngcng

SEQ ID NO: 1165 - DNA, 2850 bp, Arabidopsis thaliana
  Clone ID: ARATH-23APR03-CLUSTER7684_1
gatctccaaaccaaaacacaattaagctaaaaaaaaaaccaaaggatgtctcagaaactcatgttcttgttcacccttgcctgcctctcctcgttaccatctccttttatctccgcccaaataccggccattggaaatgccacttcaccgtcaaatatatgtagattcgcgccggatccatcttattgtagatcggttcttccaaaccagcccggagatatatattcctacggacgtttgtctctacgaagatccctctccagcccgccggttcatttcgatgatcgacgctgaacttgaccggaaaggcaaagtggctgctaaatccacagtaggggctctcgaagactgcaaattcctagccagcctgactatggactacctccttagtagctcacagacggctgattccaccaaaacactgtcgttatctagggccgaggatgttcatacatttctgagtgctgccatcaccaatgagcagacttgtcttgaaggacttaaatcaacggcgtccgaaaatggtctttccggtgatcttttcaacgatacaaaactctatggggtgtctcttgcccttttctccaaaggttgggtgccaagaaggcaaagatcgagaccgatttggcaaccacaagccaggttcaaaaagttttttggtttccgtaacggtaaattaccgttaaagatgacggaaagggcacgtgccgtttacaacaccgtgactagaagaaagcttctccaatcggatgcagacgccgttcaggtgagcgacattgtgacggtgatccagaacgggacgggaaacttcacgaccataaacgccgccattgcagctgcaccaaataaaactgacggtagtaacggttacttcttgatctacgtaacggcgggattgtacgaggaatacgtggaagttcccaagaacaagagatatgtgatgatgatcggtgacggcatcaaccagaccgttatcaccggaaacaggagtgtcgttgatggatggacaactttcaattcagccacatttattctatcaggtcccaactttattggtgtaaacataacaatccgcaatacggcaggaccaaccaaaggccaagctgtggcattgaggagtggtggggacttgtctgttttctacagttgtagttttgaagcctatcaagacacgttatacacacattctctcagacagttttatcgtgaatgtgatgtctatggtactgttgattttatatttggtaacgctgcagtggtattacaaaactgtaatttgtatccacgtcaacctcgcaaaggtcaatcgaacgaggttacggctcaaggtcgtactgatccgaaccaaaacactgggacggcaattcatggttgtactataagaccggcagatgatttggctacgagcaactatacagtgaagacttatcttggtcgaccatggaaggaatattctagaaccgttgtcatgcaaacttacatagacgggtttctagaaccgagtggttggaatgcatggtctggtgattttgcattgagcacactttactacgcggaatataataataccggacctggttctgacacgacaaaccgagtcacttggcctggttatcacgtcatcaacgcaactgatgcttccaatttcacggtcaccaatttccttgttggtgaaggttggattggacaaaccggagtgcctttcgtgggtggactgatcgcataatcaaccaaccttatactatatatgatatgttaattagttaaattatttaatcattcatgtgttgtttttttaatcaaataattatttagtggtgcctgattcaatacgatttgtaataactttaacttactattgtacaaccgaatggttttcttcgaaatctaataataatgaacgggtaatcaaattaatgtgattagactaattagaagtagacgctcaggctcagtggtccccaggagtaacggccacgtgtgctgatataaattccacgtgtcaaagttcatgcgttttttgaaaaaaatagaaacccatttacccgcccgcaatcagatgctccatagcctttttaaagacaaaacccgactacccggaaactttgatccgttttcgatgggtagacccggatttgagccttcaaattcaacttctctggaaatatccacaatgataccggcgaggtcaatcggttctctctcgcaaccctccgtcggaaatgtcaacggcgaagaagaagaagaagaaccggtttcaatgacctgaaacgggggttgaaccggagctctgcaaagcgggcaagtggatctggaacggaaccaagtatcgatgcagtcgacgtgaaaagagtggccacatttaggaagaagacggccttcgtcttcttcctcgaactccgacaagcagacagagcactcctccttctcttctggtggtggtggattcttggaggagtaaacgaagatcggaatcttgtcgagaacagcctggtcgagagcttggtctcggggtgaggcggagagagtgcggaggtgagaacgaatacggcggcgaatgcgacggttgtgacgacggaataaccaacgggcgtagctgtggaagcagaggatcataataacggcgacgaatagaacgatcacggaggagagcatgattttgccgttgagagcgtagcctgaagacgtgtggctcacgctcccccaaataggctttgtgctttcttcaccgattcccataatactaaagagtgacggatatcttttagaaccaagaaagagaaacagagagcctaatcaaaatcggacgcgtgggagaagaagacagtggacaagttctttaataaaagt

SEQ ID NO: 1166 - DNA, 2433 bp, Arabidopsis thaliana
  unsure (1)..(2433): unsure at all n locations
  Clone ID: ARATH-23APR03-CLUSTER7690_1
tgcttcttcttctgcttcgcgaaaacttggaaactgttttaggggcgggggccgggggctttgatttggaaaaaaccctaggggtcggcagcccgggatccccgaccatttctccccaaaccctctttccttgtccccccgcgggtagggggggggatcggggggcgtcgtcggtaccctgagggcgtctcctccccccggccggccaccaccttccccgaaacctcaatcacacccaccatcaaaagggggcccccttttaccccccccccccccccccggatcatttcctgaaaactagaaaacacagtttaaaggaacataaaaagcaactcttttgagagatcagagaaaccctaatttgctaagaaccctaatctcaatttccatcttccaaagttcagattctgtatgtaaatgcatctgaagaattctactgtagcagaacggcggtacatcggaaaagaaaccgccggttatttaacttcttcctccgatttggatccgaaacctaagattaaacatcatcgtcctcttcaggtacctgagattctgactccagacattggtgctggtgctggattcagtgtgtataacaatcaagttcaagctcagagtcgtcatcatctgacggttgaaatcccagattcatcgtctcacaatcttacatctaagagacctgtggtggttcaatcttctaatccgttcaacgttgacgatttccgaagacagcaacgcacaagcttgggttcgatttcatcttattgtccgtcgtatctcttatcgtttttttcttcttctcttccatcgatcccatcggcgactaatcagaagcttcttcgtcatgttcttagagtccgtttgatatgtttccatcttcgtttcttacttcttctctctgttcctcctctctacatcttcttcttgttgattagtttcagattcttccttctctttgtcttctcgattatcgctttttctttcgtcctttcgatctctctcaaattcgctcttcctcacttaccatcgattcgtttgattatcgctcggttactttctctcaagcttacccctaccagatcatcctcttcatctcaggagaacactaaacatgttatttggtcaattgggtctaagcctgtgactgagaagaagaccaactctggctcatgggttcagaagtacagctctggtgatgtatacgagggagagtttcatagggggaagtgttcaggaagtggagtttattactattctatgaagggtaaatacgaaggggattggattgatgggaagtatgatggatatggagttgaaacttgggctaaagggagtaggtaccgaggtcaatacaggcaagggatgagacatggaactggtatctacagattttatacaggggatgtatatgctggtgagtggtctaatggacagagccatggctgtggtgtgtatacctctgaggatggtagtcgttttgttggagagtttaaatggggtgtcaaacatggccttggtcattatcatttcagaaatggtgatacatatgctggggagtattttgcagacaggatgcatggttttggagtgtatcaatttggaaacgggcatcggtatgaaggagcctggcatgaggggagaaggcaaggacttggtatgtacacgttcaggaatggtgagacacaggcaggccattgggaagacggagttcttaactgtcctaccgagcagaccactcgccctgattcatcgttttccatcagtcattccaaggttgtcgacactgtccagcaagcaaggaaagcagccaagaaagcacgcgaagttgtgaaagttgaagagagagtgaacagagcagtgatggtcgcaaaccgagcagcaaatgctgctagagttgctgctacaaaggctgtccaaacccaaacatttcattgtagtagtggtgacgatcccttgtgagttcctgcggcaaagattttgacataatcgcagtcatgaccttacctcgaacttctacgaagacagaagagtgaaagagagatgtttagagaacagcgtcagaattcgcaatctccgttgagattttcttgaaggtgaaccacttggaaccaatgtcgagatctcataagtaataagtaagagatctggctatggagcaagtattacaggtttactttttcttttctcccacttgttttatgagcaggctggtttaaaactgtacatatgttgttgaagagtaagcaatgtgtgttaacaaaagatctttgtaacaagcgtaacccatgtaagagaagtaacaaaacattgttttacttttacaacgtgttgaaaataacaccttttttttaccagaaaaaaaaaaaaaaaacccctcgggggggggcccggtgcccgcgggtgggaggggggagggangaggagggggggggg

SEQ ID NO: 1167 - DNA, 1460 bp, Arabidopsis thaliana
  Clone ID: ARATH-23APR03-CLUSTER7700_1
atttgtgattgaccaaaccggtaaaatcagtacttccgataaacccacaacatgggcgaaagagaaggcatgagaagaagaagcttttaatggcgggagtgattagggctaagcagctgtttctatgctcgtcgattctctcgagcaacaacaataaggttctatcacgccttcctcggcgtagtatcaatgtaattgcgggaaatctcaattcgagcgagactaagaagaaggagaaagagaagaggaagaggaggaaagagattgaggtggaaaaagctactgcggaagcagtggtcaataaggaaaagagaaggacacggtcgagcagagggtatgaactcgccgacggtgacgaagttccgtcctcacatgtgcctgtgatgctcggagaggttcttgacattttctcttccgttcgcttgcgaagtttcgttgattgtactcttggcgcagctggtcactcttcttctatcattcaaagccactctgaattgaagaattttgttggaatggatgttgatcctgtggcaaggaaactgggacactttcatattgattcgctcatgcatccaactttgaaggcttctatagtgttgaagaacttcaaatacatcaaatctgtgattgctgatacgcaaccggagttgttagatgtaggtgttgatggtattcttatggacctgggaatgtcatctatgcaggtaaacaatcctgaaagagggtttagtgttcttcaagagggacctcttgatatgcgtatggatcctcaggcgactctaacagcagaagatatagtgaattcgtggccagaatctgaactgggaagagttctacgggattatggcgaagaaagcaattggtatttacttcaaaatagaattgttaaggctcgacttaatggcgggttacattctactggtgaactggtggatctcattcggggtacgtcaccagcaagcagaggaggcagacaaggctggataaagacagcaacacgtgtgtttcaaggcctaaggattgcagtgaacgacgaactcaagacactacaaaactcactctactcatcattcgatgttctcgctccaggtgggagactagcagttatctcctttcacagtctggaggatcgggttgtaaaacaaacgttcctcgacatcttagggtttcaaagagaagagatcaacggagagggaagtagtgtaaaaccggaaaggcaaatcgaagaaagagtagagaaggaattaaaagagaaagaagagtggatcaaacagacagtaatagcgtcgaaaggagtaatactgacaaagagaccaataacaccttcagaggaagaggaaagactgaatcgcagagcaagaagtgctaagttaagagtgattcagaagttgtgattactttatgaaatgtttttttagttgacaatcaaaatttcaaagctctaagctaagctttcattc

SEQ ID NO: 1168 - DNA, 1154 bp, Arabidopsis thaliana
  unsure (1)..(1154): unsure at all n locations
  Clone ID: ARATH-23APR03-CLUSTER7720_1
atttgaagntttgaacaaccttatcctcgtcctcttctcttcctcatcatcagagatcagccatggcttcttcgactctcttcaaactcaattcacagacattcaaagctctaaacccatctcctccttcgttatctcctcccaattccagaattttccatcttcatttctccaaatcactctcacaacagcattcaaagctcaaccacaaatcaaccactactcgtttattcgctcctctctgttcctctcttccttcaccttcttcttcttctcctcccctttccaaagaagaagccattaatcaagccaaaacttgtctcctttcatgtctcatcaaacccttaaacaacccaaaactcgcttccccaaaactcaggaagctcaaacaaccaagattccgtcttgaaatcccaatccttgacgatgattctccttcgtcactctctcagctcgctttctcgatctttcatgacttacccatctcgagaagaggctctaatgtcaagcttctcttcctctggcctaacccttcattcatcgatcccgccgttaaagctttccggtcagactctatccaccacattgccatgtctccggtctcagactctcttaaaacagctctgagatctgctgacgtggcgatcttcatggctccggagaaatcgcagctggaggatgttaagaccgcgagtgaagctttttctacaaaacctgtagtaatgatcaatccgagatggttgtttgaagaagagaaaagctttggagatggctttattggttcctttgaagtgatttatgcgttcactggcttagaagtgagaggagtgtttagtaagagaaaaggagtgatctttaagtgtgtaagagacggtgttgtgagtggagaaagatggaatgttctcgttgaagaagaagaaggtaatggtactttgaaagttgtttcacaattcaattctcgaccatcaatcgaagaagttgagcttgttctgtataacttgatggctatgaattctcctattaccaaatcagctaagtttcttagtgatttggtttcaaatatcactgggaagaagtagtttgttaggacttcaatgtgtattgattgtggattcaattcaaaataataagattttaatacttgtttttgaacc

SEQ ID NO: 1169 - DNA, 1354 bp, Arabidopsis thaliana
  Clone ID: ARATH-23APR03-CLUSTER7724_1
actggaaatttcattaacagatggtgccagatcagcctttgggaagcgtttcagatctgcaggaaaaaggttccagggcatgggacaatatgccaaagattgcgaaaagatgatcacttcgactctactacattcattgtctaaaagatctttcggttgttcacgaattgtttctgagtttgcccaaacacaaacgaattgaggaaaactgaaagatggcttcttgttcttcttcttctattagtctcctccaacctcttcatagtctctcttcttccactcttttcttttctcagccaagttttcatttttcgtcctctctaaaacctaataagtccaaaaggcacaatctttcgaaatccttgactctccgatttgctcttacggaatcagattctactaaacctctagaaatagaagaaccaagttccaaatcccttcttctacaactctctaagtgttttgatcttccatcagattacttccagcagctaccaaatgatcttcgtctcgatttgaatgatgcggcttttgatctctccaatggacctgtcatcgatgagtgtggtcaagagcttggggagaccttactgaatctgtctcgtgcttgggaacaagctgacacatcaacttctcgtagtttagtggagaaacttcccgaactggaaattttattaacagatggtgccagatcagcctttgggaagcgtttgatatctgcaggaaaaaggttccagggcatgggacaatatgccaaaggtgaattacagaagattgcgaaagcgatgatcacaactggaggggtcttatctgcaaaaacatcatctgtttcagtcagcaatgaatctaagtcaggaacaaggatgtttaagtttggggagcttcaagttgctgtgactccagagaaagcctacaccggagctgccattgcgttcatctacgggatactttcatggcaaatcagtcaagggatccaaagcataccagagaactcattgcagtatgcaaatgacaatgcattgctaatcggaaagtctctaagagggtctcttctagctctgttttatgcgtcaaccgtcttgtcaggcttcacaacagctgggcttatcctactcgctaagcagctttcatcagaaaaagagtgaattcataatccttcaggggtggtctctattactctcatgtacagtgccaaatattcaaatttacaatagtaaatttttctactttctctgtctatgcgttaaactatggaatgtgttgagtgtatattcttatagagaaaacgaaatatctttgttatgaataattgaagtttgccaagcaatgagagtgtttgatgtttgatgtttct

SEQ ID NO: 1170 - DNA, 2929 bp, Arabidopsis thaliana
  unsure (1)..(2929): unsure at all n locations
  Clone ID: ARATH-23APR03-CLUSTER7746_1
caaatcacatattttgtgaaatcccaaagaaagtttttgctttcaccggccagtcatgggaaactatcggtggccgtcaaagctatcaaagttatcactcagagcaaaacaaacgaatctgtaccgcgtcattctaatcgcgatcctctgcgtcaccttttacttcgtcggagtatggcaacactccggcagaggaatctcacgctcttccatttctaaccacgagctcacgtccgtgccctgcacgtttcctcaccaaaccacaccgattctcaacttcgcctcccgtcacacagcccctgaccttcctccgacgataacggacgcgcgtgttgttcaaatcccgtcgtgcggcgttgaattctcggagtacacgccctgcgagttcgtgaatcggtctttgaatttcccaagagagaggcttatatacagagagagacactgtccggaaaaacacgagatagtcaggtgtcggattccagcgccgtacggttacagtttaccttttcggtggccggagagccgtgacgtggcgtggtttgctaacgtgccgcatacggaactaacggtggagaagaagaatcagaactgggtaaggtatgagaaggataggtttttatttcctggtggtggtacgatgtttccacgtggagctgatgcttacatcgacgagatcggacggttgataaatctcaaagatggatcaattcggacagccattgatactggatgtggggtagcgagctttggggcgtatctaatgtcgaggaacatagtaacgatgtcgtttgcaccaagagacacacacgaagctcaggttcagttcgcacttgagagaggagtccctgccatcataggagtgttagcctctattaggctcccatttccggccagagccttcgacattgctcattgctctcgatgtctcattccttggggccaatacaacgggacgtatctcatagaagtggatagggtactgagaccgggggggtattggattttgtcgggaccgccgattaactggcagagacactggaagggttgggaaagaactagagacgatctcaactcggagcagtctcagatcgagagggtggctaggagcttgtgttggaggaaattggtgcagagagaggatcttgcggtttggcagaaacctaccaaccatgttcactgtaagcgcaatcggatagctttaggacgccctccgttctgccaccggacactacccaaccagggctggtacactaagcttgaaacctgtttgacgccgttgccggaagtaacaggatctgagatcaaagaagtagcgggtggacagttggcgagatggcctgagagattgaatgctcttcctccgaggatcaaaagtggaagcttggaagggatcactgaggatgaatttgtcagcaacacagagaaatggcagagaagagtgtcttactacaagaaatatgaccaacagctagcggagacgggaagatacagaaactttctcgacatgaacgctcatcttggaggtttcgcctcagccttagtcgatgatcctgtatgggtcatgaatgttgtccccgtggaggccagtgttaacacccttggagttatctatgagcgaggattgattggaacgtatcaaaactggtgtgaagcaatgtcaacttacccaaggacatacgatttcatccatgccgattcggtgttcagtctgtacaaagacagatgtgacatggaagatatcttgctagaaatggacaggattctaagaccaaagggaagcgtgatcatcagagacgacattgatgtgctaaccaaagtgaagaagattacagatgcgatgcaatgggaagggaggataggagatcatgaaaacggacctcttgaaagagagaagattttgtttcttgtgaaggagtactggaccgcacctgcgcctgatcagtcatcagatccttgatcaagcttggaataattcataaaatttgtagctccattcttttttcttcaaatgttttgtacacactaatcgactttgggggaaagaagaaacaaacacccgctaaattgtttcaaaccggagattcattgcgactttgtgagaaaatgaactagagagtttactacaaagtgtgtccactatgcagttagctacgaaagcgcttacagacttacagtacactgaacttcaactttctgctatcatcatctcaggttatattgctacaccagcagttccagaaacaacgcttcttgtttgttggtgaggctgagttcctcaaaggttaaggcaccgtcttgaatgctgaaagcacgtcgaggatatggtctaaccactctatatgtgccaggtttgactaatccagcagcatctatgaagtcaaaaaggtacttaagcttgtctgatttgagaaagcgacgaccatgacggctgctatctggcattctaacaagtagagtgatggcatcttcattttcaccagacggctcaatgggaagcgctgcctttctctcaggttcctctctaacaaccctctgattcggagattgtgactccttgtgaattccaagttgattattatgtgaagcactttcgttagctactccaccaaagattgctttttccagcattattgcctcttgtagctcttttgacggaatgccaccccactctttcagataagaaccttcactattctggagatcatgtctgtgctgagagctgaaatatttggctgcttttggtcatgtcttcacggttgcctgcactgaagagctaccaggctgatatctagnactttcatttgtattagactgacatgggtcatgatgctccacggactgaggcataaattcagttagtggccctcgcaacacctctcatgctcttccatctctaaggactccaaattggcacgggcatgctctcctt

SEQ ID NO: 1171 - DNA, 3363 bp, Arabidopsis thaliana
  Clone ID: ARATH-23APR03-CLUSTER7752_1
tctctccgccccccccccccccttcttcttcaatggtcacgaatcttctgcgaatgtgtactgaatctctcgtttcagctaaagattcagattcattatgttatctcttcgaaacctcactactagcttcgtcgctcttccatctcgatctaagccgtcgtcgtcgccgtctttgcgtcgtcggttagttcgttgtcgacttacggaggcggcaactttttcacctattgatgtagtttctggagaatcggaaagagcggttggtagcttaactgagcttaaaaacggcggtggctggaaggtggaagatgagcttccctcggcggaagatggaggtgaaggaggagtagaagatgacgattcggaggaggaggaggggatttcgagtattcatgttcctcgtgagaaatacatcaatgtctccaagtctgatctcgttaatggtattgtaacgaagcttctcgattctcaagacggaggagacgctgatatcttcctcctcctttcctcgtgcttagactctatccttcacgcggagcataagaggattttagagcagatgagagccgatttcgtcgctactcagtccctagaggaggtaaagactggtggtgattcatcgggtgatgaagaaagttcaacttcagatggagaaattgactcagaggaggaacttaagaactctgaacctaggagtgttaatggatacgaaggtttatcattccctttggctgatggtttcgacatttggaactttttaatttcctctggcaaacatgcaaagaaacgttccgctgaaagtgtaatggctgcaacccggttccagcgttctttcattcagctcctagacaatgccggttttgaagagctttcagctagggatttggcattgacctcggctcttaacacggattaccttcttactttgcctgtatatgttgattggaagaaggcgtcagagtccaatgctattgttttcaggcgtggatttgcaactgagaaggagaagggtttgttacttgtggagaagctagactatatccagtctaaagttctacaagtaatcttctctactattgcaaaacccttgagaaaagttggaaaattgataaacaaggcgttaagtgaggcttctcaaactcaagaaattcaagatttatcagagggaatgaaagtttggctcaaggacctatccctttttaaggaatcatatcttgaccaaacttctgataatttcttgaaagatggcttccttccagattctgtcctccccatgcagttagcagcacaaagggcggtcagtcgatatgaggggcttctgacacctgttggtcctcgcgcaaagctcttcagaaagttgcttggatggattggtttcatttctcgtgattatgaaacaccatctcagctagctaatgatagtagttcatctgaaccttatttaaggccgattttcttatcaaggatgacactggctgatatatggaaacctgcttcaaagaaagcttgtggaaatgatatctggaaaagaataaaaacttcaatttccattcttttatcaccttcaactctgcaggagcctgcgtttgaagagctaattttgctttacacgaaggatgcgagtgaaaaagatgataagaataaagatgaaacacgatcatcattacaattggagatatttgaaagaattccaattccagatttacctgtaattttccctcacaagaagctttactttcgcatcatagatacagtacgtctggatattgctagtattctgggacttacggcatactttgtaaactacaagtttgagaacatctcatcatccccatcagcattctttcttgacgtgatcgccgtcacagctctggtaatatatgcaacacgagtggttttgggttacaagcagacatgggatagatatcaattgctagtaaacaagacactttatgagaaaaccttagccagtggctttggctctgtccatttcctattggatgcctcggagcagcaacagtacaaggaggcaatattgacatatgcaattattctccaagcgggaaaaaatcagaatatgtcttataaaggagttggagatagatgcgagagattcatgtatgacactttcaaaataaaggttgagatgcgagtagaaaaagctataagcacgttggtgagacttggtctagtaacagagacactggtcgatagcaacaccaagttacaggctgttccttgtcctcaggcttatatatctcttaaagaactatggagcagtctgcttggttgaattcagtccgtggttgaatgtagtaacatttttgctatattgtacaagatcttcaataaaacccgaatagattgtacataaacagaatctgctaacataatgttcttcttttttctgtgattatacagtcaaaaacagagttttatagatttgtctgatgctcacagctcgaggggttgagattttgtaaagacaaatactcctcctcctcctacagaccgtcccaaaagcatgttgttatcgagatacgataggtaatacaatccacctacagatctccttcctgggctggttgcgtttactggaatctgagctttgaaagtacggataaactgcaaaagctgtaggcttagaaatgagcgtggaagtattgcaggtgcgataagagcttgaagctgctcattgatgttaatgtttctaacacttatctcttcaaactgaaggtagatgtttcgactagagaccttatcaaatttcgcggtaacaacaagtgttgcaccttcttgctcctccaacaagcttggaagactccactgaacaacattccgaatgatcccaccgtcggatctatctctgcactcaaacttctgaaagacctgccctacctgaaagaagggaagtcttgaagcagcttcaaacagaacaacaacatcaggtgcagatgtatattgtagcctccatgttccatctaacttcactggatcaatttcttcaccgccattaaacccttccacagtcaccagagcctcctcaatgatagatcgttgatcagaagtggcagtgagtcctcgttgagtgtcttgaacagctctcagtagatcgtgtttcttgtgttctaagtcaagttcattgtcgacgacgaccctggccgaagtctctccagaagctacagctactcgacacgagaatctctttctatggttggttttaatgtttaagccaaaagggctgattctacagacgcgggacaatgaaatcgcagggcaagagaaagtcgcagacgcaattcgatccattttcgaaccttcaaagctcaaaagctgctcgaggatggtgacaaactgagaact

SEQ ID NO: 1172 - DNA, 1321 bp, Arabidopsis thaliana
  Clone ID: ARATH-23APR03-CLUSTER7774_1
gaaaacaaaattcaaattcctaactaaacagtaattaaattaaaattaatgaggaagacgaagctgctttgttgatgatcaatggcgatttacagatctctaagaaagctagttgaaatcaatcaccggaaaacaagaccattcttcaccgccgctacagcttccggcggaaccgtttctctgactccaccgcagttttcgccgttgttcccacatttctcacaccgtttatctccgctttcgaaatggttcgttcctcttaatggacctctcttcttatcttctcctccttggaaacttctccagtctgcgacacctttgcactggcgcggaaacggctctgttttgaaaaaagtcgaagctctgaatcttagattggatcgaattagaagcagaactaggtttccgagacagttagggttacagtctgtggtaccaaacatattgacggtggatcgcaacgattccaaggaagaagatggtggaaaattagtcaagagttttgttaatgtgccgaatatgatatcaatggcgagattagtatctggtcctgtgctttggtggatgatctcgaatgagatgtattcttctgctttcttagggttggctgtttctggagctagtgattggttagatggttacgtggctcggaggatgaagattaactctgtggttggctcgtaccttgatcctcttgcagacaaggttcttatcgggtgtgtagcagtagcaatggtgcagaaggatctcttacatcctggactggttggaattgtgttgttacgggatgttgcactcgttggtggtgcagtttacctaagggcactaaacttggactggaagtggaaaacttggagtgacttcttcaatctagatggttcaagtcctcagaaagtagaaccattgtttataagcaaggtgaatacagttttccagttgactctagtcgctggtgcaatacttcaaccagagtttgggaatccagacacccagacatggatcacttatctaagctggttagttgcttcgacgactatggcttcaactgcagcttatggtgtacaatactggaagaagagacctatatctatgattaagagatcatagtttctagtttccaacatttataaacttcacacacgaggcacatgcttaattaaagaagcttgaacatgtcttgttgttttccggaatacgcagctctcactgttttctactgctaactgaaatagaaaaggaaaaaaaatgtactaaaagcaatgaaacatttgttctgatatctgaacaaaagtacatttcttctgaaaaatgagtcggaaaa

SEQ ID NO: 1173 - DNA, 2581 bp, Arabidopsis thaliana
  Clone ID: ARATH-23APR03-CLUSTER77_15
gagtaagtaaacgagcaaaagaagaagagaaacaacaagaagtagtaatggcttcctctatgctctcctccgccgctgtggttacatccccggctcaggccaccatggtcgctccattcaccggcttgaagtcatccgctgcattcccggtcacccgcaagaccaacaaggacatcacttccatcgcaagcaacgggggaagagttagaaggtgtggccaccaattggaaagaagaagtttgagactctatcttacctccctgaccttagtgacgtcgaattggctaaggaagttgactaccttctccgcaacaagtggattccttgtgttgaattcgagttagagcacggatttgtgtaccgtgagcacggaaacactcccggatactacgatggacggtactggacaatgtggaagcttccattgttcggatgcaccgactccgctcaagtgttgaaggaagttgaagaatgcaagaaggagtacccgggcgccttcattaggatcatcggattcgacaacacccgtcaagtccaatgcatcagtttcattgcctacaagcccccaagcttcactgatgcttaaatccttttctggaatattcaatgttgactatccggaacccaattttgtatggtcaatgtaaatttaagtaattattttgccaaagtgaaaaaactgaaggtttgtttttctatcgtttcctctataaaaatctctattcatatcaaaaaaaaaaaaaaaaaaagagctcttggatccgtggtcagatcaaccaccgtgtgttttccgatccgattcgattctttttttgtcagagctctcagataaatactaggattccgtttccaccacagatccttgatttgatttggatttatttcttcttctttctctcttcgagtttgattccacaagataccttgtcctgcattggagaaactaatttaaggtaaggtttgactacttagatggtatgcagcagtttcataaggagtttcattgttcaagctggttgtcgtattggggtgttggctcaaggaagacatcagtttattcatattaagaagactttgagtgtgggttttggatttagaactagtgtgattggatttagaacaaccagtggaattggatttagaactagtgcgaagatgatggttgatacttctgctggagagaaacgtatatccttagttgatatgccgcctgagaaagttgatgatggtggatacatcggtggtgggtggaaaaatgatgatggaagcttgagctgtgggtactgtagtttcagagggaaaagatctacgatggaagatttctatgatatcaaagcttccactattgaaggccaagcagtttgcatgtttggaatatttgatggccatggtggttcacgtgctgctgaatacctgaaggaacacctgtttaacaatctcatgaagcatccacaatttttgacagacaccaagctggcattaaatgaaacatataaacaaactgatgtagcattcctcgagtccgaaaaggatacttacagagatgatggctccacagcatctgctgctgtgttggtggggaaccatttgtatgttgcaaatgttggagactcgaggacaatagtttctaaagctgggaaagcgatcgcgctatctgatgaccataagccaaatagaagcgatgaaagaaagcgaattgaaagtgctggtggtgttatcatgtgggcaggaacatggagagtaggtggggtgttggctatgtcccgggccttaggtaacagaatgctgaagcaattcgttgttgctgaacccgagatacaagatctagagatagatcatgaggccgagttgcttgtgcttgcaagtgacggtttatgggatgtggtaccaaatgaggatgcggtagcccttgctcagagcgaggaagagcccgaagcagctgcccgcaagttaactgacactgccttcagccgtggcagtgcagacaacatcacgtgcattgttgttaaattccgtcatgataagacagaatctcctaaaatcgaaacaaacgccatggctgaatcggaacctgaactgaaccccacaactgaactggaacctgaatcaaaccccagtactgcattggaaactgaatcaatccccaaagctgaactggaatccgaacctgatgctatacctgatccaaaacctgaaaccgaaccagagaccaagggtgagaaagctggtgagtaaggtagcagccggggaaaggtgtccatactgttggggacatgtggaaacagatgaatataaaattgcttagtaagttgtgtggtttgtggctacctgtaacgtgtgaggatttgtgttttttggttttgtgttgcattcatgcacatgcctatgcctgccttgaggacgacgacgacccttttgacatgtccccgatttttgtctattcattttaccctattttgtttttgttggtgctactcacaccaaaaacagcacatttgttctctgtttctcctacttttttctatcttttatttaaaacaccgtccattccaataaacaatgtttttgtaattaaaaaaaa

SEQ ID NO: 1174 - DNA, 1829 bp, Arabidopsis thaliana
  Clone ID: ARATH-23APR03-CLUSTER77_20
cgattgggtaccgggccccccctcgagttttttttttttttttttttgacatctaaagatttaagatttagcaaatgtggcaacaaaatcaattggagagagagcaacagaacacaatgcttgcaaaaaaattgtagctaaatgcaaaagctcaattaagctaaaagacttttgattattctacaaagtaagagtgcgtctgtagagaacttcatcatcactctcatcttcttcctcatcagtcactatctcgccaccaggcatttctaacttcccacccatgtcaaacgttggaccttcagtatctggatcaatgaagttaccttgtaatcgttcctcgaatctttggtcactgcaattgaggaaccagttcaatgaactcctgattcctttgctctgtagtttttggtacctcggtttgattcttgactccaagctataagtaaagtactcagggtactccacgagttctttcatcggtctccccatctcggtcttgtaaaagtagtaactattcttcatgagttccactcgggaacagaggatctgaggacatctcacaaccattttcgcaatgtcctcaacttgaaatgccctgcccaagagaaactcaatgggtttcattatcacattctgcttaagacttacaatctgtggcattttctctaccacacgagcaaatccttcaggatcaatcttgagcttcaagctgaaaaagtactgttgtgtagacatcttggctttcactggtaacccgagaatttgaggatattgagctataagcaaaggtagtagttctttcttgacgccaaaactaatcaagcaatctacgtttggtttaacagtctcctcgagattgtatccaactatatatgaacgtttctctagcatcctagccacaattttctttggcaaaccaatggaaattagataatctactaaaggcttgatcatggttccaactctcattcccaaaagataaggatactgagttaccattggaccaatgtccctaggactcacaccaatgctcaccaaatacgcaaccgatgtgctcatcgtgccttcaagcttaaaccctagcagctcaggatacttcatcaatacataacccaaatcttgcttctccacatcgagtcctctaagaaacttaaccacaggagcaagctcaacaaccacacttgcgtgtagaacctgaggatagttcttaacaaattctcctaatttcgatctcgagattccaattttctctaagtaagccaagacaggaatcaaattcttacgcacactacaacctaacatcaaaggatactcatttatatcgtcaatcgttaaccctagcttctgtaagaactcaacacgctcacacatgacttcaatggtggaaggtagctcaatactctccaattcatcggtgattatccccaaacccttgagatagtcgcagattttgacgcgattcacgagcttctctttcttcccttgtataactccccatgtgactgtaggcatctcgtactctggaaactttgaagattgggttgcatagtgagcaatcctgaaaatcgaacaagggttttgaaattgagggatattaggatctgggtttatcagggttttagcttcagtggaagtaatcggaaagatgagactctgtcttttgagtaaagctacgaacttgttcctcctaagaagatagctcattctggagatacccagaagattgttgtcgaagaagattacgacttcgcaataaaaatcaaatgggtaatcgaaaagatcctcgctttctcgcctgaaggagtttagcgattagagacgagagagat

SEQ ID NO: 1175 - DNA, 3740 bp, Arabidopsis thaliana
  Clone ID: ARATH-23APR03-CLUSTER7802_1
gaccttttcttcttcgtcttctccattttctcgagatttagcttttctcttcgtgatcgggaacgtgttgatcagattctagcgtggattcgtatcccagctacagagagctttgattggaatgtgctgaggaacattcatttcggctctaataagccaatcggagtgagttcgccagcatggggattttcaatggtttgcctgtaccctcggataaaacttaccttagggaggagctggcaagaatagatgagagctgggctgctgcacgatttgactctttaccacatgttgttcatattttgacatcaaaagaccgtgaagctgacattcatatattaaaggaacaaagtgatgttgtcgaggaggttgttgatgaagttgtccatgcttatcatggtggtttcaacaaggccattcaaaactattcacagatcttgcgattattcagtgagtccactgaaaagataggcgacttgaagcacgatttagcagaagcgaaacagagcttgggtgcacgcaataaacaattacatcagttgtggtaccgttctgttacattgcggcacatcatctcacttttggatcaaatcgagggcattgccaaggttccatctcgtattgagaagctcattgctgataagcagttttacgctgctattcaagtgtatctccagtcgtctctaatgctggagcgtgaggggcttcaaacggttggtgctcttcaagatgtcagatctgagctaactaagttgcggggagcccttttcttcaaaattctagatgatttgcatgcacacctatacaatagaggtgaatacagttcagttgcgtcaagcatatatgaaagagatgatgaagtaccaacgacaacagctgttgcagctagtcgaatgagctcacaaccactgtcacgtagaacacggacactgaaaggtgatagtcagtttggtgttagagggctcacaaatggttcatatagaaccgcttctaatgatgaaagttcatcatttgatggacatgatgaagaagactccgtagaacatgatgaatccaccgcagatactgccaggaatggcactgatagtaaattgctttctcaccaacttcctccatggctttctgattccactcctgatgagtttattgaagcagtaagaaagagtgatgatccactgcatgtgaagtatctacagacccttgttcagtgtctctgcatgcttggcaaagttgcagctgctggtgctatcatatgccaaaaacttcgacccacaattcatgaaatcataatatccaagattaaagcccatctggagactacaaatttgtcaaagtccgcgtgtagtcagggtgatcgaagtgtagctgctggattgcatttaatcaaaggacagtcagaggcctaccggttatcaaaagagaaacctcaaaatgggatatcaaattcaggaactcacctagctgtgagccctgtttcgcctcttatggctcctggaggcaaagcgcaggctgcagcgaaggaacttcttgactcaattttagatactattgtcaagatatttgaaaatcatgttgttattggagagcttttggagatgaaggcttcacaacatgacattaacacaccaaggtcattgcctactgatgtgaattggaacaccgagtctgaagcatcccaagctactggaggctacactatcagttttcccttgacagtcttacagagtgaatgccaacaactcatatgtgagattctacgagcaactccagaagctgcttcagcagatgctgctgcacaaactgctaagcttgcaaagaaggctccgaagaaagacaaaagggatgcacctgaggatggcctaacattcacctttcggtttacagatgcaactgtatcaatatctaatcagggagccgatctcattcgtcaaggctggggaaagagggctccaaatgcatcactggaaggttatggatctgcagctgttttgcctgaacaaggaatatatctagctgcatctatttaccggcctgttcttcagtttacagataaaatcacttcaatgttgcccaaaaagcattcccagcttgtgaatgatggattgcttacattcactgaaaactttgtgaaggaccatctgttaccgacaatgtttgtggactataggaaaggcgtacagcaagctatatcaagcgctgctgcatttcggccgcgtgcacatacaactacttacaccgcaaccgtagaaaagggacgacctatcttacaaggtcttctagcaatagatctccttgcaaaagaggttcttggctgggctcaagccatgcctaaatttgctactgatcttgtgaagtatgttcagacatttcttgagaggacatttgagagatgtcgaacatcatacatggaggctgttctagagaagctcagttacatgctcattgggaggcatgatattgagaaattgatgcggcttgatgcggcgagtgcttgtttaccatctacgcttggccatgccgtttctcactctgaggctgttggcactgaagtagaactcagtgacctattcttgagtttgcgacctatcaagcaggataatctaattcgtgatgacaacaaactgattttgttagcttctctcagtgactcgcttgaatacgtggcagactctattgagaggcttggacaagcagttcctcgtgtggcgagtcaagctgaaggtaatagcagaaatcaagcagcttctcctaggaatctggcatcatttgcagatgagtacagaaaacttgcgactgattgcctaaaggttcttcgtgttgagatgcaattggaaacagtctttcatcttcaggaaatgacgaatagggaatatttggaggatgaggatgctgaagagccggacgactttgtgatatctcttacttcacagataacacgtagggaggagggaatggcgcctttcatctctggtgagaagcggaattacgtttttggtggcattagtggaattgcagcaaatgcgtccattaaggctttggctgacatgagatcaatcaaccttttcggggttcaacaaatatgtcggaacactattgcagtggaacaggccatggcagctattccatatatcgatggtgaaaccgtacaacagaacctagatcgtgtccgtacttactttgagctattaaacatgccattcgaagcattgctcgctttcatagcagaacacgaccaaatgtttacacccacagagtattccaatcttctgaaggtcaatgttcctggaagagatactccttcagatgctcaatcccgccttttggaaattctttctcattaatgtcaaagccattcgcggattactgtgattaaacgaaagctttctccagcagccaatttgtttcatgattttcataagctgcagaaaaatcataatggtgaaatcataaaggagaagcaggagacataaaatgtatatcttcttcgtgctttctactgccacaagagtttggattcgtgagtatctcaatttttcatttttttttttgttcttttttaaactcttgtctagtttcgtgagtatttgtctaatacggaaccaaagacctttctttgagagctttgttttgtttaaattctttggtagagattttccattgtataaaactttccaaggtgagttcatattccttccaagtaaaaacaaaaataaaaacacaaagccacaaaatactttact

SEQ ID NO: 1176 - DNA, 1469 bp, Arabidopsis thaliana
  Clone ID: ARATH-23APR03-CLUSTER78276_1
ctcgagtttttttttttttttttttagtttgtttttttgtgtgttttaataataacattgagtttgtttgtgctaagtgtttgattttttcagtacacacctaacagttttgggaatttgctaaatctagaaactgagtgaagtggtttacgtataggtcaagtaatcagaggtcatagacagcaacaaagttcatcaacacacttcccatccaaagcttcccatctttttcttccacttcacttactgatctcacaactttcccttcactatcttccaaaacatgcataagcttcccttcaggactatacttaaccaccaacccgtgcggccgtaaccctatctggaacgagtagtgagttctcgcagtgattggcagtctcagtatgaacatcctcagcttaggatatcttgccattaagtatgagtagtagttgcgtctgcaatgaagcgctacccaaaattcacccttttggttggttcttacgttatcaggatgccctggtaaatacgcaaacacatctgtcgttccagctttctcgcctttcaaccagtatcttcgtaggcttccaatatctccttcgcagaatacaaagaaagaaccgtctctgctgatagagacaccattcggaaactgaagatttgagaccaaaacaacagctttcttagctactggatcatactttagaaccctcccagtattgtctccagagaaaacgagctgcaagaagttcctcctctggtaactaatgctgctatctgtaaagtaaacagttccatcatcagcaatgtcaagatcattagtaaaccccaacggcacaccttcagcttcagttacaagcggcgttgctaaaccaccttcaggaccaactttcaaaagtcccatataagcatcagctatatacaaatctccggttctcttatcgaaacgaagacctaaaggacgaccacatatatgttcattcctcaagtaactcaaagcagaaggcttcggatcacaaatctccgatcgattactcgaagtataagcgaaatcaatccatttctctccatcccaaaacaaaaccctaccatcagcaacgcctgtgtacggaccacgtccgagagaatcaaaggcgacgctctctggaccttggatttggttaaaaaacagaatctttgatttctgaagtgaattttgtgaatctctctcccatggaacttcgtcgggacgtggagagataacttcgtgagagacgaaattggggaaatcggaaatggcgcagtggtggaaaggatcgatgctgcagtagagtgcgagggagagggagaagaagagaagagtgatggttttaggagataagaacaaagccatgattgtggcgttgttgaaggaaagagaaacttttagggtttaaaaggaggagaagaagaagaagggtaggtagatccattggtgggtgagcaatgcaaagagagctctcacttcc

SEQ ID NO: 1177 - DNA, 1548 bp, Arabidopsis thaliana
  unsure (1)..(1548): unsure at all n locations
  Clone ID: ARATH-23APR03-CLUSTER78327_1
cccttcggtaccgggccccccctcgagttttttttttttttttttttcttttttttgttagttgttatctagaaagttgcttttaatcaaatcaatgaggctgatagtactaaagaacaatgcaagtctgatttgagttatgaaattacaaatccaagtgtttgaattcttttcataaaagcttctatcatttagtcagataaggatcacccttaaacttagcatacgaaggaagatcaagagctttctctgcaacttccctgtcctcgtgaatctttgcaatgagactctccagtgaagagaaattagcctcagggcgtatatagccaacgataataagacgtagctcttctccgtagaaatcctcagtgaaatcgtgaagcagccatggttcaatagttttctccttgttgttgaaataaggattccaaccaatgctcatgaccattttgaagacacctctggttgccaagcctgcccaaccaaagtacactcccgaaggatgttccagtagctcatccgcataatcctttgttgacaagttagctgtggggattccaagtactttcgagccacggccaaatcctttgatgactggacctccaatatgccacggatcaattggtaaagtgttctctatccagtcttgaaatggaggaagtccccatttttcaagtcttatgtcgagtagagaattgatgatttcatctgcagatgtataaagatgtgtttgcttaggtagagaaggaacagcaatcacttttgtaccagcagctttaccagccataacaccaggcacagaatcttcaataaccaaacagtcctctggatctttattcaatctcttggctgcttcaagaaaaatatcaggagaaggctttcctttagaaacttcatcactaccaacaataactgagaagcattccttccacccttcatgatatgaaattttggattcaatattagctcttgaagaattggaagccaaagccacaggaactccatgacacttcaaatgtcgaatcaacctattggcaccaggaagggatttgattttgtccatctgagcagagaacaaagggtagaattcagaattgaattcatcaactttacaaggaagttcataatcttcaacaatagtagtagcagcttctaatggagttttgccaactattttcaatgattctcttccatcccactgtttaccatatttacacaagtatttcctcaaaatgtcaccaacaacaccatctgtgttgattaaggtaccatcgagatcaataagaacacaagaagatagctttttcaaagaattgctcatcgccattatttccaactacagattttgctcacactcttcttattagtttctgtaaatttaccattccatccaaagtgtctacctgagaggcgacggatctagcggatggtaaacgccggcgatgagctgaggacgacacggggggggggggactaatgagntttttttttttttttttttttttctcctggggccgaatttctgcaagcccgggggattcantaagt

SEQ ID NO: 1178 - DNA, 2314 bp, Arabidopsis thaliana
  Clone ID: ARATH-23APR03-CLUSTER7842_1
cagtgtgagtaatagattcttcttcaccttgaaagaccattaacatcattccttgcccagatccaaacaatgccatctccactctctctatttagggttctctccaacttttcaaatccctaattcttgctccctcccttcaatcaattccgatcatcatcgaggtctctctactccccgaatttaaagatcagagccgcgacttcctctgccttcttttcctcggaatttttcagctacgttttccaggtggtgtgtattgtcaatcagttgacctttgcttttgtagccagatcgttcgtgctttgagtttagggctcttttacaaggtttcgtgttggtggaatttctctacctaggtttgggggaagagttcagtaatttcgttgtagatcgtgatttgggcttttagggtttcggtttactggttgctggaatttatggtagcgttattgaattcggactctctgcatgtgtaagcgttgaagtttgaagtttcaccgggttttgtttcttctgctgaagagtcgagattattttacgcattaagaatcgattcagaaggtttttaggaattagtttctgtggattgtaactatataactactgggaggggatgtttggttctacattggatagcagccgtggaaacagcgctgcctcagggcagcttcttactccgacacgcttcgtgtggccttatggaggtagaagagtcttcctaagcggatctttcaccaggtggacagagcatgtgccaatgtcaccgctcgagggctgccctactgtttttcaagtcatttgcaacttgacgccaggatatcatcagtataagttttttgttgatggggaatggcggcacgatgagcaccaaccatttgtaagcggaaatggtggagtagtgaatacaatatttataactgggccagatatggttcctgctggttttagcccagagacactgggccggtcgaatatggatgtggatgatgtcttcctgcgaacggctgacccgtcccaggaagctgttcctaggatgtcgggggttgatttggagctttctcgtcaccgcatatcggttttattgtcaacccgcactgcatatgagctgctcccagaatcgggcaaggttattgcattggatgttaatttgccagtgaagcaagcattccatatactctatgagcagggaatccctttggctcctctttgggactttggaaaaggccaatttgttggagttcttggtccactagacttcattctaatactgagagagcttggaactcatggatcaaacttgacagaggaagagcttgagacgcacacaatagcagcctggaaagaggggaaggctcatattagccggcaatatgatggaagtgggagaccatatcctaggccacttgttcaggttggaccctatgataatctgaaagacgttgccctgaaaattttgcaaaacaaggtggcagctgttccggttatatattcttctttgcaggatggttcatatccgcagttactgcatcttgcttcgctatcaggcatattaaaatgtatatgcagatactttagacattcgtctagctctttacctatccttcagcaacccatttgttcaattcccctgggtacgtgggtccctagaatcggagaatcaagtagcaaacctctcgctacattgagacctcacgcctctttgggttctgcgctcgcattattagttcaagctgaagtcagttcaattcccgtagtggatgacaacgactcgcttattgacatatactctcgaagtgatataactgctctggctaaagacaaggcatacgcacagattcatcttgatgacatgacagttcaccaggcgctacagttggggcaagatgcgagcccgccttatggaatcttcaacgggcagagatgtcacatgtgcttgcgctcagactctcttgtgaaagtgatggagcggttggcgaatccaggtgtaaggaggctggtgatagtggaagcagggagcaaacgtgttgaaggtatcatttcactgagcgatgttttccaattcctgctcggtctttgactcccacagcaaaacaacctccccaacctctttttctcatttcccctcaatcaaaactacccaacaatttgcttctttttttttttttttttttttcttcttgcaaggaatttgtaaatttgctacgaacctctttcatcattgttttcttattatttttgttgttttagttgaacgggtttccattcttgtgaagatattggctaccggaatcttttactagtagcttccccc

SEQ ID NO: 1179 - DNA, 1460 bp, Arabidopsis thaliana
  Clone ID: ARATH-23APR03-CLUSTER785_1
atctcctcaacaacactcactcagaacaagacaaaacaaaaaccccaaaactctcaagaaaaaaaaaagaaaagaaatggcgatactatgcacaacaacatctccggcagagaaagaacacgaaccaaaacaagatcttgaaaaagaccaaacttctccactaatctttaacccttctcttcttaacctccaatcccaaatcccaaaccaattcatttggccagacgaagagaaaccttccattgacattccagagctcaacgtcccgttcatcgatctctcaagccaagactcgactcttgaagctcctagagtcatcgcagaagcttgcaccaaacacggcttcttcctcgtcgtcaatcatggcgtcagcgagtcactaatagcggatgctcaccgtttgatggaaagtttcttcgacatgcctctcgccggcaaacagaaagctcagagaaaacccggtgagagttgtggctatgcaagtagcttcaccggcagattctccactaagctgccatggaaggagactctctcttttcagttttccaacgataatagtggctcgagaaccgttcaagattacttttccgatacattaggacaagagttcgagcagtttgggaaggtgtatcaagactattgtgaagcaatgagttctctatcactcaagatcatggagcttctgggcttaagtttaggcgtaaaccgagactatttccgaggatttttcgaagagaacgattcgataatgaggctcaatcattatcctccatgccaaacaccagatctcacgttaggtacaggacctcattgtgatccaagttctttgaccatccttcatcaagaccatgtcaatggccttcaagtctttgtcgacaatcaatggcaatccattcgtcccaatcccaaggctttcgttgtcaatattggtgacactttcatggctctatcgaacgggatattcaagagctgtttgcatagagcggttgtgaatagagagagcgcgagaaaatcgatggcgtttttcttgtgtccgaagaaagacaaagtggtgaaaccaccaagtgatattttggagaagatgaaaacaagaaaataccctgacttcacttggtctatgttccttgagttcactcaaaaacattaccgagcagatgtgaatactctcgattccttttcgaattgggttattaccaacaacaatcccatctaagaaacaaaattatttactatctcaatcttttgtttttctttggttactttgtgtcctttgttctcatggtgaaatgcattaaattgcatttcaaagttttaaacgtttgtatattgattgttccaagctttagaccaatccctaccgtatgagctcgttcaatgaataatttgaatgaaaaattcaaagaaatttttcttaaaaaaaaaaaaaaaaaaaaaaaaaaaaaaaaaaaaaaaaaaaaaaa

SEQ ID NO: 1180 - DNA, 842 bp, Arabidopsis thaliana
  Clone ID: ARATH-23APR03-CLUSTER7883_1
agtcgcagtttcgcagctgtaacaagatttcttctggcgaagaagagagaatcgccgttcaccgattcgtttctttgttcatctcctcccaggtaattatgggagatttctcgattcagatcagttctaagctgatcaatcagctagctgaaggtaacgatcaaccaaagaggagggcaaagaaaaccaaacctaaagtctcaccacagagcaaacagaaaacaaaccaagatgaagagaagaaacctaatccagtggctgaattaccgatgcagccaccgtttttcttcccaataccaccacaaggagcagcaagcacagagctggaatcgataaaatccgttgtgaaagagagtgagaaggttcttgagaagctggagttacaagagaagaacattgttcgtgaagttacggagagagccaaggatctgagggagaaagagtttaagatcccggaacctaaaccaatgccttgttcgtcagatcacgaagcctggatgaaatgctacaaggagaacatcggtagtccgttgaaatgtagcggtttcgttaagagtttccaggattgtgcacgccggtccagacagcaagtgaatcctgaagaaaagtagagataataagattcaaaaggacttttttgagacacgaagggaatagtttttgctttctgagatcatatgaatgacacagaagaattgtgcttgtttccttttgatttcatgaaagcaaaaaagaaagaaaaaaaataagcagaatctgtgattatgttcatgagataaaactttcaaaactatgttcttgattaactattttggcttatcttctaaaaaaaaaaaaaaaaa

SEQ ID NO: 1181 - DNA, 1167 bp, Arabidopsis thaliana
  Clone ID: ARATH-23APR03-CLUSTER7909_1
atacttgtaaaagctagagtcaacgccgttcagtctcagaccagacgaaacaacgatgcttaactctatcactttaacccgggaaccaccactcccgttcaactctgttgggttttcaggtaatcactcttcgtcttttggtcgaagaactataacggaaggtagttcgagcaaggctctttcgtttgggtacaaaaatgttggttcactgaagtgtggtcggagcaattggccggggcgttctgggactgcgtttgggcatctagtccgggtctctgcggtcccaggtgggaattcaggtggctctggcgggttaggtggttcaggcggtggtggtggtggttccggcggcggtggtggtgatggaagcgacggaaaaggaaagaagtggtcacttctctcatggtaccaggctcttctctcaaactctcctgttttgaccaaagctgtgaccgcagcacttttgaacctcgttggagatttgatctgtcagcttactatcaacaagacctcatcgctggacaagaagaggacactcacctttaccttcttgggcttagggctagtcggtccaacattgcatttctggtatttgtatttgagcaaagtggtgacagcttctggattatcaggcgcagttatacgacttctactggatcagtttgtttttgctcctatttttgttggagttttcttatcagcagttgtgacacttgaaggaaaaccatcaaatgtcataccgaagctacaacaggagtggactggtgcaatgatagcaaattggcagctatggataccatttcagtttcttaacttcagatttgttccacagaactaccaggtacttgcttcaaacgtagtggctttggcttggaatgtgattttatcattcaaagctcacaaagaagttgttgcaaagtagacatgtttcttacctggagcctagaggtggttgctggattgttatcggcagagttttggggaaacggtcttgtctgctgatgcaaatgtttggtgtttcgaaacaattatttgggaaccctgcacttgacattttcttagagttgaaacaagcttttcttcaagcacttcaaatatttccccatcatcaatgtttcatatatttattgtttcctcattcagagaatttttttagttcgtatgaag

SEQ ID NO: 1182 - DNA, 2572 bp, Arabidopsis thaliana
  Clone ID: ARATH-23APR03-CLUSTER7913_1
aaacgacaataagctccacagtgagttcttctcagcaatcacaatctatctggtttaagccctcactatcctactctctcaaatcgcggagtctccgaagtttctctatgcagtcgtcaacgtatgcggttaaaggaaacgctgcgtttgcgtttcagagacggaccttctcttctgacagatcgacgacttctaccggaattcgcttcgctggttataagagcttagccaccaccgggccactctactgttctggttctgaagccatgggagtgaggattgatcgtgttgatatctggatccagagcgctattatttctcttttctctgagcttgcgcggttagagcgtcagacaaaatgcagtcgtcaacgtatgcggttaaaggaaacgctgcgtttgcgtttcagagacggaccttctcttctgacagatcggcgacttctaccggaattcgcttcgctggtactaagagcttagccaccaccggatcactctactgttctgattctaaagccatgggagcgacgcttgctcgtgctgatgacgggatccagagcgttatgagtttctcttctgtcaaagctcgatcggtcagagctcaagcctcctctgatggagatgaagaagaagctatacctctgagatctgaagggaaaagctctggaacagttttgccttttgttggtgttgcttgtcttggtgctatactctttggttatcatctcggggtggtattggattctcatcagcgattgtgccactttacatatctgagatatcaccaactgaaatccgtggagcactcggatctgtgaaccagttgttcatctgtataggaatacttgcagccttgatagctggattaccccttgcagcaaaccctctatggtggaggacgatgtttggtgttgcagttatcccttccgttctattggccataggaatggctttttctccagaaagcccaaggtggctcgttcagcaaggaaaagtctctgaagctgaaaaggcgatcaaaactttgtatggtaaagaaagagtggttgaactagttcgcgacttatcagcctctggccaaggttcttctgagccggaggcaggatggtttgatctattcagcagccgctactggaaagttgtaagcgtaggtgcggctctcttcttgtttcaacagttagccgggataaacgcagttgtgtattactccacatcggtattccgtagtgcgggaatccaatcagatgttgcagccagtgctctcgttggagcatcaaatgtctttggcactgctgttgcttcatcgttgatggataaaatgggaaggaaaagtcttttactgacaagctttggtggaatggctttgtcaatgctgttactctccttgtccttcacatggaaggctcttgctgcctattctggaacccttgccgttgttggaactgttctatatgtcctgtcattctcacttggtgctggcccggtaccggctcttcttcttccagagatatttgcatcccgaatcagagcaaaagccgtcgctctttctctcggcatgcactggatatcaaactttgtgatcggactatacttcttaagcgttgtgactaaattcggaatcagcagtgtctacttgggttttgctggagtctgcgtccttgcggtcctctacattgcaggaaacgtcgtcgagactaaaggtcgatcactggaggaaatagagcttgctcttacatctggagcttgaaattaaacaaaagaaatcagcagaacaaaaaccagtttgtttcatcatttagtttgtgagtctttctctaatctgctactcttaaattgtacaatggacgacgttatcaataacgagaaatcttttcatgaccaagtgtctacttgggttttgctggagtctgcgtccttgcggtcctctacattgcaggaaacgtcgtcgagactaaaggtcgatcactggaggaaatagagcttgctcttacatctggagcttgaaattaaacaaaagaaatcagcagaacaaaaaccagtttgtttcatcatttagtttgtgagtctttctctaatctgctactcttaaattgtacaatggacgaagttatcaataacgagaaatcttttcatgaccactacatgttggctaacctttcccacctctccctggtatctagcccccaaaacagtttttgtggcttcttcggtactgtgactacggtcttgttatgattctgttcttctaaggtagaagaagaagaagaagaagttggttctttcaactttttagagctttcgccatcttcgatcgctttactctgacaattcttgctcgctttaggtttcttcttatgaatctttgcattagcttttatttgcatacgtctcttgtgtagctcctgtaatttggaaatttgtttctgggtgaggttggatcgattaaaattgggttgaagagatagtgttgaagctaatagagcttcttttcgagtctcctctgcttctctgtcaatttcctcgtttgtcctcgtcgtcgccatggcttctccgtcggcaactttgagaatgtt

SEQ ID NO: 1183 - DNA, 1217 bp, Arabidopsis thaliana
  Clone ID: ARATH-23APR03-CLUSTER79243_1
tttttttttttttttttgatattttacacatatttttttctcatgttgaagaaaataataacacacatttaacaggttcatataactctcacacagtctgaaattcatgtattttatttcttaaaaacaagattacatgatcatgaagaacatttacacaaaaaacattctttcaagtttcaaccaataataaactcgacaaacttcttcaagaatttcaaagccttatcagatttaggattctgcaaatgaaacacatggtcctcaccttcttcctcaaccacctcaacagtaccttcccactcacacttctccagcttcgccgcataagccaatccttgcctaacaaacacatctttcccagctaccgcaaccaaaaccttatcacatcccaacccagaaaaatccgacccggatccgtttacattaaacaacggatcatccgtcccattaacactattcggactcgcaatcttctcccaaatttccgcgattccgcttctcgtttctttatcttgcacatcgtattcatcaaccggatctgttccccagaaagctggatgaacaacagcaatacctttgattttgagatctagcttcttctctttaccagctttcatcgccatgtgatgcgatatgttaccgcctgcgctatctccgccgaggaaaactttaccgaaatcggcgtgtttgttaatccaatctacaggaccagatccattagaatgagcaaaaatccactgaatcgcggaccatacatcttcataagccgccggaacaggatcttccggtgcacggcgatactgaacagagacagcgaggcagttagcggatttgactacttcagtgaggtaattgtggtagagtggggagaaaggtgactcgatgatccaagctccgccgtggatgtagataagtagagggagcttgttaccggcggtgagttttgttgatttgtgagggaggaagagacgaacggagaggttattctccggtgagtatataacgtcttttgaaacgacgtcgtgtgttggatctagagaggccgggatggtatcggtgccgatgagtcgttctacacgaccgtctttgtaaatccggcagaaaggaagaaactcggaggcgatttcagattccattgattgaagaagaatgaagaagagtgttgttagttggagttggagttggagttggagttggagttggagtgagccttt

SEQ ID NO: 1184 - DNA, 812 bp, Arabidopsis thaliana
  Clone ID: ARATH-23APR03-CLUSTER79361_1
aaaacatggcttcaacaaaaataaactctttaacaacaacaatctacaattacaaatccccaagaagatacattaaccacaaatcccaaaaccaaatcaaactaatttcaaattccctaaacccaaaacccaacacaacacagcttcccaacactctctacagtgtcagcttcaagactattggaacaggtaagcttggcatctccagatatcccgatttcgaatactctcctctaggtggctctggtgccggaaccgccaagaaaatcgacgacaaaaacagagcatcaaactctgaattgtctgtttgtttcaatgtggccactctttatattccttctctcactagccaaaccacgaagtttctcggctttccattgccaccgtttctaaaaatcgatatctcaccggagattttccaaggaactatcaaccaagaatccgggaaggtggaattggagtttatggcgaagttctttttcacggcgggaggagggatatacagagctccggcgttggtggtgagaactgtgttgacgacggaggaatcgataggagagaacaagagagggaaaggagagagactggacgaagaaggaaagtgtagactcgtcggcgtcgcgaaagttgagaccatcgacgatttgtttatgaacacgttcctctctcttccggcggagtgtctcgccgatctacaagctattatttcagtctctgataatcaatcttgaatcttaatgataaaccataaatatttgagttgaaaaaaaaaaaaaaaaaaaaaaaagggcggccgcaaaaaaaaacgcgag

SEQ ID NO: 1185 - DNA, 998 bp, Arabidopsis thaliana
  unsure (1)..(998): unsure at all n locations
  Clone ID: ARATH-23APR03-CLUSTER7947_1
acacacccaattcactcacaacctagctagctagtgaacagtattttctatataccaaaaatggcttcaagttccatagctcttttcttggctctcaatcttctctttttcacaacacccaattcactcacaacctagctagctagtgaacagtattttctatataccaaaaatggcttcaagttccatagctcttttcttggctctcaatcttctctttttcacaacaatctccgcctgtggtagctgtactccgtgcggcggaggttgcccctctcccaagccaaagccaactcctaaaccaaccccaagccctagctctggctcgagcaagtgccctaaagacaccctcaagctcggtgtctgcgctaatgtgctcaacggcctcctggacttgacccttggcaagccaccggtcgagccatgctgcagcctcatccaaggactcgctgatgttgaggcagccgtttgtctctgcaccgctcttaaggctaacattcttggaatcaacttgaacctcccaatatctttaagtctactccttaatgtttgcagcaaacaacttcctcctggcttccaatgctaaaaaccatattgatatataatttaaatacacttatgtgtgtattaatttatcttcttgttttaaagagacagggtgattctctatactcttatattgtgtctttatatatcttgatctgtggtttcttctactctgcttgctctggtgttcattggggtgatccgtaagattcctgaagtttacagtttcattatttcctattatatatactcttaccattgggggtattgttgtattggtttgtattatgattctatgaattaataagaatttaacttttatgttaaaaaaaaaaaaaaaaaaaaaaaaaaaaaatagatggaataaaaaaaaaaccggtcgcgtctgcggtgctgcccgagtgttttagggggggggngagggngagagnangnaggaggaagtntaangg

SEQ ID NO: 1186 - DNA, 2487 bp, Arabidopsis thaliana
  Clone ID: ARATH-23APR03-CLUSTER7959_1
gaaggaacatcaagttaggaaattgattggtatacttcaacttcttcttgttgcagtctgtctctgatgtggtgattgtatccgtcaggtttctatgatacagtatgcaaacccggcattagttcaccggaaccgatgtctcccggtttaggagttgaattttgctaaaaccggctaaaaagtgcgcaatttggccaagcgtactattgcagaagagggacgatggcgatgacaagctggccatcaacgggaagacaaagaagacatcaattggcttccatgttgctcctggttcttgtagttgtcggaatctatgttcctgtcttcgctcttctcccttcactgtcatatactcctcagtctctaccttctgctatacctcaggacgagaagatgatatctcgcaagttttatatcaaggatgacaatttctggaaagatgggaatcgttttcagatcattggtggtgatttgcattactttcgtgttcttccagagtactgggaggatcggcttttaagagccaatgctttaggcttgaatactattcaagtatacgttccttggaatctgcatgaaccaaagcctgggaagatggtttttgagggtattggtgatcttgtctcctttctcaagctgtgtgagaaactagattttctggttatgctacgtgctggaccttatatctgtggagaatgggatttgggaggctttcctgcttggttacttgctgtgaaaccacgtctccaactaaggacatcagatcctgtatatcttaagttggttgaaagatggtgggatgttctgttaccgaaggtatttcctctgctttacagcaacgggggtcctgttataatggttcagattgaaaatgaatatggttcatatggaaatgacaaagcttatcttcgtaagctagttagtatggctaggggacacctgggggatgacattattgtgtacacaacagatggagggacaaaagaaactcttgataaaggaactgtccctgtagctgatgtctactcagctgttgatttctctaccggtgatgatccttggccaatatttaaattgcaaaagaagtttaatgctccaggaagatcacctccactttcctcggagttctacactggttggctcacgcattggggtgagaaaattacaaaaacagatgccgaatttacggcagcttctcttgaaaaaattctgtctcgaaatggttctgctgtgctctatatggtgcatggaggaacaaactttggtttctacaatggcgcaaatactggctctgaagaatctgactataaaccagatctgacatcttatgactatgatgctcccattaaggagtctggtgacatagataatccaaaattccaagctcttcagagagtgattaagaagtacaatgcttcaccacaccccattagcccatccaataagcaacggaaagcttatggctctatcaagatgcagatgacaacatcactgtttgatttagttcgtatgacagatcctgcagatgtgatcacctccgccaacccaatttcaatggaatctgttggacagatgttcggatttcttttatatgaatcttcatacatcgcaaaaaagagtgggaatacactaagaatacccaaggttcatgacagagctcaagtgtttgtttcatgtctttcccaagatgttgatgtgggagtactgagatacattggtactactgagagatggaacaaccaacctatttctcttccaactattgagtgtaccacaaacactagcttatttattctggttgaaaacatgggtcgtgtaaattatgggccatatatctttgatgacaagggtattttgtcttcggtttatctagatggtcaaattctccatggatggaagatgataccaattccttttcacaatctaaatcaagagccaaatctcactttcgagatgcaacataccaaaaacagaagtaaaaagttcgagcttactaatgatgttggtcgaaaggaacccgctctgtttgctggtgaattctctatcaacagtgaagaagaaatcaaagacacatatctatcattcaacggttggggtaaaggagttgcttttgtcaatgaattcaacattggaagatattggccgtctgttggaccacagtgcaacctctatgttcctgcgccacttcttaagcgtggcaaaaacactttggtggtattcgagttggaatctccgcatctcgagctttcgctggaggcagtggatcaccaagacttcacatgcggttcaaatgtttccaaagttaatcagttgtagattttcagttcacggatacaaccaaaagttccagtcgtgaacaatcagcccgctataaatcatatgttggatgataaagaatttaaagttaaccaaaagatttttgtgtgtccaaaaacatgaaactatacattaaaaagtcagacccgataaaaaaagattttatggtcg

SEQ ID NO: 1187 - DNA, 1966 bp, Arabidopsis thaliana
  Clone ID: ARATH-23APR03-CLUSTER8008_1
tcatttaggccaccccccaagaacttttacaatgatatactttttcgcgctcaggaagggtgtgggggaagattggggaacggaaataacaaatttgacccccagggaaaaccggtgttttaccaagggttagcgcccaaacctggagaattttcccctcccttaaaaggaacaaaaaagggttttcttcttttcctcctacattctcgactctctctttttattagggttttcaattttaatcaaaaaaaaaccctcaaatctcatttttggatttggtttcttctgcgatctctgagattcaatttcttctatcaaaggaaacaaaaaacttcatctttccgaagattttttttccttccttctggagctcttttgaatcaggtgaatatctaattgaatctgaaagtttacgatgaacaatttgatatgatgataagttttgtttgatggagctttcaccaacaagcagtgacaagaaaacaatgaagagatggtttttcatagataaacgagttggatagagtgttattgaagataaagaaagcaaaaaacagaagttcttgcattgaagcattggttttagagtttattgaagcattgtttagagttttgattaatggatttaaactcaaaccacaaatcctctgttcttaaagatccttcaccatcagttaaccaatcaagactcggcgtgtctagtagatttatgatgagtcaatggaagaaacctgcgaaactcgatgatgttagatccaatggttggttagatgcaatgatttcatcttctccaccgcgtaagaagcttgtcaaagattttaatgttgaagttgctcctgaagatgattttgctcaacgtgcttggatggtgaaatatccttcggcgattagctcgtttgcgcatattgcagctcaagcaaagaagaaaaagattgctgtatttctagattatgatggtactctttctccaatagttgatgatcctgatcgtgccatcatgtctgatgcaatgcgttctgcggttaaagatgtcgcgagttacttcccaaccgcaataattagcggtagaagccgtgacaaggtttatcagttggtaggactaacagaactttattacgcgggtagtcatggaatggacataatgacttcttctgatggtccgaattgtttcaaatccactgaccaacagggtaaggaagtgaatctgtttcagcccgcgagagaattcataccggttatcgacgaggtttttagaacccttgttgagaaaatgaaagatatcaaaggtgcaaaagtagagaaccacaagttctgtgcatctgtacattaccgtaacgttgacgaaaaggattggcctattattgctcagcgtgttcatgaccacttgaaacaataccctcgtttgcgtctaactcatgggaggaaggttttagaggttcgtcctgtgatagactggaacaaaggaagagcggtcgagtttctattagaatctctcggattaagcaataaagacgatttgcttcctatctacattggtgatgacacaaccgatgaagatgcgttcaaggtactgagagatgggaaccgaggtttcggcatcctagtatcgtctataccgaaagaaagcaatgcgttttactcccttagagatccatccgaggtgaagaagtttctaaagactttggtgaaatgggcaaagttggagaagaattctactggtttttgaataatatagtggaattttatgattaaatgcttatttacacttttttttgtttctttaatcttttttcatctctacccagttttagtcacagcttaatttatgattttccatttatctggtggaagttaagttattaaagttacatgtaaaaggaatgttaacgtattgcatagttttgccaaaagactttttccttggaaaaaaaaaaaaaaaaaaaactcgagggggggcccggtccca

SEQ ID NO: 1188 - DNA, 2088 bp, Arabidopsis thaliana
  unsure (1)..(2088): unsure at all n locations
  Clone ID: ARATH-23APR03-CLUSTER8014_1
actttcatcgtcttgttcggcaccgcctggtctttctcgttcccctactcgctggacgaggtaaagtggggcttgatgtgtgcccttcctctccagcctgtcgccgaccttgcccaggcggttttcgtcgagactggaccttctgcccttgattgggccgcatgggtgcagttcttgttgcttgttgtcgtcgtctccggctgtgctggtctgttcccctttggatggtccatcatgggctcgcgtgtggcggctaagactgtcggcttggctgcggtgctccgcttgcaagtataggcgaatttaatttggttggtcacacacaaccgttttcatcggaagaagaacaagttggattgattttgctttggatctcacatctgagatcagattaatctctctgtgaagtcgaagaacgaaaccctagttcccatggatctctcttcacgcttctcatcgatccttatccttctcttgatctccatctccatagcttcggctgagattcgtaaatcagagatccgatccgatgatcgtccaatcatccctttagacgaattcggtttcactcacagcggtcgtcttgagcttgacgcttccaagatctggctttccaacagcaatcccgatctcgatctctccaaagtgggcttctttctctgcactagagacgcttgggttcatgtgatccaacagcttgaagaagaagagatcacgtgcgctctacaatcagatctcgttaagcatgtgttcaccttcaacaatctcaagggaggagataagagcagattctccaccgtattcaccgagaacgatgcggatcagtactctctcgtcttcgctaattgtctccaacaggtcaaaatcagtatggatgttagatccgctatgtataaccttgaaggtaaaaagggaggtcgtgattatctctctgctggaagaactgttcttcctaaggtctatttcttattctctgttatctatttctctctcgccgccacgtggatctacgttctctataagaaacgtctcactgttttcgcaatccatttcttcatgttgggagttgttgtcttgaaagctttgaaccttctttgtgaggctgaggataagtcgtacattaagaaaactggaactgctcatggttgggatgtcttgttctacattttcaatttccttaagggtatcactcttttcactttgatcgtcttgatcggcaccggttggtctttcttgaagccctacttgcaggacaaggaaaagaaggtcttgatgattgtcattcctctccaggttgtcgctaactttgctcaggtggttatcgatgagactggaccatatggccaagattgggtcacgtggaaacagatctttttgcttgttgatgtcgtctgttgctgtgctgttctgtttcccattgtatggtccatcaaaaacttgcgtgaggcggctaagactgacgggaaggctgctgtgaacctcgttaagttaactctgtttaggcagtactacattgtggttatctgctacatctacttcactcgtgttgttgtgtatgcactggagaccattacctcttacaagtatatgtggactagtgttgttgccagcgagttagccacacttgccttctatctgtttactggctacaagttcaggccagaggtgcataacccgtactttgttgttgacgatgaggaagaagaggctgctgctgaggctctgaagcttgaagacgagtttgaattgtaagtcatcactggaataatcgtgtcacgtgtgagtcagtaaaaagaaacatactttgtttgacaggatgattgagagtaaaccggatcatcagctgcctgctaaaccgccttctcttctttggttttttcctcttgttatctttattagaatgcaatacctgttttgtttttacttgaattgttaggatacttatatagactctatgaatgtcttgtcccccaatgcatagtatgtgtattactggtaacataaaacgcttggtgctgctcgttatacttaatctgagtctctgcttttcatttgatggccgctctaaaancaaaaaaaaaaaaaaaa

SEQ ID NO: 1189 - DNA, 1484 bp, Arabidopsis thaliana
  Clone ID: ARATH-23APR03-CLUSTER8015_1
gaaaaaaaaaaaacgaatccccattttttctcagccaggaaacaaaaccaaagacgagccagagccacctctaacaccatcggcgacttctcctcctactcctccgtcgccgacgtgttcgatttacaacgattcggtggctaatcgttgttagatttagaattaaaggttaaaggagacgacgacgagagatgccgtcaaacggagatctcgaccgtcagatcgaacagctaatggagtgtaagccgttagtgaagcagacgtgaagatcctttgcgatcaagctaaagcgattctcgttgaggaatataatgttcaaccggttaagtgtccggttacgtatgcggcgatatccatggacagttttatgacctaattgagctatttcgtattggtggtaatgctcctgatactaattacctcttcatgggagattatgtagatcgtggctactattctgtagaaacagtctctctattggtggcattgaaggtgcgttacagggacagacttacgatcctgcgagggaatcatgagagccgtcagattacactggtttttatgacgaatgcttgaggaaatacggaaatgcaaatgtgtggaagtattttacggaccttttcgattatctccctcttacagcactcatagagagtcaggttttctgtttgcatggaggcctttcaccttctctggatactcttgacaatatccgaagcttggatcgaatacaagaggttccacacgaaggaccaatgtgcgatctactctggtctgatcccgatgatcgttgtggatggggaatatctcctcgaggtgctggttacacgtttggacaggatattgcagctcagtttaatcataacaatggactaagtctgatctcaagagcgcatcaacttgtaatggaaggttataactggtgtcaggataagaatgtagtgacagtgtttagtgcaccaaactactgctaccgatgtggaaacatggctgcaattctagagattggagaaaacatggaacaaaacttcctccaattcgatccagctcctcgacaagttgaacctgatactactcggaagacccctgattattttttgtgatttctttttttttctttgtggtcccgaccatatataattttgtgaagttccagttttattgcctatgtatcattgtagatgtgcccttttctcttcttttttctaaatggaattcgaatttcccatagaaaaaaagaaacacatcatttttttctgttgttgtggagactgctataaaaaagtttgtaggagcgtcttctaaatctataaaattgagcgtcttttgataaaaaaaaaaaaaaaaaaaaaaaaaaaaaaaaaaaaaaaaaaaccccccccgggtttaaaaaaaagggaaaacaaaaaaaaaaaaaactcgggggggggcccggaacccaattccccctaagggggggggaataacattccccgggcgcgcgg

SEQ ID NO: 1190 - DNA, 1639 bp, Arabidopsis thaliana
  Clone ID: ARATH-23APR03-CLUSTER801_1
ctctctcattgtggacatcttttcaccatcgcacaaataacaagcctcccaactccgatcgacttatcctcctccttctccggcgaaatccattaactctccgccgcgaaaaccacctttccagagaagtatcacactaagaactctaatgttgatccgccattattgaagcttctaattctcgttaatatccaaaaacccaagtcgattttcaagtagcgcggtagttagttttaggtggaagaagaatgacaactactgggtctaattctaatcacaaccaccatgaaagcaataataacaacaataaccctagtactaggtcttggggcacggcggtttcaggtcaatctgtgtctactagcggcagtatgggctctccgtcgagccggagtgagcaaaccatcaccgttgttacatctactagcgacactacttttcaacgcctgaataatttggacattcaaggtgatgatgctggttctcaaggagcttctggtgttaagaagaagaagaggggacagcgtgcggctggtccagataagactggaagaggactacgtcaatttagtatgaaagtttgtgaaaaggtggaaagcaaaggaaggacaacttacaatgaggttgcagacgagcttgttgctgaatttgcacttccaaataacgatggaacatcccctgatcagcaacagtatgatgagaaaaacataagacgaagagtatatgatgctttaaacgtcctcatggctatggatataatatccaaggataaaaaagaaattcaatggagaggtcttcctcggacaagcttaagcgacattgaagaattaaagaacgaacgactctcacttaggaacagaattgagaagaaaactgcatattcccaagaactggaagaacaatatgtaggccttcagaatctgatacagagaaatgagcacttatatagctcaggaaatgctcccagtggcggtgttgctcttccttttatccttgtccagactcgtcctcacgcaacagtagaagtggagatatcagaagatatgcagctcgtgcattttgatttcaacagcactccatttgagctccacgacgacaattttgtcctcaagactatgaagttttgtgatcaaccgccgcaacaaccaaacggtcggaacaacagccagctggtttgtcacaatttcacgccagaaaaccctaacaaaggccccagcacaggtccaacaccgcagctggatatgtacgagactcatcttcaatcgcaacaacatcagcagcattctcagctacaaatcattcctatgcctgagactaacaacgttacttccagcgctgatactgctccagtgaaatccccgtctcttccagggataatgaactccagcatgaagccggagaattgaaacacgtatgaaggccccttgtacaatttctgtaaaactgtaaagtagctcttgaaaaactttacctggttttttgacgaatagtctgtttagcggtaaatgtaccggtggtttatcgaatctaggatccttgtcgggtttagcgattttaagaatctttgccataggaaaaaaaaaacactttgctctgtggtgtagaaatgaattttattaatcaaaaaaaaaaaaaaaaa

SEQ ID NO: 1191 - DNA, 626 bp, Arabidopsis thaliana
  Clone ID: ARATH-23APR03-CLUSTER8058_1
gacctgaaatctgaaaatcggaagctgacaccgttgtctccgagactctcaagctcgaaatttcgccgccctgtcttttctccggaaaagaaactataattgaagaagctcaagatctcttgtgaaaatgccgtctctgcaaacttctctgcctcctgaactcgctaacaatgtggttaggttgtaccgagaatgtcttcgtagagctaaatttattggtaagcagcaacacaacactgagctagtggttggtatggtgaggcaacaatttaagaaacacatgaatgagacagaccctgagaagattcagaagcttaaagatgatgctgctcggggactcatcaatcacatgttgtttgagtcagcgaagctgacaggaggcaaggttagccagagatcctgatgcagtctggttgcagactctcccattgttattctctctctatctctctagtcaatgcttgtaggctaacaatgcaactaagttggcttgaataatagacttgatcgagaagcctcagtgactcaacattgaggattttcctgtgcaatcaatcaagtggttctctatttcaaatctaatcaaaaaaatttttttttcaaaaaaaaaaaaaagagctcttgga

SEQ ID NO: 1192 - DNA, 2562 bp, Arabidopsis thaliana
  Clone ID: ARATH-23APR03-CLUSTER8074_1
gcaatcaggaaaggatgacgagacaaaagatagagaagcaaaagtaagctgataaggtttgatacagtagaaaatactatctcttaacttcttcttcttcttcttcttcttctcctatctttgaaaatggcgatgactccggtcgcgtcatcatctccagtttcaacctgcagactctttcgctgcaatctcctccctgatctcttacctaagcctctgtttctctccctccccaaacgaaacagaattgcctcgtgccgcttcactgtacgtgcctccgcgaatgctaccgtcgaatcccctaacggtgtccctgcctccacatcagatacggatacggagacggataccacctcctatggccgacagtttttccctttggccgcagttgttggccaggaaggcataaaaactgctcttttacttggcgcggttgatcgtgaaatcggagggattgccatttcaggtcgtagaggcactgcaaaaacagtcatggcgcgagggcttcatgaaatcctccctcctattgaagttgttgtaggctcaatatcaaatgctgacccagcttgtccagatgagtgggaagatgacttagatgagcgcatagagtacaatgctgacaataccattaagactgagattgtcaaatctcctttcattcagattccactaggagttacagaagacagactcattgggtctgttgatgttgaggagtctgtgaaaagggggacaactgttttccaacctggtcttttggctgaagcccatagaggagtgttgtatgttgatgaaataaatctcttagatgagggaattagtaatttgcttctcaatgtattgacggatggtgttaatatagttgaaagagaaggaatcagctttaggcacccgtgcaaaccacttttaattgcaacctataaccctgaagaaggtgctgttcgagagcacttgctagaccgtgttgccattaatttaagtgcagacctacctatgagttttgaagatcgtgtcgcagcagttggaattgccacacagtttcaggaacgctgtaatgaggtttttagaatggtaaatgaagagacagaaacagcaaagacgcagattatattggctagagaatatttgaaagatgtcaagataagtagagagcaattgaagtatctggttttggaagctgtccgaggtggtgtccagggacaccgcgccgaattgtatgcagctcgtgtggcgaagtgtttagctgcaattgaaggacgagaaaaagtcacaatcgatgacctcagaaaggccgttgagctggtcattcttcctcgttcatcactagatgagactccacctgaacaacaaaaccaaccaccacctcctccacctcctccacaaaatagcgaatctggagaagaagaaaatgaagaagaacaagaagaagaagaagaggatgaaagcaatgaagaaaatgaaaatgagcagcaacaggaccaaatacctgaagagtttatatttgacgctgagggcggtctggtggatgagaaactcctcttctttgctcaacaagcccagaaacgtcgggggaaagctggcagggcgaagaatgtcatattctcagaagatagaggacgctacataaagccaatgcttccaaagggtccagtaaaaagattagctgtggatgcaacccttagagcagctgcaccataccagaaattgcgcagagagaaggatatctcaggaactaggaaagtctttgttgagaagacagatatgagggccaaaagaatggcaaggaaagctggagccctggttatctttgtggttgatgcaagtggcagtatggcattgaatcgtatgcaaaacgccaaaggtgctgcactcaaactactggcagagagctatactagcagggatcaggtttcgattattcctttccgaggggatgctgcggaagtgctcttgcccccttctagatcaatagcaatggcaaggaatcgtcttgagagacttccttgtggtggtggttctcctcttgcccatggtttaacaacggctgtaagagtaggacttaacgcagagaagagtggtgatgtcgggcgcataatgattgttgcgataaccgatggtcgagccaacattacactgaaaagatcaactgatccggagtctattgccccagatgctcctagacccacgtccaaagaattgaaggatgagattctggaagttgctgggaagatatacaaggcagggatgtctcttctagtgattgataccgagaacaagtttgtttcaactggttttgcaaaggagatcgcaagagttgctcaaggaaaatattattacttgccaaatgcttcggatgctgtaatctcggccaccactagggatgcactatctgatctgaagaattcttgacctcattttgtctgcaataccttgattctggatcaaagtgtatattctaattgtgcaacacatcagtcactaaacatgaaattataagaaatgaaattttgttttaacatactcttaaaatgaatttccgattttgaaaaaaaaaaaaaaaat

SEQ ID NO: 1193 - DNA, 2292 bp, Arabidopsis thaliana
  Clone ID: ARATH-23APR03-CLUSTER8098_1
agagaacactctcgaattcgaagaaaatacgtagcaaaacccttatttttgaatttcagacgaattccgatttcttaatcaaaaatccgataagagctttggatttggcggcgaataagaaaacatggcgaatttggatatggagcaacattcatccgaaaacgaagagattaagaagaagaagcataagaaaagagcgagagacgaagctaagaaactaaagcagccagcaatggaagaagaacccgatcatgaagatggtgatgccaaagagaacaatgcgttaattgacgaagaaccgaagaagaagaagaagaagaaaaataagaagcgtggagatactgatgatggagaggacgaagcggtagcagaagaagagccgaagaagaagaagaagaaaaataaaaagctacagcagcgtggagatactaatgacgaagaggacgaagtgatagcagaagaagaagagccgaagaagaagaagaagaaacagaggaaggacacggaagcgaagtctgaagaagaagaagtagaagataaggaagaagaaaaaaaattggaagaaactagcataatgactaataaaacgtttgagtcattgtcattatctgataacacttataaatctatcaaggagatgggttttgcacgcatgactcagatacaagctaaagcaattccaccattgatgatgggagaagatgtacttggagctgccaggaccggttctggtaaaaccttagcttttcttattcctgctgttgagcttctttaccgtgttaagtttactcctcgcaatggaactggtgttcttgttatttgcccaacaagagagcttgctattcagtcttatggagtggcaaaagaacttcttaagtatcattcacagactgtgggaaaagttattggcggtgagaaaagaaagacagaagctgagattcttgcgaaaggtgttaatttattagtagctacccctggaagacttctcgaccaccttgaaaatactaatggttttattttcaagaacttaaagtttcttgtaatggatgaggctgataggatattggaacagaactttgaagaagacctcaagaagattttgaaccttctaccaaagactagacagacgtcactattttcagccacacagagcgcaaaggttgaggatcttgctcgggtgtcacttacctcacctgtttatattgatgtggatgaaggacgaaaagaggttacaaatgaaggcttggagcaaggttattgcgttgtgccaagtgcgatgcggttactttttttacttaccttcttgaagagattccaagggaaaaagaaaattatggtgtttttctctacatgcaagtcgacaaagttccacgccgagctctttcgatatatcaaattcgattgccttgaaatccgtggagggatagaccagaacaaaagaactccaacatttttgcaattcataaaggcggaaaccggtattttgttgtgtactaatgtcgctgcccgaggtcttgattttcctcatgtggactggattgtgcagtatgatcctcctgataacccaacggattatattcatcgagttggtagaacagctcgtggtgaaggagcaaaaggaaaggctctgcttgtcctaactccacaggagttgaagtttatacagtatctcaaggcggcgaaaattcctgttgaggaacatgaatttgaagaaaagaaattgctcgatgtgaaaccttttgtggagaatttgatatctgaaaactatgcattgaaggagtcagcaaaagaagcatacaagacatacatttcaggatatgattctcactctatgaaagatgtctttaatgttcaccaactcaatctcacggaggttgcgacttcgtttggtttctcagatcctcccaaagttgctctgaagatagatcgaggagggtacagaagtaagagagaaccggttaataagtttaagagaggtcgtggtggtggtagacccggcggtaaaagcaagttcgagaggtactaaaaatacagttgcacaaacaacgtcatacttagtagtatggcacatgccttttaacgaatgttgtatcttatttttggattcatttacgattgtgttgtcttaagctgtttccagagatatcagacgagataccagttttgtccccgttacttagaaatattgatcattttgttttgcgaataaacttggtcttatatataaacattgcagttttttttaaaaaaaaaacaaccccggcgcagctacagcttcgcagcttcgtcgcg

SEQ ID NO: 1194 - DNA, 1607 bp, Arabidopsis thaliana
  Clone ID: ARATH-23APR03-CLUSTER8102_1
tcactagtcccccccccccccagtctttactcttcgccacatcacagattttgttttcttccgtttctcgaaattcagtttcatcatcatcctctctggatttataaattttcaatctacctttcaatcgccgggggataatcgaaacccgatctgtgtaaaaaaaatgatgaaatcgacggcgagatttgcgtctgattgtcgttataatgatcacaaaagcataaaagcgtgacgtttccgcgtcttcgcgtatctcggaaactttaatccgtatctaaagagctaaatttgaagcgatctttctctttttcttttaatattgttttttttccttgaagcttgcctagtttcgaagttattccatgttttatcttcaattctagatcatagtttttggaaatttaggttttagttttttttgttaagctcgatctggatttgccgatttgaaattttgagtaaatcgcaatgccattacatatgaaaatccaaccgatcgacgaatccgatgtatcggaagaggtaccttacccggagacgatgagacagatgccgaaatcgaggctgaagcgtctctttgagcgtcagttcactaataagaacgtttcggagaaatttaccggctcagatgttgaggcaccgctttcgagaggtaactctggagattttgagccgagctctgtttgtttggccaagatggttctaaattttatggaggacaacaacggcggcgagaaacagcggtgtggacgtagccgatgtaactgttttagcgggagtggtacagagagctctgatgatgaaactgaatgttcttctggtgaagcttgtgagatcctcaagagtttggttctctgtaagagcatccgtgtgaggaatttgctgactgatgtgaccaagattgcggaaacaagttatgatgcggctctatgcaaatctcgctgggagaaatctccttcttgtcctgctggggaatatgagtatgtggatgtgataatgaaaggtgaaagactgttaatcgacatagatttcaaatcgaagttcgagattgctcgtgcaacaaaaacgtataagtcgatgctacaaactctgccttacatatttgtggggaaagcggataggctgcagaagatcatcgttctaatatgtaaagcggcaaagcagagcttaaagaagaaaggacttcatgtaccgccatggaggagagctgagtatgtgaaatccaagtggctgtcttctcatgttcgtgtagaccaaaactcaaatggagaagtcaagcaggaatcagtagaggtgatcgctgagtcggtcagttccatagtcttcggtgtctgaaggtttatatatatggcataaccttcaagagaggtgtgagatataggagtattcgaatcccttaaagtttttgatattaagggtatgttacaggatccatgcatacgtagaagtgtctctcccttgtcttttttttgggtgtaagggagagtgtgatcccactctatggttgttgctctatatgaggattaatagtattttaactactacgatattatacgtttttgtgacatttggtaaatcagagagaaatgtagtgttgatctact

SEQ ID NO: 1195 - DNA, 679 bp, Arabidopsis thaliana
  Clone ID: ARATH-23APR03-CLUSTER8114_1
gaccaacctgatcatcatcaaaaccatttcatccgtagtggtcaatggcggcttctccgttggtggttcagaaaacagaggaggagtggcgtgcggttctttctccggagcagtttcgtattcttcgtcaaaaaggcactgaaaagccaggaactggagaatatgacaagtttttcgaggaaggaatcttcgattgcgtaggatgcaagactcctctttataaatcaaccacgaagttcgattccggatgtggctggccagctttctttgaaggactccctggtgccataaaccgaacccctgatccagatgggagaagaactgagatcacttgtgctgcgtgcgatggacatttaggccatgttttcaaaggagaaggttacggtaatccaaccgatgaacgtcattgcgttaacagtgtttcgatcagttttaacccggcaaaatcttcctctataatctgaggatatgattgatcgatcatacaacatcttctaatcagattgtgttgttaaaattgtcatcatgtagtgaatatgcactttctgtggtggtcaatataatgcaacaaataataagactcattagatattggatggttactggtttctcttaatatgttatagaacatttaataacgatttaattatctaagggatcattactagtgtttcctaaa

SEQ ID NO: 1196 - DNA, 1527 bp, Arabidopsis thaliana
  Clone ID: ARATH-23APR03-CLUSTER8180_1
gccatatccactagctcttgtctgaattggtaaaacaagaagaagaagaagaagaagaagaagaaagagaaggctcattagaaattgatgggtgcttgtatttcgttcttttcttcttcctctccttccaaaacaggtctccatagtcatgccacaacgaacaaccacagcaatggaacagagttctcgtcaaccaccggcgcgacaacaaacagcagcgtcggacaacagagccaattctccgatatttccactgggattataagtgattccggtaaactactggaatcgccaaatctcaaagtctataactttctggatctaaagacggcgacgaagaatttcaaaccggattcgatgttgggtcaaggaggtttcgggaaagtatacagaggttgggtcgatgccacgactcttgctccttccagagtcggttctggtatgatcgttgccatcaagagattgaattctgagagtgttcaaggatttgcagagtggcgttcagaagttaacttcttgggaatgctttcgcaccgaaatctggtgaagttattgggatactgtcgtgaagacaaagagcttctccttgtctacgagttcatgcccaaaggaagtcttgagagtcatctttttagacgaaacgatccttttccttgggatttaaggatcaagattgtgattggtgcagctcgtggccttgcgtttctacacagcttacaaagagaagtcatctatagagacttcaaagcttccaatatacttcttgattcgaactatgacgcaaagctttcagatttcggactagcaaagctaggaccagcagatgagaagtcacacgtcacgactaggatcatgggcacatatggttatgctgctcctgaatatatggcaacaggccatttatacgttaagagtgacgtattcgcctttggtgtggttttactagaaataatgaccggactgacggcgcacaacacaaaacggcccagaggacaagagagtcttgtcgactggttaagaccagaactctcaaacaaacacagagtgaaacaaataatggacaaaggaatcaaaggtcaatacacaaccaaggtcgcgaccgaaatggcacgcattacactctcttgtatcgagccagacccaaaaaaccgaccacacatgaaggaagtagtcgaagtcctcgaacacatccaagggcttaatgttgtccctaaccgttcttccactaaacaggccgttgctaactcttcacgttcttcgccacatcactatcgctataaagctggcgcacttggggctgaacgcaagagagcaacgcctggacggtttggatcagtagaaaaataaatagttgtttggtatcttttttttccggcggtatgaaatgattttagagtctttattgtttcattctctttgaattaattcttgaaaggttttgtgtataatactgtttcttttgtaattctagataaatattttcattcttaaaaaaaaaaaaaaaaaaagggcggccgctctagagga

SEQ ID NO: 1197 - DNA, 1925 bp, Arabidopsis thaliana
  Clone ID: ARATH-23APR03-CLUSTER8242_1
ggatcaaacaaaacaaattcataaattcggagaagagaacgaaaaatcttcttgttggcaaatctccggcgagatcatctttcttattttgttccacggaagtttcagacatggcggccgcgaaactcgtggcgttgttacttcttctcgccttggttttcaatttcaccacttgtatctttgccgacgctggaatcgacggcggcgatgaaccgaaacttagatccgacggcggtgatatcgaattggatcagcttaatgctaaaatccgtgccctagaatctcagattgatgataaaaccaaggaacttaaaggcagagaagagttagtaacagagaaggagaaacttcttcaagagagacaagagaaagttgcttctttggagactgaggtttcttcactaaggaaaaaaggttcatcagattctgtggaactgttgagtaaagctcaagcacgagctactgaattagagaagcaggttgaggtacttaagaactttctggagcagaaaaacaaggagaaagaattgatagaagctcagactagtgaaaccgagaagaagctaaacgaattgaactcgagagtggagaaacttcacaagacaaatgaagagcagaagaacaaaatacgaaaacttgagcgtgctcttaaaatttctgaggaagaaatgttgcggacaaagcatgaagccaccacaaaggctaaggaactgatggaggttcatggggcgtggcttcccccttggtttgctgtacactggagtagttttcagactgttgctgggacacactgggacgcccacggcaaaccagttatggagaaagttactcaaaaggtgacgttagcaaaaaatcaagctgaaaaatgggctaaaccgcacatggctaatgttaaaactaaatatattccagccataaaagagactgttaaaacgcatgttgagccacacgttcaaacactatctaccaaagcgaaagaggcttaccatgcttccaagagtgcggttacaccacatattgtcaagtttcaagaacatgtagatccctattaccaggaggctaaaaagtttagcaagccgtacgttgatcaagtggccacagccacaaaaccacatgttgataaggtgagagctaccatgaagccttacacaacgaagactgtccactattacaaagagttcctggaatctgcctcaacttatcaccaccagcttcaagccaatgtcgaaagtaaactgaagagccatgagctgttggaaccttttgccaccaaagagttcatttggtttgcagcctctgctttgttggccttacccatcttcatagtgtacaaattcctctgttcgctcttctgcacaaagacgaagaagcctatccgacagtctcatcaacatactcgccgtaaggccagaaggggtcattctgacaaatgaagtcacatgctttgtgttgttatcacttcctcgtgctataaatattagaggtaaagacgggttttgatgcgttctctgtgagcctcacctacagtctatatgtttccttcgttgcgtatgaaagaaacagcttatgttagaggtatcttatgggtttttttttaatctcgctgtgcaaaagtgttcttcactctctctgtttttgagatgccttttgaatataaagttttcagtcttttatacagagaagattgacatctagaggaaatctactaagggcttggtttgtgtattttgtgattcatgtggataaatttggtacttgtgccattactctttaaaagcaatcactctttgtcttttatctttttgaaaactttttctcaaaaatcgaaaccaaattgggaattgttacagcttttattttatttgtaactaaaaatcatagagccagcccataattggtttgactagtctttgattcttaaaaaa

SEQ ID NO: 1198 - DNA, 2952 bp, Arabidopsis thaliana
  Clone ID: ARATH-23APR03-CLUSTER824_1
gaaaaaatatcttcctcttctttcttctgctctctctctctctctcgccatgtccactgttcccattgagtctcttctccaccattcttatcttcgtcacaactctagaatctatcgcggaactagaactttcatacctttctcgttgaatctcccttctcatttcacttctaacaaactactacactcaattggaaaaagtgtcggtgttagctcgatgaacaaaagtcccgtcgcgattcgtgctacctcatcggatactgccgtcgtggaaaccgctcaatcggatgatgtcatcttcaaggaaattttccctgttcagcgaatcgaaaaggcagaaggaaagatttatgttcgattaaaggaagtgaaggagaagaattgggagctgagtgttggatgtagtatacctggaaaatggattttgcattggggagtttcatatgtgggtgatactggcagtgaatgggatcaacctccggaagatatgagacctcctggctcaattgccattaaggactatgccatagagacacctttgaagaagttatctgaaggagattctttttttgaagttgctattaatctaaatctggagagttctgtagcagctctcaattttgttttgaaggacgaagaaactggggcgtggtatcagcacaaagggagagactttaaggttcctcttgtagacgatgttcctgataatggaaatttgatcggagctaagaaaggatttggtgcccttgggcagctttcaaacatccctctcaaacaagataagtccagtgcagagactgattctattgaagaaagaaaaggtcttcaagagttttacgaggagatgccaataagtaaacgtgttgccgatgataactcagtcagtgtcactgcaaggaaatgccctgaaacatctaagaacattgtatcaattgaaaccgatttaccgggtgacgttactgtccactggggagtttgcaaaaacggcactaagaaatgggaaattccatctgaaccttaccctgaagagacatctttgtttaagaacaaggcattacgcactcgtttacagcgaaaagacgatggaaatggatcgtttggattattctctctggatggaaagcttgaagggttatgctttgttcttaagttaaatgaaaatacttggctaaattataggggggaagacttctatgtccctttccttacttcaagtagctcgcccgttgaaactgaagctgcccaagtgagtaaacccaaacgaaaaacagataaagaagtgtctgctagtggatttactaaagaaatcatcacggagataaggaacttggcaattgacatttcctctcataagaatcagaagacaaacgtcaaagaagtgcaggaaaacattctacaagaaattgagaaactggctgcggaggcatatagcatatttagaagcacaactccagctttttccgaggaaggtgttttagaagcagaagctgacaagcctgacattaaaatctcctcaggaaccggctcgggatttgagatattatgccaaggtttcaactgggagtccaataaatctgggagatggtacttggaacttcaagaaaaagccgatgagttagcttcacttggattcactgttctgtggttacctccaccgacagaatctgtgtcacctgaagggtacatgcctaaagacctgtataacttgaattccagatatggaacaattgatgagctaaaagatacagtgaagaaatttcacaaggtcgggatcaaagttttaggcgatgctgttctgaatcaccgctgtgcacacttcaaaaatcaaaatggtgtatggaatctatttggaggacgtctaaactgggacgatagggcagtagttgcagatgaccctcatttccagggtagaggaaacaagagcagtggagataatttccatgctgctccaaacatagatcactcgcaagactttgttaggaaggatatcaaggaatggctatgctggatgatggaagaagttgggtatgatggatggaggcttgactttgtaagagggttctggggaggttatgtgaaagactatatggatgctagcaaaccgtactttgcggttggtgaatattgggattcgttaagttacacgtacggagaaatggactacaatcaagacgcacatcgtcaaagaatagttgactggattaatgcaactagtggagctgctggtgcatttgatgtcactaccaaaggaattcttcatacggcgcttcaaaaatgtgaatattggagactctcagacccaaaagggaagcctccaggtgtagttggttggtggccttctcgtgctgtaacattcatcgagaatcatgacactggctctacacagggtcattggagatttccggaggggaaggaaatgcaaggatatgcttacatcctaactcatccaggaacaccagcggtcttcttcgaccatatcttctcggattatcattccgagattgctgcacttctctctctcaggaacagacagaaactccactgtcggagtgaggtgaatatagacaagagtgagagagatgtgtatgcggctataatagatgaaaaggttgcaatgaagatcggaccagggcattatgaaccaccaaacggatcgcaaaactggtctgtagccgttgaaggcagagactacaaggtgtgggaaacatcttaagaagaaggttcccaatttttatgtgtatctagtagtaaataaaattgttcctggaggatatattatttcagggaataagattacctggaaatgttatatttagagtggaattaaaaccagatctaagatttgtcccacttttttcaatgctgagagaatattcatattgttgtattggatgcttgtaaagtgtatgcatatatatatgaataataatatatctatttccgaaattccgg

SEQ ID NO: 1199 - DNA, 6845 bp, Arabidopsis thaliana
  Clone ID: ARATH-23APR03-CLUSTER8263_1
atggcgaacttgggaggcggtgcggaagcacatgccaggttcaagcagtatgagtacagagccaattctagtctggtgttaactactgataatagacctcgggatactcatgagcctacaggagaaccggaaactctgtgggggaaaatcgatccgaggtcttttggtgaccgtgttgctaagggaaggcctcaggagttggaggataagctgaaaaagtctaagaagaaggaacgtgatgttgtagatgatatggtaaatattaggcagagtaagaggcggcgtctaagggaagagagtgtgctgactgatactgatgatgcggtttatcagccgaagactaaggagacgagggctgcttatgaagccatgcttggtcttatccagaagcagttgggtgggcaacctccgagtattgttagtggtgcagcggatgagattttggctgttctcaagaatgacgcatttagaaaccctgagaaaaagatggagattgagaagttgctgaacaagattgaaaaccatgagtttgatcagcttgtttccattggaaagttaatcacggacttccaagagggtggtgattctggtggtggtagagctaatgatgatgaagggcttgatgatgatttgggcgtggctgttgaatttgaggagaatgaagaagatgatgaggaaagcgatcctgatatggttgaagaggatgatgatgaggaggatgatgagcctaccagaactggaggcatgcaggttgatgcagggataaatgatgaggatgcaggagatgccaatgagggcacaaatcttaatgttcaagacattgatgcatattggctccagagaaagatctctcaagcgtatgaacagcagattgatccacaacaatgccaggtactcgcagaagagctactaaagatactcgctgaaggggatgatagggttgttgaggacaagctgcttatgcaccttcagtacgaaaaatttagccttgtcaagtttctgctgcgtaaccgtcttaaagttgtgtggtgcactcgtttggctagggcagaagaccaggaagagaggaatagaatcgaggaggagatgagggggttaggcccagagttgacagcaattgtggagcagttgcatgcaacaagagcaacagcgaaagagagggaggagaacctgcaaaaaagtattaacgaggaagcccggcgtttgaaggacgaaactggtggagatggaggcagaggcaggagagatgttgctgatagagattcagagagtgggtgggtgaagggtcagcgtcagatgctggacctggagagcttggcttttgaccaaggtggtcttctgatggcgaataagaagtgtgacctcccccctggctcttacagaagtcatggcaagggatatgatgaagttcatgtgccttgggtttctaaaaaggttgataggaatgagaagctagtgaagattacggaaatgcctgattgggcgcaaccggcttttaagggaatgcaacagttgaacagggttcagagcaaagtgtatgacactgcgcttttcaaggcagagaatattcttctttgtgctccaactggtgctgggaaaaccaatgttgctatgctcaccatactgcagcaacttgaaatgaataggaacacagatggaacttataaccatggagattacaaaattgtctatgttgcacccatgaaagcccttgttgctgaagttgtaggtaatttgtctaatcgtctgaaggattatggagttattgtgagagaactcagtggggatcagtccctaaccggaagagaaattgaagagactcagataattgttacaacaccagagaaatgggatatcatcactaggaagtctggagaccgaacttatactcagcttgtgagacttcttataattgatgaaattcatctccttcatgacaatcgagggcctgtgcttgaaagcattgttgctaggactcttaggcaaattgaaaccacgaaagagaatattcgtctggttggtttatctgctacattgccaaattatgaagacgtggccttatttttgcgggttgatcttaagaaaggtttgtttaaatttgaccgcagctacagacccgtgcctctccatcagcagtatattggaatcagtgtgaagaaaccgttgcagaggttccagttgatgaatgatctttgttatcagaaagtattggctggtgctggaaagcaccaggtccttatttttgttcattcaaggaaggaaacatcaaaaactgctagagcaataagggacactgcaatggcgaacgataccctcagcagattcttgaaggaagatagtgtaactcgtgacgttctccatagtcatgaagacattgttaagaatagtgacctaaaagatattctgccttacggttttgcaattcatcatgctgggttatcaaggggtgatcgtgagattgttgagactcttttttctcaggggcatgtgcaagtcttggtttccacagcaactctcgcatggggtgtgaatctgcctgcacataccgtaattataaaaggaacccaggtgtataatcctgaaaaaggggcgtggatggagctgagtcctctagatgttatgcagatgcttggtcgtgctggaagacctcagtatgatcaacatggggagggtataattataactggctacagcgagctgcaatattatctttctttgatgaatgagcaactacctattgaaagccagtttatttccaaacttgctgatcagcttaatgctgaaattgtgcttggaaccgttcagaatgctagagaggcttgccattggcttggttacacgtatttgtatatccgtatggttcgtaatccaacgttgtatggcttagcgcctgatgcccttgcaaaagacgtagttttggaggagagaagagctgacctgatacattcggctgctactatcttggacaaaaacaacttggttaagtatgacaggaaaagtggatacttccaagttacagatttgggacgcatagcaagctactattacataacccatgggaccatagctacatacaatgagcatttgaagccaacaatgggtgatatagatctttatcgtctgttctccctgagtgacgagttcaagtatgtgactgttcggcaagatgagaagatggaactggcgaaacttttggatcgtgtcccaattccgatcaaggaaactttggaggagcccagtgccaaaataaatgtattgctgcaggcatatatttcacagctaaagcttgagggtctttctttgacatctgacatggtttacattacgcagagtgctggacgtcttgtgcgagctctttatgaaattgtattgaagcggggatgggctcaattggcagagaaggctctgaacttgtctaaaatggtagggaagaggatgtggagtgttcagacacccctgcgtcagtttcatggactctccaatgatattttgatgcagttggagaagaaggatttggtgtgggagaggtactatgatctatccgcacaggagctaggagagcttattcgcagtcctaagatgggcaagccgcttcacaagttcattcaccagttcccaaaagtgactctttctgcacatgttcagcctattactcgcactgttctgaatgtggagcttacagttacacctgatttcctgtgggacgagaaaattcataaatatgttgagccgttttggataattgtggaagacaatgatggtgaaaagatccttcatcacgagtattttcttttgaagaagcagtatattgatgaggatcacactttgcacttcactgtgccaatttttgaaccgttgccacctcagtattttgttcgagtggtttcagacaagtggcttgggtcggagactgtgttgcctgtatctttcaggcatcttattcttccagagaagtatccacctccgacagagttactggacttgcaacctctcccagtgacggcgctaaggaatccgaattatgagatactctatcaggatttcaagcatttcaatccagtgcagactcaggtctttactgttttgtataacactaacgacaatgtgttggttgctgctccaacgggaagtgggaaaactatttgtgcggagttcgctattttgaggaatcatcatgaaggacctgatgctacaatgcgtgttgtttatattgcaccacttgaggctattgccaaggagcagtttcgtatctgggaggggaagtttgggaagggtcttggtttacgggttgttgagctaactggggagacagcattggatcttaagctgcttgagaaaggccagataatcataagtactcctgagaaatgggatgctctttcccgcaggtggaaacagagaaaatatgttcaacaagttagtcttttcatcgtcgacgaactccatctaattggaggtcaacatggtccagtgttggaggtaatcgtttccagaatgagatatatttcaagtcaggtcattaataagatcaggattgttgcgctatccacttcgcttgcaaatgcaaaagatcttggggagtggattggggccagttcccacggccttttcaacttccctcccggagtccgtcctgttccactggagatccacattcagggagtggatatatccagttttgaagccaggatgcaggcgatgaccaaaccaacctacaccgccatagttcagcacgccaagaacaagaagccggctattgttttcgtcccaacccgtaaacatgtccgcttgactgctgtggatctgatggcttattctcacatggataacccgcagagtcctgatttcttgttagggaagctggaagaactggacccttttgttgaacaaatccgcgaggaaacactgaaggagacactgtgtcatggtattggatacttgcatgagggtttaagcagtctggatcaggagattgtgacacagctctttgaagctggacggattcaggtttgtgtgatgagcagttcattgtgttggggcactccattaactgcgcatttggtggtcgtaatgggaacgcagtattacgatgggagggaaaattcacattctgattatccagtccctgatctgcttcagatgatggggcgtgctagccgaccacttcttgacaatgccgggaagtgtgtgatcttttgtcatgcaccgcggaaggagtattacaagaagtttttgtacgaagccttccctgtggaaagtcagctccagcatttcttgcatgataatttcaacgcagaagtggttgctggggttatagagaacaagcaagatgccgtggattatcttacatggactttcatgtacaggaggcttccccagaaccctaactactacaatctccaaggtgttagccacaggcatttgtctgatcacctatcagagctggttgagaacaccttgtctgatcttgaagccagtaaatgcattgaggtagaggatgagatggaactctctcctctcaaccttggtatgattgcatcctattattacatcagttataccaccattgagcgcttcagttcactgttgtcttctaaaaccaagatgaagggacttcttgaaatcttaacatcggcttcagagtatgacatgattcctatacggcctggcgaagaggacaccgttcgaagattaatcaatcaccagaggttctcttttgaaaacccaaaatgcacagaccctcatgtgaaggcaaacgcgcttcttcaggcgcatttctcaaggcaaaacattggcgggaacttggcaatggatcagcgtgatgtccttctatctgcaaccagacttcttcaagcgatggtcgatgtgatatcaagcaatggctggctgaatcttgctctgctagctatggaagtaagccagatggtgactcaaggcatgtgggagcgggactccatgcttctgcagctccctcacttcacaaaagacttggccaagaggtgccaggagaatccagggaaaaacattgaaaccgtattcgatcttgtggagatggaggatgaagaacgccaagagcttctcaagatgtcagacgctcagcttctagacattgccagattctgcaaccgcttcccaaacatcgaccttacttacgagattgtgggcagtgaagaggtgaacccagggaaagaggttacattgcaagtgatgcttgagagagacatggaggggaggacagaagtgggacctgtggattcactgaggtatcccaagaccaaagaagaaggatggtggctggtcgtgggcgacaccaagacaaaccagttgctggcaatcaagcgtgtctcattgcaacggaaagtgaaggtgaagctggatttcacagcaccgagtgaaccaggagagaagtcatacacactatacttcatgtgtgactcttacttggggtgtgaccaagagtactcgttctctgttgatgtcaaaggatccggcgctggagatcgcatggaagaatgatttgttattcaggctatgctgattctggagagtgtgacttgtcttccaaaaagcctccgtaccgtttgggtctctgcaatcttagctctctgagaatatatattaaggtgtaatcgtttttttctggtcttttactattccaattactctttttatgtcgtgcatcgatttttaatcctatgtatggcttgtttctagttttgtttggaccaaactcgacagaggagccaatgtcaaaactacaatttgagtttgtgactttgaaagctgagattacttgaaagaattttaaatgcagcagtgttcattttgtaagggcggccgcaaaa

SEQ ID NO: 1200 - DNA, 1695 bp, Arabidopsis thaliana
  Clone ID: ARATH-23APR03-CLUSTER8271_1
ctctctgggtttttcgaggttgcggtttgctttcatctgcccaaccttctagggttttccttctcttaaagcttatcccttttttttgccctctgggtttttcgaggttgcgtttgctttcatctgcccaaccttctagggttttccttctcttaaagcttatcccttttttttgccttctctcgatatggctggagccgcttcttctgatcgtctcgtcactagcttccctcttctggatccttatggtttgtttcaggacttgtctttaggttcagatgcaaatgaagttcctatgaactttactaagggttcttttcagcatccgtatggtcatgcaccttctgggcaatcttctcatgtaagggctaccctgatccgaggtttggttatgaccgcaacagcaatcacagttccttttcacatctcatgaatccacacagctcacaagaagtaccaagttttgaccaattgggatataatgatcatttgtattccaaccatggattgtatggactttacgggaatgtaattgactctggtcatgcatatggaacttttggttatgattcctggaaacttgggcgaggatggtatcccgttgatggttatagaaagaccagaagcttcaatcatgggcgtggttacagtgatgagaaagcagataggcttaatgagctatgtcgaggaccaaggagtagtgatttcaagaatccacaagttcttaactcttcaatgctagatgcaatgaagcaagacgtttcagcagtagatctccagcgctacaatggggagaatttccctgaatcatttgtgaaagcaaaattctttgtgatcaagtcatacagcgaagatgatgttcataactgtattaagtatggtgcatggtcgagcacaccaactggcaacaagaagttgaatgctgcatattatgaagccaaagaaaactcccaagaatgccctgtgtatcttctgttctcggtgaatgcaagtgggcaatttgttggtcttgcggagatggtaggccctgttgatttcaacaagacaatggagtattggcagcaagataaatggattggttgtttccctgtgaagtggcatatcatcaaagacataccaaacagtctcttaagacacattaccctggcgaataacgagaacaagcctgtcactaatagcagagacactcaagaggtgaatctggagcatgggaccaagatcataaagatcttcaaggagtatatgagcaagacatgtatacttgatgattacaagttctatgagacaaggcagaagatcatcagagacaagaagatcaagcaaaagaaacaggcccttgatggagcttcgggggaaacaattaacttgagttgaaagatggaatcaatgcaaggaaagaagaagatgacttaattaaaagaacttagttttgaattatgttttttcttcagggttgggatttctaaaaacctaatacacatctttaatctgtgtgttttctctgcttatctaaacaaaacttacattgtcttttgttcctcttaaggggacgcacatctgataaaacaaaaactcaggctttccttcaaaaactgcttatctaaacaaaacttacattgtcttttgttcctcttaaggggacgcacatctgataaaacaaaaactcaggctttcctccaaaaaaaaaaaaaaaaa

SEQ ID NO: 1201 - DNA, 1364 bp, Arabidopsis thaliana
  Clone ID: ARATH-23APR03-CLUSTER8320_1
attttggtgacagtctcttttttgtttaacactttgctcctctcccccccctgtagtcccattgttcttcatccctctccatctgtctctcatagatccatccatggcttccttcgtggaatctggttggcagtaccttgtgtctcattttacctgttttcaacttgcatttattcggagttttgtgcttctctgaactcgtgttttttttatttggaagcaccttctttcttatttaagggaatttccaactggcgaagtaaatgagtgtttcatacttcatgaaagcgtgtttttcttgtctggattcccttacattttcctagaaaggactggttttctgagcaactacaaaattcagaccaaaagtaatactcctgaagcccagggaaaatgcattgctcgactattactttaccattgctgcgtaaacttgcccctcatgatggcgtcgtatcctgtattcagattcatgggcatggaaagcagttttcctctgccgtcctggaaagtggtgtctgcccagatcttattctacttcatcattgaggattttgtattctattggggtcacaggatcttgcatactaaatggctctacaagaacgtgcacagtgtgcatcatgagtacgcgacaccgtttggtttgacatcagaatatgctcatcccgctgaaattctgttccttggttttgctaccattgttggtccggctctcaccgggcctcacctgatcaccctttggttatggatgatgctcagagttattgagacagttgaggcacattgtggttatcatttcccatggagcccctcgaattttcttcctctatacggcggtgctgacttccatgactaccatcatcgattactctacacaaagtctggcaactactcatcaacgtttgtttacatggactggatctttggcaccgataaaggttacagaaaacttaaggccctaaaagaaacctgacaacaaacaaacgtgaaattcgattcccgagagaggtcttgttctcaaaaaaccttctttcttttgttttgtctctaccatttcctcaactttagtcataagaacatcattatttgctacaatttgggttgtacaatcaaagctgctagtctgaagtcgattcgatgttgaaatttatacgtgacctcgtttctattggaaaaaaaaaaactaaaaaaaaaaaaaaaaccctcgaggggggggccgggacccatttccccctataggggaccgtattaccgcggctcactggccggcgttttacacggcgggactggaaaaacccggggttcccaatttatgcgctggaagaaatccccttttcccgtggggaaaaaaaagaaaggcc

SEQ ID NO: 1202 - DNA, 1391 bp, Arabidopsis thaliana
  Clone ID: ARATH-23APR03-CLUSTER8450_1
agattaatctaaaaacatgaaacgaaagcagcaagaagacgacaacgacgacggcgtagagaaagccgtctctcccgtcctcgccactacctcaaacaccatgagtactgatctacttttacagtcatcttctaaactatcacagaaacaggactacatcttccatggaggaagacgccatgtgagaccttactacttcgagttcatttctcatgtgaacaaacgatggactggaaaaacaattgtggatttgtttgctgatgaatttaaaggacggcctcgtgattattatgttggtgcagtcaaatctggaagaatcaaagttgatggagaaattgtaccggtttcatacattgtgaaatcatcccaaaagattactcacttcctccacaggcatgaaccaccggtgatgattgatgatgttgtgatccttcatcaagaacctgacgttgttactgtctgcaaaccagcttctgttcctgtgcatccatgtggtcaataccgtaagaacacgattgttggcatccttgatgctgagcatgacctaggaactctattttctattcacagattagaccgtttggtttctggattgcttatcatagcaagaactgcggcaaaagctgattttttcaggcaacagattgagggtggaatggtgaagaaacgttatattgcaaaggttattggcgtgttcccagaagatgagatgatagtcgacgccaacataaattataatggcagcgaaggaagaagtacagcagaggacgccaattcaagtggtgacgataagaaggtgaaggggaagcctgcatgcacgaagttcactagaatcgatacaaatgggactcatagcctcgtctcatgtgaaccagtgacagggcgaacccatcaaatacgagtgcatctacaatatacagggcatcccatagcgaatgaccctctttatctcaatcaacacatagataatcttgagacctacattgcaaaaagaatcgatgcgggtgagagaaagattgtctccccagatgactacgtgtattcaagcgaagatttcagcatcgatccaatgtgtacgaactgcccaaagttgatcccacaaggatatgaggagcatgacgaggctctctggttacattgcgttcaatactgtggaactggatgggaatacgaatgtccttatccatcttgggcatccctttagcttacaattatttgacactgtaattcttgttaccaacacttgtggcaactgtattgtatacattgttctacaactatgctgattagtgcttacatggaagggtatcaagttgattcattgtattcaaagattctttcatttatcgattcaaagttttatgtcattatcataaaaaaaaaaaaaaaaa

SEQ ID NO: 1203 - DNA, 1496 bp, Arabidopsis thaliana
  Clone ID: ARATH-23APR03-CLUSTER8464_1
agatcgatttgagaattaaatctcctagatattgtatatgaaaatttgcacagaacctataggactcgacaaatagaagaagcagattcgttgctaacgaagtaaaggatcttacttttttagtctttgctttagaaataacttataactacaagtcagagaggggccgagtaaatcggaaagatgacggcgccgatgatcctgaccggaagtggatcggcggcggagagagacgctcggatggcgcacactgctatggcgtttgttcagctctttaatggtggataccatgtgattactaaagtagctcttaatgttggagtcaaccagcttgtcttctgtgtatgccgtgatcttcttgctctctctattctcgctcctcttgcttacttccgcgaaagaaagatcagaactccaatgaataaaagccttctcttgtcattcttctttctgggcttagcaggggtatttgggaaccagttgttatttcttatcggtcttacatacacaaatcccacttatgctgctgccattcaaccatccatcccggtcttcacctttctcttggctgtcatgatgggtacagaaagagtgaatttgttgagaatcgaaggtcaaactaaggttggaggcacacttgtgtgtgttatgggtgctgtcttcatggttgtatttcgaggtccggccttgttaggagataaagatgcagactttgcgatgaacaatgaaatcagtgctaaaggtcaacctgagcctactggttggttagtctctggttttctcgatcttggatttgagcaatggcacattggagttttatgcttgattggaaactgcatgtgtatggctacttttcttgccattcaggcgccacttttgaagaagtatccggcaaatctttctgttgctgcattatcatacttctttggcacagtactaatgtgcacaacagctttctttatggtaaaggagccattggattggaagctaacacaatctgaggttcttgcagttatatatgcaggagttatcgcatcagcactaaactatggactcttgacttggtccaataagattattggtcctgccttggttgctctctacaatcctcttcaacccgctgcatcagctttcctatcgagaatctttctcggtagccccatttatctcggaagcgttgtgggtggattcttcatcattctaggactctatatggtcacttgggcatcgtttagagagcgaaaaacagcggtttccgggattgggattgcgccccatggtctaaaaacctcagagcctctgatatttaatgggacagttaacagactaggacagttgttttctggattacccagttcctctgtgaaatctgcagactaaaaagataccaaaaagttaagattcagacgagatcccattttacaacagctataactttttgttaactttcatctcttattaatatcttcttcgattactacaaaaaaaaaaaaaac

SEQ ID NO: 1204 - DNA, 2038 bp, Arabidopsis thaliana
  Clone ID: ARATH-23APR03-CLUSTER8467_1
tcactagtcccccccccccccaagtcttgtggagtaaaaactgggtttcacacacttcgcttgcctctcaatacccgggaaaacaaaatgtcggtttcacttgctacttttcccggaaagttacaaagtcattcccttttcaggttgtgaagtcacattaacataagagaagaagcaaaaaggcttggagctttattttttgcttttttttttctttcttctagaaaacatgatcttgagtttccgagtaagattcttttaaaaagagtttgcaaagaacgagaaaaatgatggctctgatgaattgtgcatattcatcttcttcttcgtcttcgtctacttcctctcccacttcttcatcatcttcttcttcatattctccaaggaacagagagagcatgtttttgcagagtgtagttgatgcgtcaccttcaagtttctcttccgacagaaaatctattttaccaattgagaagactttaataagacatcagaattccagtctctgcttgatcccaaagtcttcagaagaattgaagaaggagattgcatcaattgagatagagattctacacatggaacgatatctcttatctctttacagaaaatcatttgagcaacaacttcctaattccttctctaatctctctgttactactaccttacctcgttctgtgactacttcaccaacatcactaactcattatcaagcttaccaaaaaccaatctcatatcctcggagtttcaacactagtttaaaagccttatcttcaagggaagggactagagtagtttctggtactcacagtcttggagagcttttaggatcatctcatatagttgatcataacaacttcataaacccgaataaactctctgaagatatcatgagatgcatttcttctgtgtattgtacactttcaagaggatcaacgagtaccacttccacttgttttcctgcttctccggtttcctccaatgcctcaaccattttctcttccaaatttaattatgaagataaatggagcttgaatggcgcaagtgaggatcattttctgaatcactgtcaagatcaagacaatgttttgccttgtggtgttgttgtcatagaggctcttagagtacatttagacgatggtagtttcggttacgctgctcttatgcttcaaaacttcagatcactggttcaaaatcttgagaaagttgatccgagtagaatgaaacgcgaagagaagctcgcgttttggataaacattcacaatgctcttgtgatgcatgcttacttagcttatggaactcacaaccgcgcaagaaacacatcggttttgaaggcagcttatgatattggaggctatagaataaacccttatatcatccaaagctcaatcttaggaatcagacctcattacacatcaccatcacctttactccaaactctgttttccccttcaagaaagtcgaaaacttgcagtgttagacacatttacgcattggaataccccgaggctttagctcatttcgctatttcttcaggggcattcactgatcctacagttcgagtttacaccgcggatagaatcttccgggatctaagacaagcgaaacaagagtatatcagaagtaatgttcgtgtttacaaagggacaaagattttgttgccaaagatctttcaacattatgttaaagacatgtcaatggatgtgtctaagctcatggaagcaacatctcaatgtttaccagaagatgcaaggaaaattgctgagaaatgtttgaaagagaagaagagtaagaattttgaatggttaccggaaaatttgagcttccggtatgttatcgccggagaattggtcggagcaagaaataagacgtgaagggtttattcaagaaaagtgttttttttttgcctcctgatgtgattaaataatctgattacaattagtgttcaatttcattttttttttcaagtgagaaattgtaaaaccagtgtttgtttgtataatcttaataaaccgagaactactaaatactaattaaggta

SEQ ID NO: 1205 - DNA, 665 bp, Arabidopsis thaliana
  Clone ID: ARATH-23APR03-CLUSTER8475_1
gagattaaaattgaatcaagacaacgaaaattaacaatggcgactaggtttttggtgaagagactcacggcggtgaatgtttcaagaactcctgggggagatttctccggttatgctctccgacaagctacaatcggaatcaaccacttctcaaccggatttaagcaaacggagggctctactcatgacgataagtccacgacgagttacgtggcagacaaggcaaaggaaggggtgaagaaagcgaccgacgcagccgtcagcacgggtgataacatgaaggatgcgatggatggtgcgtggaaagcggctaaggaaacgggtcaaaacattagcgatgcggttacgggcgatgatgatgacggcagaattcaagaggataaggtcgcagtggaattgaaggatgtgcaacagcctgtggatacgacggagtatagaggtgtggaggatctacatcagcaaaccggcggagaagttaagtcaccctaagctaatgtgttagggtgtctatcctttctttcattgttgtttcagtgagaggttgcttgtgcctcgtggttcaaattaaaggtttatgaatggaccgtggcccgccccgcactacaatttactcttattactagttgaactaaagcaaaataaacaactactccgattctccgaac

SEQ ID NO: 1206 - DNA, 2374 bp, Arabidopsis thaliana
  Clone ID: ARATH-23APR03-CLUSTER8481_1
gagggttactaatttgggaattttactgtccaaaacgaatcaaaaaaaaaaatctaagctttttgttccttttgcggcttttcgtcgtcttccttgcactatcttccttctgtagcatcaattcgtttccaaggttacgtagtagaatttacgcgagagagcgagagatcaaaaaccataaccatcttaagttacaatgagctcgtatgatcgtagatttgctgatccaaattcgtatcgccaacgctctggcgccccagttggttcgtctcagccgatggatccttccgccgcaccatacaacccacggtacactggtggtggtggaggatatggaccatctccggtaatggccggtgataattccggctataatcggtacccatctttccagccacctagtggcggtttctctgttggccgcggtggtggaagaggtggatatggtcaatacggcgatagaaacggcggagggaattggggaggaggaggaggacgtggcggatcgagtaaaagagagctagatagtgtttctcttccgaagcagaattttgggaatcttgtacattttgagaagaatttctatgtggagagtcccactgtgcaagctatgacagagcaggatgttgcaatgtacagaaccgagagggatatatccgttgaaggtcgtgatgttcctaagccgatgaagatgttccaagatgctaactttccagataacattcttgaagcaattgctaaattgggatttactgagccaacacctatacaagctcagggatggccgatggcgttgaagggtagggatttgattggtattgctgagactggctctggtaagacattggcttacttgttaccagcattggttcacgttagtgcacaacctcgattaggtcaggatgatggccccattgtgttaatattagctcccacaagagaactagctgttcagattcaagaggaatcaaggaaattcgggttgaggtctggtgttagaagtacttgtatctatggtggtgctcctaaaggacacgagtggggtgatcttagaagaggtgttgagattgtaattgctacacctggtcgtttgattgatatgttggaatgtcaacacactaatttgaagagagtgacttaccttgtactggatgaggctgacagaatgttagacatgggatttgaaccccaaattagaaagattgtatctcagatccgacctgatagacaaacacttctttggagtgcaacatggccacgagaggttgaaactcttgccaggcagtttctacgagatccatataaggccattattggatcaacagatctaaaagctaaccagtctattaaccaagtaatcgagattgtaccgacgccagagaaatacaacaggctccttacactacttaaacagttaatggatgggagtaaaatcctaatttttgtggagacaaagagagggtgtgatcaagtgactagacaattgagaatggacggatggccagctcttgccatacatggtgacaagacccaatcggaaagagaccgagtcttggcagaatttaagagtggacgaagcccgataatgactgccactgatgtagcagcaaggggacttgtttcctctggtattagggaaaaaagcacatagaaagaaaaaaggagcttctttgaagaatttgtttcctgcatccatctcccgggcatggagctgattggtttttgagcagcctgggcgactgacacctgcatgcattaatagtgttataacgccgtcccaaacactccttatccctgcaagttaagatgtgaaggacattaaatgtgtggttaattatgatttcccaaatacattggaggattacatccataggattggtcgaaccgggcgtgcaggagctaaaggaatggcctttacattcttcacacatgacaatgctaagtttgcgagagagcttgtcaagatccttcaagaagctggtcaagttgtacctcctactctctccgcactagtccgatcatctggttctggttatggaggttcaggtggtggaagaaacttcaggccaagaggaggaggacgtggtggtgggtttggagataaacggtcaagatcgacttcaaactttgtacctcacggtggaaagaggacttggtaaagagaatcccatcattttgattctatgagaaaacctttaattatgatgatgatgatcagcgtttggtttcgactagaagttctttgtcgtagagaacaaacatttactatataactatttagctgatttcgctgcttcttcttcttcttcttcatgatatttctaaacattttgcctttttcttaattctatcaactaaatacactctactagtt

SEQ ID NO: 1207 - DNA, 2434 bp, Arabidopsis thaliana
  unsure (1)..(2434): unsure at all n locations
  Clone ID: ARATH-23APR03-CLUSTER8483_1
atctccatacttaggattttttgttaaactctccaagagaaaaacataaagttccaacctttttagtttccaacttctcttgaaacctaattttgattacagtgagtggatatcgtaaatttgtggctttctcgagtttctgagattttgagctaaacactctgcttaaacctcaagttcttacctttttactcttagtagagttgcaaagtttaatcctttgataaaatctcccgagattccgagtttgtctcccatgaggatttgaataccgaagaaaaaatgtcagtggaaagatctttggaagcttgggaagaagttcagagacatggacaagacttagctgaccgacttgctcagggctttaacggtttgattcaaatcaacccaccttcatttccatcgaagctatttgatcttgagttctctagtcagcatttcgggattagggattctaggttttctatccaccaacccatcaatggcgtttcggctattcttgatattgggaacaagattggtcaagcgggtgttgattttggctctggattgaatgtgatggttcagcagttcttcagacggttgcctgtcccgttccgacacgatgagaacgtgtttgtttctactgagagagatactgtcacgaggagccatagggcttatgtagacacaaaggagaactcagcgttttctaagacagatactgcttcctctggtactgtgtatgaggagaaagttacagaattcgatttaaggactattggattacataggagagcaaagggaacggttgagctatcatcaagttatgaaactaggacaagtagtatggaacattcgttagcagccaggggagatctttggagagtagaagcttctacttcaaattcccctgtgagagatgatagctcgtctctctttctactccagcttggacctctgttatttctgcgcgattcaactcttcttttgcctgttcatttatcaaagcaacacttgctctggtacggatatgatagaaagaaaggtatgcattcactgtgtccagctttgtggtcaaagcatcgaaggtggcttatgatgtcaatgctctgcctcaatcctttagattgctcatttgtagacttgcaattcccaaatggacaattaacatatgtttctggtgagggattgacgacaagtgtctttgttcctttatgcggcggtctccttcaagcgcaaggtcaatatccaggagatatgagattcagtttctcttgcaagagtaaacagggaacacgaatcacaccgatgataaactggcctgacaaatcattggcattgggtgtttctcaagccttggcttggcgtaggtccggtgtcatgttgaaacctgcaattcaacttagtgtgtgctctacatttggtggaagcaatcccgggattaaaaccgaagttattcagtcgttgaatgataatatcaatatgatatgtggctgtgcattcacagctcatccttcaacatttgcatctgtttcctttggtcggtctaagtggaatgggaacattggacgaacaggaatagttgttagagctgatactcctcttccaaacgttgctcgaccttctttctccattcagatcaacaatgctttcgagttctgaaaatatgtaagggcaagtttttggtttgtgtagtctcgtcaaaagactatattgtatatagtaaattaaactcatcaatccaacagagaaatttcacagcgtaataacgattcaattttgaaagttgatatgttggtaaatactgttgtgtttgtagattgaataaaagaatatatacaattcattactcaatctccacatcagtaagatcatctaacagtctcctcgacgaagatgatgaatttccttcttcttgctgtaataggctaacatctttgctcggatcagagaaggaagaatcgacccaaggaccgtccatcgaggaggagcttttgtgttctttgtttcttgtataggttgagacttgtgactcgctgtcttgtgacacatgctctaaggccttaaacctcattgcggctgaaccacttggatcagcttcacgtttcaccagtggtggttggactttgatttttccttgtagcatacttacaacagatgacatcggtggtctcaatgttggagatgggtttgtacagagtaaagctatgttcaacatcctcattggggctttctttctaaagggggagggagancnggatccacgagttctagaagactcccttgctcttgcaagacatatgcccagtcaagaaggtaaataaactcttcttttggtctgtaatttgggttgctctttccggtaacaatctctaaacagactacacccaagctataaacatctgctttgtctgttaaagaacctctcatttgcatactctggagccatgta

SEQ ID NO: 1208 - DNA, 2135 bp, Arabidopsis thaliana
  Clone ID: ARATH-23APR03-CLUSTER8510_1
ggtagtatcagacagatcgaaaatcgcaacggttaagattccagctactgaaatctatcaacgtcgaagaagtgaacgatggggaagaaacaacacagcaaagatcggatgttcataacgaagacggagtgggcaacagaatggggaggcgctaaatccaaagagaatcgaactcctttcaagagtcttccttactattgctgcgcgcttacgtttttgccattcgaagatcctgtgtgtacaatcgacgggagtgttttcgagataacaacaatagtgccttacattaggaaatttggaaaacatcctgttactggagctccattgaaaggagaagatctaattcctctcatctttcacaagaactctgaaggagagtatcattgtcctgttctaaacaaagtcttcactgaatttacacatattgttgctgtcaagactactggaaatgtattctgctacgaggcaatcaaagagttgaatatcaaaaccaagaattggaaggagcttttaactgaagaaccatttacaagagccgaccttataacaattcagaatcctaatgcagttgatggtaaagtgacggtggagtttgatcatgttaaaaacggtcttaagatcgatgatgaagagttgaaaaagatgaactcagaccctgcttataatataaacgtgtctggagatatcaagcacatgcttgcagatcttggaactgataaagctaaagagattgctttacatggtggaggtggaaacaaggcacgtaatgaaagagccgctgctattgctgcgattctggagtcaagatcgaaaatcaaagaggtttctaaagcagaacaaccgaaacagacctacagtgttgttgatgctgcatctgcttcggtttttggaagaagtgctgatgcagctaaagctggttctagtgataaaacagctgcaagaatagctatgcatatggctggagatagaacacctgttaattctaaaatggtgaagagccgttattcgtcgggtgctgcttctcgttctttcacttcctctgcctttactcctgtaaccaaaaacgattttgaactaattaaagtcgagaaaaacccgaaaaagaaagggtatgttcagtttcagacaacacatggcgatttgaacattgagctccattgcgatatagctcctagagcatgtgagaatttcatcactctctgtgaacgtggttactacaatggagtggcctttcacagaagtatcaggaacttcatgattcaagggggcgatccaactggcacaggaaaaggaggtgaatccatttgggggaagccattcaaagacgagccaaactcgaagctgcttcactcaggaagaggcgtagttagtatggctaatagtggacctcacacaaatggttctcagtttttcgtcttatacaaatcagcgacccatttaaactacaagcacacagtgtttggtggagttgttggtggtttggcaacactagcagcaatggagaatgtacctgtagatgaaagcgaccgtcctcttgaagagattaagataatcgaggcaagtgtgtttgtgaatccatacacggagcttgatgaagaggaagagaaagagaaagctgagaaagagaagaatgaagacaaagacattgagaagatcgggtcgtggtacagcaacccgggatcaggaacaacagaagctggagcgggtggcggtggtgtcggaaaatacttgaaagctatgagtagtacagccactaaagacactaaaggttccctagactcagatatttcaaccattggagtgtctaagaaaagaaaaactactgcgtcagcctccacagggtttaaagatttctctagctggtaattgaaaacattctctacctactttgtaaaaccgttgactagttttgatagagaccaagtcacaaaagcatttgtatgacaacactgagcctttgatgtccaaaatctggagctgtgtaataaagttgactagttttgatggagcccaaaagtcacaaaagcatttgtataacagcccaagtcacaaacgcatttgtataacattgaacctttgatgtccaagagctgaggctgtatcttcagtaaaaagatttattaagtataatcctc

SEQ ID NO: 1209 - DNA, 2682 bp, Arabidopsis thaliana
  Clone ID: ARATH-23APR03-CLUSTER8515_1
gagtcagataaaaattagggtttcagattggtttcagtttatctcttcatttccacccagtttatagccggtgcctcctcctcccctcctcctcctcttcctcaaccaaagcaaagacattccaattgtattctatttttgttgactaaatcatgagtaaatcgtctttgaagacatgctaattgttgctagtctatttgttctcaatcttgtcattccctacatttacaaagaatcctgttttgctggttccagtttttgaagtctgtcactagatcctagacgactactaggttacgctttcctgtgagaaggaaagtgctggttgtgaagcgcacgctagaggtcctgctcaagtttttaggtggtttcctataggagacttgctgctaaggtatgctgtcgagctttgtgatcctttggaatttgcatgctcgaggtgctgtgctggttttcgatagagcttttctattaggagaattgcaaggatcgatggcatgcactgctttatgatccagtagtttctgtagaggcggcttttcggatggctgagcttgaacgtactaaccctaattttcctactaagtttggtagaactggatattcaaaagaaaacaaaagttcatctaggaagaggaatgctgaaaggctcagaagtacttatcattccttgcggaagaaatttaggactgagccattcaattccttggatctaggtttcctcgttccaccaaatgatagccatttcatggataatggtgatgcaacacatcttggtcttgaggactctcacatggatattatccacaacgcgtttccagaaatcttggctgaaggtggttgcgtgacaactcatgttctgccagaagataatttacagggagacattccttacgtagaaggagaaaatctcacattcactgaacacgcaggtctatcagtatgtgatgtggttcatcaagattccgagcagaaactagagaatactgctcacgaggcaaaaaacacaatggctagcactgatttcctggcacagctttcaacttctcttttcgaagaagacatggaaccgttcatggaagtagatggcaaagaagttgacaagtcatattatgatggtcttagctcactgttggtgaactctacaaatgatacaaaccgcgaggcttttcctaaccccaccgagcaagaaccttccattgcaccaactcatccaggagaggcaaccctggatgatcatgtgatgcttgagctagatggtacaatcgctttagatcctcatcctgagattgttgggggtgtaatctgctgtttattaaacgaagaggatcctgatattccgtgtaatgatgacattttcctgtccaacaactcccgtccgatgtcagtttcttctttagcccggcggaactttaaggataccaatagtccaataactacatgtgtaagagacgtctccgccagtaaggaaaaaagtgagggatattcactccaggctcaaaagaaaaaaccaggacgtttacaggggtctactcaaggaaagccagagatgggccaaccaagtaaaggtagcaaattcagggcatcgactagtactgagttaaagaatactgtagctcctggtggttcttcctctgcacaggcttgctctaatactctactttctactggtaccggtgcaaaagatggaaagaaagaaactgctactggaacactctttgtcggatctgatggccatggcaaccacccagagaaggatagtgaaaattgtaaagagaaaaatgttgtaccacctgttaatgaatcgccacatgctaaagatactgatgatggcttgatagagattacagtccctgagctggagatcacccgtgcagaagcagaagcagaagcagaagcgcatgtttgtgagagtgatgaggacttacccaattattctgacattgaggctatgatacttgacatggacttggaacctgatgatcaagataattttgatctcgaagtctccaagtatcagagccaagacatgaaaagaacaatcataagacttgagcaggctgctcattcatatatgcaaagagccattgcttcccgtggtgcattcgctgttttatatggcagatattcaaaacactatatcaagaagcctgaggttttggtgggtagatcaacagaagacctcgctgtggacattgatttgggaagagaaaagcggggtagcaaaatatctcgacgacaggcgatcatacggctgggtgatgacggttcgtttcatataaaaaacctggggaagtattcaatctcagtaaatgagaaggaagtagatcctggacagagtttaatcctcaaatccgattgtctagttgagatacggggaatgccttttatatttgaaacaaaccaaagttgcatgcaagagtacctgaagagaagagggaaagtgaactgagaccagatcaagagtgcgtgttgtttgtgtagatgaatgatgcatctcttgtgtaatgtaccttagccataggaacacgtcttgtagatcttttaatacatctttagttccgcatcatgcatagttgaccctgttttaaggcgttgaaatgaaaatacaagtctcttgtatctgaatttgtgttttaagcgaagaatgattgttcttgtgaaaaggaaaaaaaaaaaaaa

SEQ ID NO: 1210 - DNA, 1490 bp, Arabidopsis thaliana
  Clone ID: ARATH-23APR03-CLUSTER8520_1
tttttctactcctcgtcatcttctattcgttatccgttttgaagcgtactcggatgggattgagtttcgcagatgctttaaattctagaaaataatgcaatctcttaccttaactcggtacccaactccaatttccccgccaagactcaatctttacccgctaagacaaatcgcagcttctgttctctctgctccgaccgccggtattaaccgtcgcgatatggcgtctcgccatcagtcaacttcgtttaagccccttgccgttggtcggaatttgaccggagatgatgatgatggttactgtactcttatagactttgcaggtagtggaggaggagaagggaaaaatgtaggagaggatcttgtggtgttgctttaccacttacaacatgcttgcaaaagaatcgcttctcttgtcgcctctcctttcaattcttcactcggaaagctctctgttaactcctctagtgggtcagaccgagatgcgcctaagccgctcgatattgtctcgaacgatatcgtcttgtcctctcttagaaactcagggaaagtagcagtaatggcttctgaagaaaacgatagtccaacttggatcaaagatgatggtccttacgttgtggttgtagatcctctagatggatcacggaacatcgatgcttcgattcccacgggaactatatttggaatttacaatcgtctcgttgagcttgatcatttacctgttgaagagaaagctgagctcaattctttgcagagaggcagcaggcttgtagcttccggttatgtgctatactcttcagccactatcttctgtgttacacttggatcgggaacacacgccttcacgctagaccattccacaggagaatttgttcttacccatcaaaacatcaagatcccaactcggggacaaatctactcagtgaacgatgcgaggtactttgattggccagaaggtttaaggaagtacattgacacagtgagacaaggcaaaggtcaaaacccgaaaaaatactctgcgcgttatatttgttctctagtagctgatcttcacaggactctcttatacggtggagtggctatgaatccaagagaccatcttcgtttagtctatgaaggtaaccctttggcttttctcgtggagcaagctggtggcaaatcctctgatggaaaaagagggatactttcgatacaacccgtgaagcttcaccaaagattgcctctgtttcttgggagcttagaggatgttgctgagctagagagctatggagatgtgcagcagactgtgaaccctggctatgaagtttaaacaactcctctgtttcatattatctgtaaaaacaataaatgaatcgatgttagatttggttgcttgtaacattatgtattaggaaagttagatccgtgtatatatctgtttatcaagattcaagatcgactggtataatcaaaaaaaaaaaaaaaaatatgtttctttatcagaaacaatc

SEQ ID NO: 1211 - DNA, 1959 bp, Arabidopsis thaliana
  Clone ID: ARATH-23APR03-CLUSTER8543_1
ggtgatctctgtgctccggcgcataaacccctgtaaagccaataacttgttgttccccaaagtttggttcttcatgttggaaaccgaaagcagtgtctgcgacaacatcgccggcaatgagaaatggcgagcggaagctgaaattggtggcaacgagagagctctgcaagcgcttcgagaactcattatcttcccttttcgttaccctctcgaagctcgaactcttggtctcaaatggcctagaggattgcttctctacggtcctcctggaaccggcaagacaagcttggtccgtgctgttgtccaggaatgtgatgcacatttgattgttttaagccctcattctgtacatcgagcacatgctggagaaagcgagaaagtcttaagggaagctttcgctgaggcttcttctcacgctgtttcagacaagccttctgtgatttttattgatgaaatcgatgttctttgtcctcgtcgtgatgctagacgagaacaagatgttcgtattgcttctcaactgtttacacttatggactcaaacaagccttcatcatctgcaccaagagttgttgttgtagcatccacaaatagggtggatgcgattgacccagcgctaagaagagcgggacgatttgatgctttagttgaagtgagcacaccaaatgaggaggatcgtttaaaaatcctgcagctgtacacaaagaaagtcaatttagatcctagtgtcgatcttcaagccattgcaatatcttgcaacggttatgttggagcagatttggaagctttatgtcgtgaagcgacaatatctgcaagtaaaagatcttcagattctcttattctaacatctcaagacttcaagattgcaaaatctgtggttggtccaagtataaacagaggcatcacagttgaaatccctaaagtgacatgggacgatgttggtggtcttaaagacttaaagaaaaagctccagcaagctgttgaatggccaatcaaacattcagctgcatttgtaaaaatgggcatatcgccaatgcgtgggatacttctacatggtcctccaggttgctcaaagacaactcttgctaaagccgctgcaaatgctgctcaagcctccttcttttccttaagctgtgcggagctattttctatgtatgttggagaaggtgaagcattattgcggaatacatttcaaagagctcgacttgcttctccaagtataatattctttgatgaagctgatgtcgttgcctgtaaaagaggtgatgagagctcaagcaatagttctacagttggagaaaggcttctatctacactgttaaccgaaatggacggtcttgaagaagcaaagggaatcctcgtcttggctgccacaaaccgcccgtatgcaattgatgctgctctaatgcgacctggtcgatttgatctcgtgctatacgtgccaccgcctgatctagaagcccggtttgaaatactgcaagtgcatacacgcaacatgacactaggagacgacgttgatctcagaaaaatcgctgaagaaaccgatctcttcacaggtgccgagctcgagggtctatgcagagaaagcggaactgtctcacttagagaaaacatcgcagcaaccgctgtcttcaatcgccatttccaaaccgcaaaaagctcgcttaaaccagcgttaacaatcgaagaagtcgaaacttattcatcattcaggaaggcggcgaaaagatctgattcgaaaccgattccgattaacaaaaagaaggcgacttccaccgtcttcggattctcatggcaattaggtgttttgagcttattgttgcttgctactggaaactattacttcaaccacactaaacatgaattactagtagcttctgctacatgagacttgaaacagctcaaagttaaaaaagttgctaattttgttttattcataaataccaaaatatcttttgtttc

SEQ ID NO: 1212 - DNA, 2432 bp, Arabidopsis thaliana
  Clone ID: ARATH-23APR03-CLUSTER8546_1
acatcgaatttagggtttttctctcccccgagcttgcttttccgttgggtgaacgactaccgtatatttttggcttaaggtcattttgaagattaataacatgtctattttatcgcgttgtgtccgatccagaaggttctctatttttcgtggataagaagataaagttattgtttattgataagttttctgctgggaagttgcaactttttctagatttaggacgttacaaatttcaatcatgagtgcatcatgggcagatgtggctgattcagagaaggccgtttctcagtcaaagcctccttatgttcccccacacctacggaacaggccatcagagcctgttgctgctcctttgccacaaaatgatcatgcagggtatggtggtcaaccagctgggtctcgttgggctcctcctagcagtgggggtggtggtgccagcggcggtggctataggaatgatggagggcgcactggctatggttatggtgctggaggaggaggtggtggtggtggtggctggaacaacagaagtggagggtgggaccgtagggaacgtgaagtaaacccatttggagatgatgctgagttagaaccggtctttacagagcaggagaatactggcattaattttgatgcctatgaagatattccagttgagaccagtgggggagacgtgccccctcctgttaacacatttgctgacatagatcttggggatgcattaaatctgaacatccggaggtgcaagtatgtgaggccaacaccggtacagcgtcatgctattccaatactgcttgcagagagagatttgatggcctgtgcccagactgggtctgggaagactgctgctttttgctttccaataattagtggaatcatgaaagatcagcatgtagaaagaccccgtggttcacgggcggtttacccttttgcagtcatcctctcaccaacaagggaattggcatgccagatacatgatgaagccaaaaaattctcctaccaaactggtgtgaaggttgttgttgcttatggaggaacacccattcaccagcagctcagggaactcgagaggggatgtgatatccttgtggcaactcctggccggttaaatgatttgcttgaaagagctagagtctcaatgcagatgattaggtttttagctctagatgaggcagacaggatgctggacatgggttttgagccacagattagaaagattgttgagcagatggacatgcctccacgtggggtgagacagacaatgctgttcagtgctacatttccaagtcagattcagagacttgcagctgatttcatgtcaaactatatatttttggctgtgggaagagttggttcaagcactgatttaattacccaaagggttgagtttgtccaagagtctgacaagagaagccatctcatggacctgcttcacgcgcaaagagagacccaagacaagcaatcattgacattagtttttgtggagacaaagaggggagctgatactttggaaaattggctgtgcatgaatgagtttccagcaacctccattcatggcgatagaacacaacaggaaagagaagtggcactgaggtccttcaaaactgggaggacacctattttggttgcaacagacgtggcagcacgtggtcttgacattccccacgtggctcatgttgtaaacttcgatctaccaaatgacattgatgactatgtccaccgtatcggacgaacaggacgtgcaggcaaatctggaatagcaactgccttcttcaacgagaacaatgcacaactggctaggtcgcttgctgagctaatgcaagaagccaatcaagaggtccccgagtggctcacacgatatgcttcacgtgcttcatttggtggtggtaagaaacggtctggtggtcggtttggtggccgtgacttcagaagggaaggctcttacagtagaggaggaggcggcggcggcggaggaggcggcagtgattactatggcggaggaggctatggtggtggtggatacggtggtgctccaagcggtgggtatggtgctggagtgaccagtgcttgggattagccaattaggctccccaatttttcctctttttaacctgactatttatttcttctcttctacattcccaagagagcacgtgtatttgcccccacctttgagatctctcattcaagagatggatttaactaatcttgctattaggtggatctctctgttttttcaggctatttttaggatttgtcctaaaagatagacagtagtttttccgattttgatcttgttcttggtttcttctaacaatttcatttgttagtttgaaatccaatttgtctttttgtttccctttgttgttgacaatctttcttggtgaaatacaatctctctttatatcaaaaaaaaaaaaaaaaaaaaa

SEQ ID NO: 1213 - DNA, 2187 bp, Arabidopsis thaliana
  Clone ID: ARATH-23APR03-CLUSTER8550_1
aaaaaaaaaagagtaaatttgtggccggagaaaaaaaaagaatccaatgacataaataaaagtcttgataggtgggcgatttcaacatacctcctccgtcgtcgtcggcttccattgattttggcactactacaagagacttacgttcttcttcattatcttcttctctttctgaaaccctaagatttttggttggattgtcttgtcgttctactgttttccttagctgctcttcaaggtgaaattgggtttctgtagctttttttctccgggaaaggtttttcttttttgaagatttcatgcaaatggaggctaatgactgtcaagaggaacataagttcactctcgacaactatcatgtcgtggagcaggttagaagaggcaagtcctcttccgatttcgtggttcttcatgatattgaagacaaaaagtatgcaatgaagaagatttgcctagcgaaacacacggacaagttaaagcaaaccgctttacaagagatgaaattgctctcaagcttaaagaatccttatatcgtgcattatgaagattcttggattgacaatgacaataatgcctgcatttttactgcttactatgagggagggaacatggctaatgctattaagaaagcgagaggaaaattattcccggaggaaagaatctttaaatggttggcacaattgttactggctgttaactatttgcactcaaaccgtgtagttcacatggatctaacgtgttcaaatattttcctgccgaaagatgatcacgtccagcttggtaattatggtctggcgaaacttataaatccagaaaagcctgtttccatggtttcgggtatctctaacagcatgtgccctgaggtattagaagatcaaccacatggatataaatctgacatatggtcgctgggttgttgtatgtatgaaattacagcacaccagcctgcgtttaaagctccggatatggctggactcatcaataaaataaacagatcccttatgtctcctcttccgatcgtctactcctctaccttgaaacaaatgataaagcttatgcttaggaagaaaccagaatatcggccaacagcctgcgaattgttaagaaacccatctctacaaccataccttcttcaatgccaaaacctgtcgcctatttatcttccggttttcccgataaagccggtaaatagtccgaaggataaagcaagaagaaactcattgccaggaaagtttggaaaggaaagagtttcaagagagaagagcgaggtgtcccgcagtttggaaaatctatatccattttggacgaatacagagactggatctagcagctcatcgcaaccggcatcatctacgaatggcgcagaagacaaacttgaaacaaaaagaatcgatccaagctgtgacacattgaagatttctgagtttacaagccagaagtcggatgagagcttaattgatcctgatattgcagtttactctacagaaacgccagccgaagaaaatgctctgccaaaagaaactgaaaatatattctctgaggaatctcagttacgtgatgttgatgttggggttgtgagtgcacaagaagtagcatgttcccctccaagagccatcgaagaagctgaaactcaggaggcattacctaaaccaaaggaacagataacagtgcccatttctagtgttgcacattcatctactgaagttgcagcagcaaaagaccatttgtctggaagccttgagggcgataaagcaaagatggtgaaactaacagcgagtgaaatgtcatcggtactaagtaagctcacaaaattgggtccgccgcagagtaaagaaagggcagatgcattagagtgtttattggagaaatgtgcagggcttgtaaagcaagagaaatatgaagaacttgctggtttgcttacaccatttggggaagatggtgtctcggctagggacactgcaatttggttcgcaaagacactcttgtcgtctgacaaactcaaccaaggaacctgattgagttagagacaaatttccctttttggtttttgtcaaatatgtaaaaaaattcttttatcatcagttttaaatttagtttgtgaacactccatttatctgttgtcatatgtaatatataaatatttgaatgtgagctagttttctcctattatattacatagttgctctt

SEQ ID NO: 1214 - DNA, 1561 bp, Arabidopsis thaliana
  Clone ID: ARATH-23APR03-CLUSTER856_1
gatctacgtctctgtctctctccaatctctctgcgccacagaattctgcgatttacgaaaatctctgaaacctccgatcgttaacggcgaccgccgattttcccggtaaaaatgaacgacggagatgtatcgaggcagatccaccaaagcggtagatttatcccgggagcggcgaaacgagatgtagtgggtccgcgggggggcaggggtgtggctcgtggagagagagagtgagagagatctcgaccacgtcgtgaaaatccgatctacgtctctgtctctctccaatctctctgcgccacagaattgtgcgatttacgaaaatctctgaaacctccgatcgttaacggcgaccgccgattttcccggtaaaaatgaacgacggagatgtatcgaggcagatccagcagatggtgagatttatccgccaagaagcggaagagaaagcaaacgagatctcggtttctgctgaagaagaattcaacattgagaaactccagcttgttgaggcggagaagaagaagatcaggcaagattatgagaagaaggagaagcaagctgatgttcgcaagaagattgattactctatgcagctaaatgcatcaaggatcaaagttcttcaagcgcaagacgatattgtcaatgccatgaaagaccaagcagctaaggatcttctgaacgttagtcgcgatgagtatgcctacaaacagctcctcaaggatctaattgttcagtgtttgcttcggttgaaagaaccttctgtgttgttgcgttgtcgtgaagaggacttgggtttagtggaagctgtacttgatgacgcaaaggaggaatatgctggtaaagcaaaggttcatgccccagaggttgctgttgacacaaaaatattccttccccctcctcctaaatctaatgatcctcatggtctccactgctctggaggtgttgtgttagcttctcgtgatgggaaaatcgtgtgcgagaacacacttgatgcgcgtcttgatgtggcattccgtatgaaactcccagtgatccgtaagtcgttgttcggccaagttactgcctgatgaaagaaaggaaaagagaaaagagattattcaaaccggtttgcgtttggttatttacctattttgggagagatttctctttgttgtgattctttgtattttgcaaaatcttactttggtgccaaacccatcgaacgcttctttttttcgaattcctttttttcattcctcctcgaatgtgtgttatcatggctatacaaataaataaaatgaaagacttcttttcttaaaaaaaaaaaaaaaaaaaaaaaagggacgaccacagaaaaaaaccccaggggggggccgggtcactggcaggtaacaccttttttccggggccccccaaattcctagctcggcccgcgggttcccaatggccgggccgggggaaaccccggcggtttccccatcctcccctcccctgggatcccggccccccccttttcacacgggtggcggaaaaaacgggaaaagggccccctaaccaaaaaggcccttttccaaggaagggg

SEQ ID NO: 1215 - DNA, 2943 bp, Arabidopsis thaliana
  Clone ID: ARATH-23APR03-CLUSTER8570_1
tatccgcgaccgcgagatgatcttgaagaggtgtttgctttatgaatgacgatgaatcggctctgttttcctgtttccaacggttgtaatcacaccatcatcgttgtcttcatctatactaatattcaaatggtcaattataaagcccaataagctaactaagcccaaaaatgaaaacacacggactcagcccatacaaattttaacacttaaggctaatgggtctgtcacgtgcggaatagactgaaaacagagcatcgcacgtgccgcatcaaaatttgaaatcacgacgacttcaaaaaaatcccaaatggtaagaaaaaaataaaaagttgcagaaaaaacagaaaaccctcttttctctctcttctctctctctcgaggaagaaaggcaacaactatggaagctatgcttgtggactgtgtaaacaacagtcttcgtcattttgtctacaaaaatgctattttcatgtgcgagcgtctctgcgctgagtttccttctgaggttaatttgcagctattagccaccagctacctgcagaataatcaagcttacagtgcatatcatctgctaaagggaacacaaatggctcagtcccgatacttgttcgcattatcatgcttccagatggaccttctcaatgaagctgaatctgcactctgccctgttaatgaacctggtgcggagatcccaaatggtgcagcaggccattaccttcttggacttatttacaagtatactgatagaaggaagaatgctgctcaacaatttaaacagtccttgacaatagaccctctactttgggctgcatatgaggaattatgtatattaggtgctgctgaggaagcaactgcagtttttggtgaaacagctgctctctccattcaaaagcagtatatgcaacaactgtcaacttccctcggcttaaacacttacaacgaggaacgtaattcaacttctactaaaaacacgagttctgaagattatagtccaaggcagtctaaacacacacaaagccatggccttaaagatatctccggaaatttccattctcatggagttaatggaggtgtttcgaacatgtcattctataatacgccttcgccagtggctgcacagctatccggtatagctccaccaccacttttccggaattttcagccagctgttgcaaacccaaactcccttattactgacagttctccaaagtccactgttaactctactcttcaagcacctagaagaaagtttgtagatgaaggaaagttacgtaagatttctggcagactattttctgattctggtccacgacggagttcaagactgtctgctgattcaggggcaaacattaattcaagtgttgcaacagtaagcggaaatgtgaacaacgcttccaagtatttgggaggttctaaattgagttctttggcacttcgttctgtaacacttcggaagggacactcctgggcaaatgaaaacatggatgaaggggtccgtggggaaccttttgatgattcaaggcctaatactgcctcaacgactggttctatggcttccaatgatcaagaagacgaaacaatgtcgattggtggcatagcaatgagttctcaaacaatcacaattggtgtttcggaaattttaaacctccttaggacactcggagaagggtgtagactttcatacatgtacaggtgtcaggaggcactggatacgtatatgaaacttccacataagcattataatacaggatgggttctttcccaggtcgggaaagcatactttgaactaattgactatttagaggctgaaaaggcattccgtcttgcccgtctggcttctccttattgcttagaaggaatggatatatactctacggtcctctatcatttgaaggaagacatgaagctgagttacttggctcaggaactaatatcaaccgatcgcttagctcctcaatcttggtgtgctatgggaaattgctatagcttgcaaaaggaccatgagaccgcactgaagaatttcctacgagctgttcaactgaatccaagatttgcatatgcacataccttatgtggccacgaatacacaactcttgaggattttgagaacggaatgaaaagttaccaaaacgcacttcgtgtagatacaagacactacaacgcatggtacgggcttggaatgatatatctacgccaagagaagttagagttctcagagcatcacttcagaatggctttcctaataaacccgagttcctctgttataatgtcttatttagggacatctttgcatgccttgaagagaagtgaggaagcactagagataatggagcaagccatagtagcagatagaaaaaaccctcttccaatgtaccagaaagctaacatacttgtctgcttagaaagattagatgaagctctagaagttcttgaggagctcaaagagtatgcgccttcagagagcagcgtttacgctttaatgggcaggatctataagcggcgaaacatgcacgataaagccatgcttcatttcggtctagctttagatatgaaaccgcctgcaactgacgttgctgcaataaaggctgcaatggagaaattgcatgttccagatgagatcgatgagagcccgtgaaaccatagctactccaagaaccttgggtatgaattaatgtgagaccgttgctgctccacgaaccatgggtatgaattatttagtgcaaagcctacctcttttagggaactagttgggtttgaatgtagttttgttaccaaaccgtaacacagccacaagagcccacatgacttgagtatgtatcatgagttgatctgtatgttgtccgtaacactacctaatcgcaatatatgatttttccacatctacatatacattttaccacttaaaccttgttcatcaaaagataatttatttcgttagttttt

SEQ ID NO: 1216 - DNA, 1702 bp, Arabidopsis thaliana
  Clone ID: ARATH-23APR03-CLUSTER8578_1
cccgtggttcaacgccgcccggccgtctccttccttccccgtcgttgttatttttcccgcattctctttggccaaatgattcggatttggttgtttctcttgtttctggaggtctagctggagctgtttcttcaacagctacatacccattggatcttgtgagaagaagaatgcaagtggaaggagctggtggaagagcaagagtatacaacactggactctttggaacattcaaacacatattcaagtctcactactccccccccccccggtcgatgtctccgatctccatcgtaattcagtttccttcaattgatgtgaccttcgattccaaactcgcaaacccagaaacgggttactcatagaaacagtgatagagagatatgaatgttgacgctagagtcggtgttgcggtcgatggagctcaaagtgctcttaacactgcaaccactgttcatagtagcgtcgtcatgacgcagattaagccgcaggcaaagctaggaaccttccagaatctcctcgctggtggtattgccggcgccattagcaagacatgtaccgctcctcttgctcgcctcaccatcttgtttcagttgcaagggatgcaatcagaaggtgcagtgttaagccgtccaaacttacggcgtgaagcttcccgtattatcaacgaggaaggatatagagccttttggaaaggaaatttggttactgtagtacacaggattccttatactgcagtaaacttctatgcatatgagaagtacaatctatttttcaattcaaatccagtcgtacagagttttataggaaatacgagtggcaatccgatagtgcattttgttagtggtggcttggctggaattacagctgctacagctacatatcccctcgatcttgtcaggactcgtcttgctgcacagaggaatgcaatttactaccagggtattgagcatactttccgtaccatatgcagagaagagggaattttgggtctatataaaggacttggtgctacattattgggtgttggaccaagtcttgctatcaatttcgccgcgtacgagtctatgaaattgttttggcattctcataggccaaatgattcggatttggttgtttctcttgtttctggaggtctagctggagctgtttcttcaacagctacatacccattggatcttgtgagaagaagaatgcaagtggaaggagctggtggaagagcaagagtatacaacactggactctttggaacattcaaacacatattcaagtcagaaggcttcaaagggatatacagaggaatattgcctgaatattacaaagtagttcctggcgttggcatcgtcttcatgacatacgatgctttgcggagactcttaacttctctccccgattgacaactcccactcatatacttagaggaattttagctgcttatagagttagtagaagaaagaaacaacatgtttatttcacacttggtcatcttttcaaacactttggtagtaaattttacttttcttactgccgtagagaaaattttacagtgtataggttagttccacctggggtgttaaaaacattcataggcatcatatttaacactgtaccacgtgagcatatcttcaaacacgacacatttgttttgttctttctctgtttctacactcctatgatacttatgtaagtttttgtttgcttc

SEQ ID NO: 1217 - DNA, 2679 bp, Arabidopsis thaliana
  unsure (1)..(2679): unsure at all n locations
  Clone ID: ARATH-23APR03-CLUSTER8606_1
gnntcccccgggctganggaacttcggaccngccactagtccccccccccccccccccccaagctctgaagtcgaagcaaagttaattacagagagagagaaaggatggagagagaactcagacgaccgaacccaatcaacagctctcgccggccggagatattttcttcaggcggtagtagtactcaactaccggaaagcccacgaggcccaatggagttcttgtctagatcctggagtgtctctgccttggaagtctccagagctctccacaccgccaaatcagcttcagccaccaacaggcctccctcatccattaacactccgataccggaagaaacgctaaaccctgagaaagaagaatgtccgccggagaacagtactagtgttagtagccagttctcgttcgctgcctcggccacttcacagcttgttcttgagcgcataatgtctcaatcggaggtgtcaccgttaacgtcggggaggctatcacacagcagcggcccactcaacggcggcggttcttttacggagacagacagtcctcctatctccccttccgatgaattcgacgacgtcatcaagtattttcgcacccacaacaccatacatcctctcttctccggcacaggaggcagccgtggtaccaccggaaatgggagcaatacccccatggctggaaccggtccaaagacagttggtaggtggctcaaggaccgtaaggaaaagaagaaagaagagactaggactcagaatgcacaggttcacgcagctgtttctgttgcagcggttgcatctgctgtggcagctgtagcagcagccacagcagcttcttcccctggtaagaacgagcagatggccagaatcgatatggccatggcttcagcggctgctctggtggctgctcagtgtgtggaggctgcagaaatcatgggagcagatagggatcatttgacatccgtggtgagctctgccgtgaatgttaagtcccatgacgatattgtcacccttactgcagctgctgcaacagctctgcgaggagcagctacactcaaggcaagagcgcttaaggaagtatggaacatagctgcagtattgccagccgagaaaggggcaagttcagcgttgtgtggacaggttgacacaaagcatagtgatagcagctttagtggagaattacctgtggctggggaagacttccttggcgtctgtaaccaggaattactagctaaaggcactgagctcctcaaacgaactcgtggaggtgaactccactggaagattgtctctgtctacatcaacaaagcaggccaagctgtgctgaaaatgaaaagtaaacacgttggagggaccttcacaaagaagaagaaacatatggtgcttgaagtgagaaaggatatacctgcatgggctggcagagatcttttcaacggagacaagcatcactactttggcttaaagacagaaacaaagagggtcattgaatttgagtgcagaaaccaaagggaatacgagatatggactcagggcgtatccaggctacttgccattgctgctgagaagaagcagaaaagttccatgtccaaatggatggcaccttaacaacataagctaggaaagaagtagatgctttgtagaacgaactgcttatgataagaataggtttaaacataatggagtagaagacattcccttttgtaatatccttttattcaattgagtgaacagagatgacttctaaagctaacaacaaccttcacaagtacaaatgtattggattctcctatcatgttacaagcagtgatcaacatttctttacaacccaaatttccttttgcagacaaaagaatttgaacatatgaactagataacaatggcacagtcttaagagcaatctgaaagagacaagactgcctaactatcaacagcccttaagagagtgaggagagataggaagagattaatgacatccaaataaagagaaacagcagcccagatgtactcgtcataggagtgcctcttgatcaagttgtcggtatcatatacaatgtagccacagaagatgatggatgccaaacaaccatagatcatcacagagatctttcctaaagggaagagaatctggatgaaggaaaacaccatgaggacaatgacagcaccgaacaagaaaggtccgaggaagttgaagtcatggcctcttttggccgcccagaaagtgtatagagtgagggatatgaccacaacagcggtcaaaatcacagattccagaatcaccttcccgcttgtaaaggcgcaggtcaagccaaccgcaaaggcaagagcgacggtgaaaatcccgagtaacagatagttcacagggtgcttctggtgatagtaatacaaaggacacataacgatcaatggagtcaatataagaagtatgtagagagcgaagccggcggtggtggtggtgaagaatacagaaatagaatgaaccttaacgacggtggcagcgacggcgattgtaacgagcagctggatggagatgatggaatagaccttgcggatgaaagaccatcggagctccgggctctccgacatcatcgggtagagaggcgtctgagccgactccaaatcatgcttctgattccacatcttccggattcgtttttttttgtcaacgccggtgagaagtcttca

SEQ ID NO: 1218 - DNA, 2357 bp, Arabidopsis thaliana
  Clone ID: ARATH-23APR03-CLUSTER8623_1
aaaaaattaaattcgatccccaaaattaataattccgtcttcaccgagaaaaaatccagagcttcttctcctccgacgcgatggagtctcgtcggaaccctcgcgccgtagtagatccaaaggtccgacaagtcggtttcttcacatcatctcaacccgattcatcaactcaacaacaacaacccgacccgatcgctgctacctctgcttcttcttcttcttccaccatttctccttccggtaactcactctcccccgtcatgattcctcctcctcgtctcaattcctctgatactttccctcttcgagtcgctgtcgctggtgctgctgcgtcagccgtgtctccttcttcgttttcttactcaagtcgccgtgatttccctgatggatcaacgacggcgtctcctggacgccattccaggggtagtttcgtaaaatcatctgttcctgttgcttcttcgctgcctggtattgggatggattctatggctgctgctaaatctagtagtgttcctgctagtggtttaaccactgtctccgtcgttaccatgcctcctggactttccgagaaggctagtggaatggaggtgcagagtgaccagaagaagccattgaaagagaaaaccactaaagctgagagacgagctattcaagaagctcaaagagctgctaaagctgctgcaaaagctgatggtgggaaggtggcaccagtgtcctcagcctcggtggcttcaacaagtgttaaagctgctaaaccagcgaaggctacatctcagaagaatgatgttgctgttgctactggagcagctgagaagaagggaggtccatctgaaaaagatagaaagaaagatgctcctcatccccgcatgcagtatgatgatgagagtagagtcgtgaaggctaaaagacgtgctgttgtaaaacagaccgaggctaaaaacagggttgagctatttaggcatttgcctcagtatgagcatggcactcaacttcctgatctcgagactaagttcttccaacttgaccctatgcatcctgctgtgtacaaggttggtcttcaatatctttctggggatatctctggtggcaatgccaggtgtattgcgatgctccaagcattccaagaggttgtcaaagattattcaacaccgcctgagaagtctcttaacagggacatgactgcgaaaataagtagctacgtctccttcctcatagaatgccgtccgctttcgattagcatgggaaacgcaatacgatttgtgaaaaacaggattgcaaagctgcctataacactttctgaatctgaagcaaaagctactcttcagtcagatattgaacggttcattaacgagaagatcatagtggcagatacggtgatagtcaaacatgctgttactaaaataagagacggtgatgtccttctgacctacggatctcccactgctgttgagatggtaatattacatgcacatgaactcaggaaaaagtttcgagtcttggtggtggattctcgtccaaagcttgaagggcagctactgcttcgtagattgatcaaacgaggcattaactgtacatacactcatataaatgccatttcatatatcatgcatgaagtcaccaaagtgtttttgggcgcctcgtcagttttgtctaacggaacagtttattcaagggttgggactgcttgtgttgcaatggttgcaaatgcattccgtgttcctgtgcttgtatgttgcgaagcctacaagttccatgagagggtgcaattggattcaatatgttccaatgagcttggtgatccaaatgctatttcagaagttcatggaagagaagacataaactatttagatggcttgaccaacaacgcaaacctgcagtttttgaacttgatgtatgatgctacaccttcagattacatttccatgataatcacagattatggcatggtacctcccacaagtgtgcctgtcatcgtgagagaatatcagaaagaacacttgcttgtctaagcaaagctcatttttgcgaaagctcttcttctccaaccccctcctctagctcaggctcttctcatcacaacccagatagaataactaccggcactgcctcccctcatccgcttcttttcctgagtaccgggttcattttttttggccttgacttgtttttagaaacttttgactctgtgaagagtgcgattcatcatccgcctctccgggaagattttatcgatatcggtgatgtttttctttgtctgtgatgtatgagtgaggcttctcttactctcccttctcatggaggttgatacaaatctttctcagattctatgccaatttttgttgggttcagtcttcaac

SEQ ID NO: 1219 - DNA, 1161 bp, Arabidopsis thaliana
  unsure (1)..(1161): unsure at all n locations
  Clone ID: ARATH-23APR03-CLUSTER865_1
atctttcaacgtctttctctcccgacggccaaaaaccccaattttgccaaatccaattttacacccagaaaccctaattttccttactttgatttgattttgtgatggacgattatacaagagagatgatggatctcaagactttggtcactcgaaccctagagaagaaaggtgtcctcgctaagatccgggctgagctccgtgcaagtgtgtttgaagcaattgaagaagaggatagagtgatagagaacaatgaaggaccgcctccagctctgttgggaagctgtaatgatcgtgcaaggaagcttcatgcttctccttcaggaaggttactatctgcgttgatttgtgaatacttggactgggcacaacttaatcacacgctcatagtttatcaacctgaaagcaatttgccaaaagattcgtggaagtctgagttacgcgactttaatagcaacaatggttttgagctcaatagaaatggagatagtggaccactccttctcgatgttcttgaagggttcttgaagtttgagagcatgacgcagggcatgggtagtagttcaaggagagattcagaaacagagtcgtcatcaagccttgagtccagaaatcctcctcgcagatcatctgcttctgatagcttacctcctcaacgaaggccggtttctgcatctcaagcatcggatagaagagtcgggttgtctacatctgggtacagaaaagatgaattcaactggagacaaggtaaccaagatacacatgaagaggtaacaagagcttcagcggcgctggaaaatctacagcttgataggaaaactcggaacttaacatcgtcttggaggaatgtgagggatggaacaaatgaagaagaagggagagattgatttaggctttggataaacatttcagcttctggattagtagagtaatggtttgtgtacgtgatatatgtatgtttctcctttatttgcaactgcgttttcaattagccttttttttaacgcacgaacctctgtctccttgagaacaaaaaacatgaaacagtaaaatgttttcttctgaaaaaaaaaaaaaaaaaaataagccgtcagaaacgaaaaacggccaaaaaaggcttatcgataccgccgaccccncccanggggggggccccggtac

SEQ ID NO: 1220 - DNA, 1908 bp, Arabidopsis thaliana
  Clone ID: ARATH-23APR03-CLUSTER8664_1
tgaaagaagaaaaaaacagagaagaagaagaaaaaatctatctccgccatgaacgcgagagctcttctttgctcttcaaatattcactctctctacacttcaaatcgtccacctgaaaaaacctcttcttctcgcagcctccgtaatctcaaaccatctccaaagtcgttacgggtatggatctacccgcgaaataggtccagtgttttccgggtattagttcggagctccgacaagagtgaaagcagtaattcgtattacgtagaaggagataaagtaagtggaaacaatgacgtcgtttctgattcgcctagctctatcgtcctcccatggtgggaagagtttccgaagcggtgggtgattgtgttactctgtttctcagcttttcttctctgcaatatggacagagtgaatatgagtatagctatacttccgatgtcagctgagtatggttggaatccagcaacagttggtctgattcagtcttctttcttctggggttaccttcttacacagatagctggtggaatttgggcagacactgtaggagggaaaagggttcttggattcggtgttatttggtggtcaatcgctacaattctcactcctgtagctgctaaactcggtcttccttacttgctcgttgttcgtgctttcatgggagttggagagggtgttgcaatgcctgctatgaataatatattgtcgaagtgggttcctgtgcaagagagaagcagatcactcgcgcttgtttacagcggaatgtaccttggatctgtcaccggtttagccttttcgcctttcttgattcatcaatttggatggccttctgtgttttattctttcgggtctcttggaactgtatggttgactctgtggctaactaaggcagagagttcaccattagaagatccaacattgctccctgaagaaagaaagctaattgcagacaactgtgctagcaaagagccagtgaagtcgatcccgtggaggctgatattgtcgaaaccaccggtttgggctctcatcagttgccacttttgtcacaactggggaacattcattctcttaacatggatgccaacttattaccatcaagtgctgaagttcaaccttatggagtcaggacttctctctgtatttccatggatgacaatggcaatatctgcaaatgccggtggatggattgccgatacacttgtcagccgaggtttctctgtcacgaatgtccgcaagtttctatgatgaaattcagataatgcaaacaatagggtttcttggaccagcgttcttcctaacacagctgaaacacatagattctcctacaatggctgttttgtgcatggcttgtagtcaggggactgatgcgttttcacagtctggtctatactctaaccatcaagacatcgctccaagatactctggagtgttacttggtttgtctaatactgctggagtacttgccggagttcttggcacagctgcgactggtcacatactacaacacggttcttgggatgacgttttcacgatttcggtcggtctttacctcgttgggaccgtcatttggaacctattttcaaccggagagaagataatcgattgatccattccgagaatagtaaatagttcggctccaagacctctcatcaggtgcaacttcacctcacgccagtctctgattatacaagtatcattgcagtctgagagctagccggaatattccttttttgccagaaaattcttcaggatctttctgctcgttgatttaggccaaacgcatatgaataatactttgtagatgaaagatatacagatgattttttgtaaataaacaaagctcacactttctcaagattactcaaaatctctcttcagctctatatatatttgtatcataaagatatt

SEQ ID NO: 1221 - DNA, 658 bp, Arabidopsis thaliana
  Clone ID: ARATH-23APR03-CLUSTER8672_1
acactactactatggagaatcctggaggaaggagaagaagagacatagccataaccgatggagaaagaacgaccggttcttcggttgtggctgcaaccgtagcagctgttgcagtggtaggaccgctttttggtctgatgagtttcagctttgtggcgacggtgactctgtttctgatcgcttctccattgctgctgatatttgctccagcttttatggtaacggtagcggttcttgtgtcggctatggttggtgttggggtagctgcagccatgtggatgatgggaatagccgctttggtatgttgtggccgagagattggtattgaaaccggactggctgggaggatggttgagtcggtggtgagagaattaggttacggtcggagtcgttacttgcgagacaaatcagaggatagttattcaacttcttctccttcttctcgggattactcttcttcttagttcaaacttggaaaaagtctcatgattcatgggaatttcaagaagatggtgaataaagaaacaaaaaaaaacagagacatggctatgataagaaaacaaaattaagtagattttttcgagagtgaaaatttgtaatatctatccaaagaaaatctagtaatgctatatcatttttttcaaaaaaaaaaaaaaaa

SEQ ID NO: 1222 - DNA, 1985 bp, Arabidopsis thaliana
  Clone ID: ARATH-23APR03-CLUSTER8702_1
ctctctctctctctctctctctaaaggaggaaggaacaaagcagtgctctcgtttcatttttctccctttctcactctaacagacccatccatcgctctctctctgtgaaactatcatcttcctcttctccggcgacgttttggaagttctgggagcagaaagggattgttgtgcctgtgttctactgaagtgtctctcgtcaaataatttataagcactgtctttgcatagtgcttagtaggtgctagttatggggaatgcgtgttgtgttgctgctcgagacaaaatggtggtgcctaattcatcagctggtgagaatttgcagaggagcaatatcaggcattctccgtcttggagtttccggtgggataatagagggcgtgtagctggtgaagaaacttctctcagttggttatctgatggtattagtcggaacgatggctctgagatcaaatttgaatctgctttcgtatcatctgaagggtcccctttggacagttttcggacacagacattgcaaaaatctcctgcctcagatctatcttttccaagaaattcttccatgaatacagtcttcgaacagaaagaaaatgtttcaacagagtctgcagcaccatcatatctatctcctgcacagttgtctctttcactagcttcacaaccatcatctttccctacgtcaccactttcgtcccaaagctacttgcaccctgcaagttcatctacacttaaactgacacagcaccctcgtctatcaaagcaagtctcagatggtcaaatctatggtcagaactcactaagtagaagctcagcaactgaagagaggcagggaactcctacgagatatgattcgtctcagtctggaccatctgaaggttggtctctacaagccttttctgaaatgatgtcatcttctcgcagcaacaaggctctgtcttatgacaattatgacaatgattgttttgggcttcaacgtgacaagattgaccatcatggcaaccggatgtccaagcatcagcagcatacctgcggtgcttgctctagacccttgtcggagaaatccttgtggagcagccaaaagatctttatgaccaacgagctctctgtatctgcaattctagcttgtgggcatgtctatcatggggagtgtttagagcagatgacgccggaaattgataaattcgacccttcatgcccaatatgtacaatgggtgagaagaaaacagcgaagctgtcagagaaagcgttgaaagtagagatggatttgaaagcgagacacaacaaaagactcagaaaccgagttttggacagtgactttgattgcgatgattttgtaatgtttgaccacagccacaggacagcagcagcagcaagcaagagccctagactcgtctcaagttcgagtgctaaaagctattcagcaaagcctttcttggctcgacacttctctttcgggtccagaagtaactataaatcccctaaagaaaatcttcctgtgaaaaagaaaggcttcttctggaccaaatccagcaaaatatgaacttatttcgccgtgctctgtactttgactgctgtctgaagcatagaagtcgacacacaccggggcacgataccattcagttaaaagcagtctatttgctgttacacacttgctcaacaaagtcttctcattgtttttttttttaatgaatactaaattttcacacatgtaaagttacaaatttagattacaaggttggggacaaaaaaaaaaaaaacattggatcattaatctattgatttgttctggctgtgcatagatcagaactgggctctgaaggcagccgattgggtatagtttgttatgtattatatctaccagcttgacctctcaatcaaacttcttttatgtaaattttgatttgtttctccctctattcctggtgattgtaataaatagacagatcgataagcttttaaaatattatacgtgaattattacacc

SEQ ID NO: 1223 - DNA, 1167 bp, Arabidopsis thaliana
  Clone ID: ARATH-23APR03-CLUSTER8703_1
gaccagtcgccacaactcctccctcttctctctctctttgtttcagaatctctaggagcttttttcaacaacaatggctgttcaagctcatcacatgaacattttctctcagtttatatcaccaaacagagattgtgttaaatttcaagaaaacatgaaccacggcgagtttgagtttaccggtgaagttccgttaataaccggagaatctttcgccgttgagcctttagctgcgaaagccaacttcaacaaagcagaaagtggtctcagttacaatttcactgttcctcctctgtctacaaaacgccagcgagattttcaattctcagactcaaacgctccggttaaacggaggtccgtagcgtttgactcatcatcaccgtcgttgataaacgttgaactcgtatctcagattcaaaaccaacaacagtcagagatcgataggttcgtagctcagcaaacggagaagctaagaatagagattgaagcaaggcaacaaacgcaaacgcggatgttagcgtctgcggttcaaaacgttatagccaagaaactaaaagagaaagacgatgaaatcgtacggattcgaaacctaaactgggttttacaagagagggtgaagagtctttacgtcgaaaatcagatttggcgtgatatcgctcaaaccaacgaagcaaacgctaatactcttcgaacaaacctagaccaagttcttgctcaactcgaaacgtttccaaccgcttcagccgttgtagaagacgatgcggaatcgagttgtggaagttgttgcggtgatggtggtggtgaagcggtaacggcggttggtggtggttgtaaacggtgcggtgagagagaagcgagtgtgttggtgttaccatgtcgtcatttgtgtttgtgtacggtttgtggtggttcggctttgttacggacttgtccggtttgcgatatggtcatgaacgctagtgtgcatgttaacatgtcttcttgaccatcttttttttttgttcgttacaatttaatttatattttttttgtttccttaggattatattcgcaaaagaaatagcaaattgattcttttctttttgtaagtacatataaattagtttttggttaacaaaaagttatctacttatgtgtatctattgactttcattgaacaattatagg

SEQ ID NO: 1224 - DNA, 1573 bp, Arabidopsis thaliana
  Clone ID: ARATH-23APR03-CLUSTER8738_1
acctggtttcagatttcacccaactgatgaagaacttataacacactatctaagaccaaaggttgtaaactcttttttctctgctatagctattggtgaagttgatctcaacaaagtcgagccttgggacttgccttgtaagttataggtcatttattttctaggtttttaaaaaccttctatgttttgttacttctaaacactgtttttttttagggaaggctaagcttggggaaaaagagtgaaaagaaactcaactttttttctttatctttaacatcaaaaaactttatcgatatctttacaaccattaaacaaaaaatttggccactacaagttgaaaaagttttgattatatctaatcgctgaaatggattacaaggtatcaagaagtggggagatagtagaaggagaagtagaagattcagaaaagattgatttaccacctggtttcagatttcacccaactgatgaagaacttataacacactatctaagaccaaaggttgtaaactcttttttctctgctatagctattggtgaagttgatctcaacaaagtcgagccttgggacttgccttggaaggctaagcttggggaaaaagagtggtacttcttttgcgtaagagaccgaaaatacccgactggtttaagaacgaatcgtgctactaaagccggttattggaaagctacagggaaagataaagagatcttcaaagggaaatctcttgttggtatgaagaaaacattggttttctacaaaggaagagctcctaaaggagtaaaaacaaattgggtcatgcatgagtatcgattagaaggcaaattcgctatcgataatctctctaaaaccgctaagaacgaatgtgttattagtcgtgtttttcatacacggactgatggtacgaaggagcatatgtccgttggtttacctccgctgatggattcttctccatatctaaagagtagaggacaagactctttagccgggaccacccttggtgggttgttgtctcacgttacctacttctccgaccaaacaaccgatgacaagagtcttgtggccgattttaaaactaccatgtttggttccggatcgactaactttttaccaaacataggttctctactagacttcgatcctctgtttctacaaaacaattcttcagtactgaagatgttgcttgacaatgaagaaacccaatttaagaagaatcttcacaattcaggttcatcagagagtgaactaacagcgagttcttggcaaggtcacaattcttatggttccactggtccagtgaatcttgattgcgtttggaaattctgaatttggaaaatcgaaaatttggatgttaactagggggtatatagggtttttaaaaacagtgtatatatgcgttatgtgttagctttagattctaggatatacaaagatgacactaatagattcttataacattttgtaaaaaaaaatcattgtagtgaatactctcttgccatttgaaatccattgtgtttgcataaaaaaaaaaaaaaaaaaaaaaaaaggtgaaacgaaaaaaaaaaaaaaaaa

SEQ ID NO: 1225 - DNA, 4592 bp, Arabidopsis thaliana
  Clone ID: ARATH-23APR03-CLUSTER8741_1
aagcgtgaactgtgagcttattggagttactagaaaatcaatgacgtttttgtggtataaaattacacccgcagaaaagtgaggggaaaagaaaaaagaaaaaagccagacatgcctggaagcgggacttacccaaatcgttgtgacataatgggaagaaaaacaaagcttaacgtacaaaagcgttgttgtcatgtaatgaaatcagcaagtggtttatcgacttccagagacaaaaaccaacttcactacttagaatcgtgcactttctttgagcaccattttccttcaagatcctactgtttcttattttttggctttttgcttcttcttatccaaagatgttaaaccagcacctaatcctgcaggagccaggttttctgttttcccattttcagaggattctttcttctcttgtacctttgcctccccgttttctccacctttctcagacgaaactgtggcggtattgatcatgttttggagctgagagagcggtggcatggcttgaactggaacaccaccctgggggcgaaccagtagcccctttgcagctgctttcttcctaacttcagctgcagcacgagctgctctttcatcaaaacctctgccccgtggttgagtctccccaaggacagcagagttcagtgcatttgtcctcccagtagcagctgcgttttggaacgcatgtatcaggtctggatgtgcctttaggagatcgatagccttttgcgtgttggctgcattagctgcctgtcctttctgcttttgtgcagtcatctgaagctcacgcatcttaaacgtcttcatccaatttagagagtctcgtgtcctagaatcatcgtctcccaattgtttaacaagtatgtcgtatgttttcttctcatgctggtgtgagagcttgaatgcacccatacagttgaacgcaatggcaagagcgtggtagcatactgcagtctgaatgtgttcaggaccaagaagtctctcatttttcttcaaagcctcttgaagataacgtagagctgtgtccattttgcccatgtcttgatacatcatggcaacatttataaatgtagctgcaacatctggatggtcagggccagatgaaaggccaagtagaagcaaggctcgacccatgttttgtagagcaagttctgtctgattcagtccatggtagaaaagagccatattgccatagctatgggcagtatcaggatggtccaaaccaaggcatcgctcattaataatgagttccttgtgttgctgcattatggccccagccatatctcctgcatggtacaaaaccatagccaggtacctgcagcagtttgcaacttccctgtgcattggacctgagactttctgagttatcaaagatgctttgctggtatagattttccttttttgactcacttgttcatcttctaaaaaaagcaaagtttcttctctccagaataatgttgattctctgtgttgtgatcctctataggataaatccctagacaatcctcttaatcgcgcttttcgtttcgaaaaatttaaactttttaactccgttgatcgagatggtacagtcagcggtggaagttctattaccgtcggcgtgggagattgaggtcgcggtggtcgcttcggtgtttttaatcgcttcctattggctattcgcttacagaggaggcggagttgacaatgtcgtcggtgttggatttgatcggtctcgtctcatgcagaatcttgattccggtgacgcttttgacaaagacaagataggacacttgagaggagacactcaaactaatgctgcttatatagtcaaggtggaactcttggctgctaagaatctaattggtgctaacttaaatggaacatcagatccttatgctattgttaattgtggatcagaaaagcgattcagttctatggtccctggctcgagaaatccaatgtggggtgaagagttcaattttcccacagatgaacttcctgctaagattaatgtaacaattcatgattgggatatcatttggaaaagtactgttcttggctcagtaactattaatgttgaacgtgaaggccaaacgggtccagtgtggcactcattagacagcccgtctgggcaggtttgccttaacattaatgcaatcaaactacccgtgaatgctcctagggctgtaactggatatgctggagccggtagaagaagggtcacattggatcagcaaggcccaacaattgtacatcaaaagccagggcctctgcagacgatatttgatctcctcccggatgaggttgtcgagcacagttattcatgtgccctggagaggtcattcctgtatcatggccgaatgtatgtttccgcgtggcacatatgtttccactccaatgttttctctaagcaaatgaaggttgttgtccctctcggagatatagatgagattcgtagaagtcaacacgcgttgataaacccagctataacaatcatactacggatgggtgctggtggacatggtgttccccctcttgggactcctgatggtagagtgaggtataaatttgcatcattttggaacaggaaccatacactaaaagcattgcaacgtgcggtgaataattatcatgcaatgttagaagtcgaaaagaaggagagagcacagtctgtccttaaaccggatgcgctttgcgtgctcataggctctgtgaaaggaggtggtaaagtacaagtgaaagctcctgaagatactgcagctgtacctgtaaagtttcaggctttcatcaaagaagaagtccttgttaacatctacaatgatgtttttgccagtacacctgagcaagtcctgaacgtcacattcttgttggctgttgattctatactaatgagtacatctgcacggaaggataaaaatcttaatattgagccgtggcatactgctgaagaatatgatggtcaagttagagagattaagtttagatccatttgtaatagtccgatgtgtccaccagacactgctgtgacggaatggcagcatgttgttctatcaccagataagaaagtgctggtttttgaaacagtgcaacagccacatgatgttccttttggttcttactttgaggtccactgtcgatggcgcttggaagctaaagacgagacttcatctgttatagatataagagtcggtgtacatttcaagaaatggtgtttgatgcaatcgaagattaaagcaggggcaattgacgagtacaagaaagaagtggaagtgatgctagaagtggcattgtcgtatctcaagtcacactcttcctcaagtagccatggtgatatagacaagtctgctctatcatctccaacaccagaaaacatcagctaaaacctaatttaccaaaatcaaaaagcttctcaaagtttcattctccagccagctaattaagatcatccaccatcatttttcttcttcttttacatgttaaagtgtatatgtggtaacagtaattatgaatggatatttacagaggcttgtctgatttctggtacttgtgacaataacaaaggaaaagtttgggttctctcacaactctatttgtattggcaaatacaaagtaagtgacaattccaattaaaaaaaaaaaaaaaaaaaagggcggccgctctagattttccacacttctgatcgcgtgtgatgtagaatttattaacttcttgagagagccaggcacatcttccataaaacccaaacattccagctctggaacgtcagactttggtttatctccagggttctgaactttgttcagtgctgcgtcatactgcaaggcaagtgttgttgatagagaagagtgaagtgttgaaagagacaaaagatctctggcacggtgaacatgcgctctgatagatctatcatcatacaatgctgcaaccatttccaaggagcaaccaccaatggtgatgtcagctacttcagagatctcattgtagtcttccaaatgatgagtctctccatctttattgcggagtaacaactcataacaagtgaagtagcacgtctctggagcatcaaggaggaactgccttatatccatcacagagtctccagggttcaattgaagctccattttacccccactttgtgttttgacagacacaggataaagacggagttcaccttgcttgggttgggcatcgttattttcaacttgtgactcactttcgtcagccttaggaatcgtaggagcaacttcattggcttcaggcaccgcagagtcaacagcagtgagggtgccattatcgggagcagtaaccggagcagcagcagtagcaaccggagcagcagcagcagtaaccggagcagtagcaggaacagtagcagcaacaggaggagcaggagcatcggatttaacatcagtagtggaattggtggtagtgctctgagccgctctcttggccttcgatttgttcgacttcccagccattttcacctggaggggtcgagagaaatggagtaacgggagagacgacggagagagcggcggagtaggaaagagatgaggtttaaggagggttgaagtgaaagaggcggctgatgatattctgactcctc

SEQ ID NO: 1226 - DNA, 2043 bp, Arabidopsis thaliana
  Clone ID: ARATH-23APR03-CLUSTER8788_1
gagacactgtcttcactcttttttgcttatcaacaaactctgcacaaatcttaacctctctgtttcttctctttaattctctctttcatcgaaagaaacctcaaatttcaaatcttcgcattgtccgccattcttatacttcccctagagaagcttcttagggttcttagtttcttcctctgccgcgtcttctcaagtttaaaacttgtctcttcttcttcaaatccaatcaatgggtagagattttctagttctaagtattctcattctacttctctctgggattgtatcttcagctccttcagctaattctcctgcaaagattcttaatgggtttatctcaaatcatggctcttcactaatgaaatggttatggtcactcaaaaccacaaccaaaacaagttcgaatcctcttccattttctgatcataaagtttgctttttaatctttttctaacgaataaaggtttctctttttttatgaatcagctattgcaacgagatcgatggtgaaattcgaaaatgggtatagtgtagagactgtgtttgatggaagtaaacttggtattgaaccgtattctattgaagtcttaccaaacggagagttacttattcttgattctgagaacagtaacatctacaagatctcatcttctctttcattatatagcaggccaagactggttactggctcccctgaaggatatccaggtcatgttgacgggagattacgtgatgcgaagctgaaccatcctaaggggcttacggttgatgacagaggaaatatatatgtggctgatactgtgaataatgctatccggaagataagtgaaggaggagttacaactattgccgggggcaaaacggttcgaaatggagggcatgtggatggaccaagtgaagatgcaaagttttcaaatgattttgatgttgtttatgttggaagtagttgttctctgcttgttattgaccgtggaaacaaagctatcagagagattcaactccatttcgatgactgtgcttatcagtatggaagcgggtttcctcttgggattgctgttcttgttgctgcaggtttctttggttatatgctagctctgttgcaacgaagagtcggctctatcgtgtcttctcataatgatcaagaaatgttcgaagctgatcctgatcaaaagcctatgaaacattccagaccatctctgattccggctggagacgagcagctagagaaacaagaggaaacatttgtggtatcgctgggaaaactcgtttcaaatgcttgggagtcagttatggagatccttagaaaaaagcagacaggcaccagctttcagcagtaccatgggacaacaaagcagtctgctgcatttagcacatcaactccatggccaattcaagagagctttgtgattcgagacgaagacggacctcctcctgttgagcccaggaacccaactccaagaaagacttatgcttttatgtccaaagatgcagagaaaatgcagcagctacgtcagagccgcgcattctacagtagctgggacgctgagttccccaaccagcagcaacagcagcaaaagcagcaccagaagcatcagcatcagcaacaacagcagcagcagcatcgaaggcattactcatcgatcccgcatacttattatgagcaggacagtgaaaagtctaatgagatagtctttggagcggtccaagaacagagcagcaagcgtgtggctaagcctaagccgaagcctatagagtctggagatcaaatgaataataatactcaacagaatcttcactacagatctcattctgttagttacccatatggatactatcctaatacatgaaaagtctccggttttgtgcgtttctgagattatcagtcttccttaataagattatgcagggaattaaattttttgggtataggtgtttgtattggggaattttaagagtatgctctcgtcttatgagaaatgtctcatactttgattgtattgggtaatatatatatgaaaaaatgatatgattatctttgtg

SEQ ID NO: 1227 - DNA, 2177 bp, Arabidopsis thaliana
  Clone ID: ARATH-23APR03-CLUSTER8791_1
gaaacgccattagagtcttgtgtgtgttaataatgaatctcaaaacaaaacttttttgtttgtttgttttggaattagggttttagggtatattcgcaatcactctaatcggataattcctctactctgttaacattatcttcttcttcgttcctaccgcaaatggcgggtttctcactgtactgttttaaaaaccctcgaattctctttactcttccgtcggaatcacctctctttgttttgggttctgataaatgttcaccggcgacgagacggccgagtagaaagactcgtgggtttgtcgtgacgtacgcgcactctaatccgaagataatcaatccgaagaagaagtcgaggtatgggcaaacgttatctccatatgacagtgatgaagatgatgatgatgatgatgatgatgatgatgatgactggttacttaatgatgatttcgctgaggttacagagtatgagaagaagaagcctaagtcacataagcaaaccattgctaagaaaagtgtgaagaaagggattgtcaagcctgaagaaagtgagactgatgaagatgatcttgatttaggcattagtcctaatgccacttctgagaagaagaaggagtcttggcgtttagatggtcgaggaaagatgagttcgaggaagtatgtggagaaactataccctcggctcgcagaagagattgatatagatccgaaatgtgtaccacttctggattacttaagcacatttggtttgaaagagtcacactttgttcaaatgtacgagagacacatgccatcccttcagattaatgtgttctcagctcaagagagactcgattacttgttgagtgtcggtgttaaacacagagatatcaagagaatgctcttgagacaaccacagatacttcaatacactgttgagaacaatctcaaagctcacatttcctttctaatgggtcttggcattcctaattccaaaataggacagattgttgctgctaccccttctctcttctcttacagtgtagagaattcattgagacctacgataaggtatctgatcgaagaggttgggataaaggaaaccgatgttggaaaggttgtgcaacttagccctcagattctggttcagcggctcgacataacatggaacactcgctacatgttcctctccaaggagttaggagcacctagagacagcgtagtgaagatggtaaagaagcatccgcagcttcttcactacagtatcgatgacgggttcttgcctcgaatcaatttccttaggagcattgggatgtgcaattctgatatactgaaagtcttgactagccttacacaggttttgtctctttcactagaagataatctaaaacctaagtacatgtatttggtcaatgagctcaataatgaagttcacattctgaccaaatacccaatgtacttgagcttgtccttggatcaaaggatacgtccgcgccaccgcttcttggttgagttaaagaaagtgcggaaagggccattccctcttagttcattagttccaaatgatgaaagcttttgtcagcaatgggctggaaccagtgtagatacgtatctcgcctttcgccagaggctgttactcaaggagtttgcaaacaagtatgacaagagaggatgatgatgggaatctcttcttcttgattaccgacaataagtcaacactttggttagtttcctgcttcaaatccggtaaaagaggttcatatgcagaacctgtgaatgactcattaacttctggtgaaacgcgagatactgcaaagattgaactttttcaggaaagtaactccagagaagccggcttggcacagacatcatatttgtttaccagatgagagtttcctcaatcttttccaggttttgtctacattttaagttctgctatgtcttgtggtaaagttttactctctttttctcctcttctttctaatgaatcatggagaagagaaaagaatccatgtgtagtattttttggcctagtatatatatacttaatactaataagagcatcttataaaggtattgtttgttatgtttgatccttctacggacaagacgttggaagaaagatttttaagttatgtagattgagtttctttgtgtgcttctttactttatactctatataaacattgtgtcttcaat

SEQ ID NO: 1228 - DNA, 3617 bp, Arabidopsis thaliana
  Clone ID: ARATH-23APR03-CLUSTER8793_1
atttcaattagccctagcaggttttttgtctatgtcactactcttcctaagaagagccaagccgttatttgtatcttgttgttcagctactcattctcgctccagcttcttatctccgacgcttacgaatcagctagttcgttcgtttcacggttccagaacaatgtcggaatcagagaagaagatcctgacagaggaggagcttgagcggaaaaagaagaaggaagagaaggctaaagaaaaggagttgaagaagcaaaaagctttggagaaagagaggctggctgaactgaaggcaaaacaggccaaagatggaactaatgtccctaaaaagagcgcaaagaagagttccaaacgggatgcgtcagaagagaatcctgaggattttgtggaccctgaaactcctcttggagagaggaaaaggctttcttcacagatggccaaacaatacagccctgctaccgtggagaaatcatggtatgcttggtgggagaaatctgacctttttaaggcggatgctaagagttccaagccaccttttgtaattgttcttcctcctccaaatgtgactggagccttgcatattggccatgcgcttacatctgcaattgaggatacaattattcgttggaagagaatgtctgggtataatgctttgtgggtacccggggttgaccatgctggtatagctacacaggtggtggtcgagaaaaagatcatgcgtgatagaggcatgactaggcatgatgttggccgtgaagaattcgtaaaggaagtgtggaagtggaagaaccagtacggcggtacaattctaacacagctacggcgactaggagcttctctcgactggtctcgtgagtgttttacaatggacgagcaaagatcaaaagctgtcactgaggcctttgtacggttatacaaagaagggcttatatatagggatattcggcttgttaattgggattgtattttgagaacagccatatctgatgttgaggttgagtatatcgacattaaagaaaaaacgctactaaaagttcctggctatgagaagccagtagaatttggtcttcttacctcgtttgcttaccctctggagggaggcttgggagaggtaattgttgccactaccagggtggaaacgatgcttggggatactgctattgctattcatcctgatgatgcaagatacaagcatcttcatgggaaatttgctgtgcacccatttaatgggcggaagttacctattatctgtgatggaatacttgttgatccaaattttggtactggttgtgttaagattactcctgcccatgatcccaatgactgtgaggttggaaagcgccacaagctggaatttataaatatattcacagatgatggaaaaatcaacacaaatggtgggtctgacttcgcagggatgccacgctttgcagctcgtgaggcagttgttgaagctctgcagaagcaggggctgtacagaggtgccaaaaacaatgaaatgaggcttggactttgctcaagaactaatgatgttattgagcctatgataaagcctcaatggtacgttaactgcagcatgattggaaaggaggctcttgatgttgctatcactgatgaaaacaagaaactcgagtttgtaccaaagcagtacacagcagaatggagaagatggctagagaacatacgtgactggtgtatttcaagacagctttggtggggacacagaataccagcatggtatgccactctagaggaggatcagctcaaggaggttggtgcatacagtgaccattgggttgttgctagaactgaggacgatgctcgagaagaggctgctcagaaatttttggggaagaagtttgaactcactcgagatcctgatgtacttgatacatggttttcttctgggctctttccattatctgttctgggatggccagatgtaaccgatgacttcaaagccttctatccaacttctgttcttgaaactggacatgatatcctctttttttgggttgctcgtatggttatgatgggaatgaaactaggtggtgaggttccattcagtaaggtttatttccatcctatgatacgtgatgcacatgggcgtaaaatgtcaaaatctcttggaaatgtcattgatccacttgaagtaataaacggagtaactcttgaaggtcttcataagagattagaagagggtaacttggatccaaaagaggtgattgttgccaaagaaggacaagtgaaggactttccaaatggtatccctgaatgtggcactgacgctcttcggtttgcgctcgtctcttacactgctcagtctgataaaattaacttggacattcttcgagttgttggttaccgtcaatggtgtaataaactgtggaacgccgtcagatttgcaatgatgaagcttggcgatggttatactcctccgcagactctaagtcctgaaaccatgcctttcagctgccaatggattctctctgttctaaataaggcaatatcaaagacagtggtgtcactagatgcatttgagttctcggatgcagccaacacaatatatgcatggtggcaataccaattctgtgatgtgtacattgaagcaattaagccttattttgctggtgacaacccaacgtttgcttcagagagggctcatgcacaacatgctctctggataagtctggagactggtttgagactgcttcacccatttatgccttttgttactgaagagctatggcaacgacttcccgcacccaaagacacagaaagaaaggcttctatcatgatatgtgactacccatctgccatagagaactggtcaaatgagaaagtggagagcgaaatggacaccgttctggcaactgtgaaatgcatgagagcactcagggcagggttgctggagaaacagaaaaacgaaaggttacctgcttttgctctgtgtgaaaacaacgtaacatctgaaattgttaagtctcacgagttggagatcagaacccttgcaaatctatcatccttagaggttgtgtcaaaaggacaacatgcagcaccacctggatcttcagttgagacggtgaacgagaacctcaaagtatatcttgaagtggacggagccattaacacagaagctgaacaagaaaaaatcagaaacaagattggtgaactacaaaaacaaaaagagaagttgcagaagatgatgagtgtgtctacttacgaagagaaggtccctgcgaatataaaagaagacaacgcaaacaagcttgctaagatactccaagaattcgatttctttgagaaggaaagtgctcgtcttgctgcagaaacaagcaattcaggaaatcaataaatggaactgaagaactgagacacagagagtcacagtttctatctgcgaaggccaacaaatgaaatatttcaggttaagaaactatgtctgatgatgttattgtgaactagttttgagttataacactatttttactacatctctgaaaagaagactgttgatattagttttgaagagattattcccaaacaccatttgttttggtcaacatgaacaacttaattgttctttgtttattgttgcacttagcttagagcca

SEQ ID NO: 1229 - DNA, 2294 bp, Arabidopsis thaliana
  unsure (1)..(2294): unsure at all n locations
  Clone ID: ARATH-23APR03-CLUSTER8796_1
gtctccgctaattagaagaagagacatcagatcttatcaaaaccctagctttcggtgtctctctcgatcctttagctcaatcgaaaactgaatttaggagctgcgatgggttccagatctcgtaatgataatttccagtccggcgatggcgctagtcctgggaaaatattcattggaggattgcacaaagacacgactaatactgtgttcaataagcactttggcaagtacggggagattacagattctgtcattatgcgagatcgacatactggacaacctaggggtttcggtttcatcaccttcgctgacccttctgttgttgacaaagttatcgaagatactcatgtcatcaatggcaaacaggttgagatcaaaaggactattccgaaaggtgctggtggcaatcagtcaaaggacatcaaaacaaagaagattttcgttggtggtataccctcaacggttacagaagatgaacttaaggacttctttgccaagtatgggaacgtggtggagcaccaggttattcgagaccatgaaacaaacaggtccagaggttttggttttgtaatttttgatagcgaagaagtcgtagatgaattattgtccaaaggaaacatgatcgatatggcagacactcaggtaagcttgtacaaatggggattagaattttggttcatgatgacatatttatcttggtttcaatttgatattttctccttgttcctttcattatacacgtttaacttagttagaattctacccactagcttaccaaatgtaaggagcttgtcacagtaagataggaaatccctgctatagtttgggtccttagcatagctaggttaattaagttgctttgttgtaggtggagatcaagaaagctgaaccaaagaaatctctaaaccgttcacctccttcttacggtagtcaccctagaggtcgttcttctaacgatagttatgcaagttatggtggaccttacggaggttttgatggagggtatggtcatcctccaggtcccattaggtcacatggaggtcctgctagtagatatgctgggggatatgggtatggtcgtggcagtgtaggccctgaatttggaggaggttataataattatgggggtggtagtttaggaggttaccggaatgaaccaccccttggctattctagtcgttttggaccctatgggagtgggtttggtggtgagggatatggccgtggaggagaaggagcctatttgggatatcctcgtggaggaggggaaggctatgggggatatggtgggcctggttacggcggtgcatatgaatctggtggcccaggtggcagttatgaaggagcaggtggtccatatgggaggggttatagtagcagtagtcgataccatccgtatgcaaggtagggtcgaggtaatagcaatcagttggagctatagaagcttctctcacaggttcctctagattgttccaattgctctaggtgcattctagagttatcatgtagcgccaacatcaggaagggttgctaaggacaggaagagcatcaaaaagcttttattagtcatcttttagttgtgtgtttacctaatttaagtgttgtcttatctctataacttagattgtgttatgtagactttagcatatttgggcttggagtttgtttctcactggcacaagaatgatttatcatttggtagtcttgttagatgatcaattactcgcttagcttagttttcacaatcatacgaattagcttaagaagctctgcaaaatgtgcactcatctattctttagagctcaagttgaatgctttatgtggtctcttgtatctctgtacattttgttgtgctgaacaaaggtttgacggcagttagtgcatgtgtaagtaggcatatttttgtcagctgcatacgtaggttctagctacaaattggaattgtatgtgtttgaaaacgtaaaatcaattataaatgtttttgaaaatcatctatacaagcatggttatttggttcttgtttccttattttttcgggtaagggccacggataattggttagacattggttctaataatgtgggttttgttatctgtaatttctcgtcaaaatgatgtactgtatcattaaatgaatatcacttattgtacatgcttttataagttaattgaaatccaaactcttttacgttttaaccccccnaacagccggggnatggggcccgggnccccaattttccgggaagggccccggaaagggggaacccngggccaaaaaggggggttnanccngc

SEQ ID NO: 1230 - DNA, 1848 bp, Arabidopsis thaliana
  Clone ID: ARATH-23APR03-CLUSTER8819_1
ggtcgccggtagttgtttccacgaaaaacaagtgatggaggaagtagtagtagtagttgcagagccaccaccgaagattactccctttgtggaatacgaagaagagcttgaagatgatgacgatgatctctcgctttcgtcagattccgatatcgctgaagctcttgattggctagacggtaaagacgatgacgagctaattggtggtggcttttctcttcatgctcgtcgtcctaatgctcacggtggacatggttcacgccctaactctagtgctcttcagcctatttcaaataaggcccagaagcttactagtcacgttcgtgcttctcctttggagggatgggaaggaagagttaaagttgggatgtcgaattctgtgacaactgcgattcgtggaagtcttagagatacagaaattgggagaagtaggaatactgataaagcggaccgggcaactgttgaacaggctcttgatccaaggacgcgtatggtattgtttagaatgcttaataggggtgtgtttaacgatgttaatggctgtatctcgacaggcaaagaagcaaatgtttatcatgccacaaaatctgacggttcggaacttgcaataaaagtgtacaagacatctgttctggttttcaaggatcgagatcgatatgtacaaggagattaccgttttagatatggctactgtcgtcacaatcctcgaaagatggtgaagacatgggctgaaaaagaacagagaaatctcaagaggcttcatgcagcaggaattaggtgtccagctgttatacttctacgccttcatgttctagtcatggagtttatagggagggatggttgggctgcaccgcgtctcaaggatgccgcattgtctctggacaagttgcgcgagtgttacttagagttgataattcaaatgcgagtattatatcagaagtgcaaattagtgcatggggatctcagtgagtataacatactttattttgaagggcacctttatataattgatgtttctcaatctgtggatctggaccatcctcttgcactcaactttctacgggaagattgtgaccatgtctcggattttttcaaaaaacatggtgtggctgttatgacaatacgagagctatttgacttcatagttgacccgacaatttcagacgaaaatgttgatagctatttggaagaggtccaacggaaagttatagagcgaggagagatatccgtagaggatgaaatcgcggattctgtattcatgaagtcatacataccgaaatctctggatgctgtgaacaacccagaggctgatgtagcgaagataacaagcgggcaggacacaggagacatgctgtaccaaacgataacggggcttaaggatgctcttcctaaagtagacgagcagcaaatagaggtgaatgctgaagaggaagaagaagaagaggaagagggaagtggagaagaaagcgaagaagagagtgaaaaagaattgggtcctgaagacaagaaagctgcaaggaaagagcacaagaagaaagtgaaagaggagaaacgagagtctaggaagacgaaaacacccaaatctgtcaagaagcgaaaaaagaaagtctctaaaccccacaagactcgttagcatcttttgactcccatacttgtatcttttactatggacccgaaggctcttttgggtctctttatccaaaacagtaagttcttgtaatattcacagtacgattatgatagatcacatgataggtttgctggtgttttgagaggactaaaataatttttgttacttgacaattcgactaatggtagtctctaaatttagcaaaaaaaaaaaaaaaa

SEQ ID NO: 1231 - DNA, 3608 bp, Arabidopsis thaliana
  Clone ID: ARATH-23APR03-CLUSTER8827_1
gattcgctgtcttgctagttgctgctacaactagagcagcctctgtctctgcttgaggaaggaagagagatcaatcaacaaacaaactatggcgcaatctctcgaacttctgttgatccaattcctcatgccagacaacgatgctcggcgtcaagcagaggatcagatcaaacgtcttgccaaagatcctcaagttgttcccgctctcgttcagcatctccgcaccgctaaaacccccaacgtccgccagctcgccgccgttctcctccgcaaaaggattaccggacattgggctaagctttctcctcagcttaaacagcatgttaagcaatccttaatcgagagcatcactgtggagaatagtccaccggtgagacgtgcgagtgctaatgttgtgagtgtagtagccaagtacgctgttccagctggagagtggcctgatttattaacctttctcttccagtgtagtcagagtgctcaagaagatcatcgtgaagtagcattgatccttttcagctctttgacagaaacgattgggaacacatttaggccatactttgcagacttgcaggctcttcttctcaagtgtatgcaggatgaaagcagtagtcgtgtcagagttgctgctctcaaggcggttggttcttttctggaattcaccaacgacggagatgaagtggtgaagttccgagatttcattcccagtatattggatgtatcaaggaaatgtattgcatctggagaggaggatgttgctatacttgcttttgaaatttttgatgagctgattgaatctcctgctccccttcttggagattctgtcaaagcaattgtgcagttctctcttgaagtttcctgtaaccaaaatctggaaagtagcacccgtcaccaggcaatccaaatagtttcatggttggcaaagtataaatacaattcccttaaaaaacataagcttgtcataccaatcttgcaagttatgtgccctttactcgctgagtcatctgatcaagaggacgatgatgatcttgctcctgatcgtgcatctgctgaagttattgacactctagctatgaacctgccaaagcatgtattcctccctgttcttgaatttgcttccgtgcattgtcaaagtacaaacctcaagtttcgggaagcttctgtaacagctcttggtgttatatcagagggttgctttgatctgatgaaagagaagctggatactgttcttaatatagtcttaggagctttaagagaccctgagctagtggttcgaggggctgcatcatttgcaattggccaattcgctgagcatcttcagcccgagatcctatcacactatcagagtgtccttccatgcctattgattgcaattgaagatacatctgaggaagtgaaggaaaagtcacactatgctttagcagcattctgtgagaacatgggagaggaaattgttccgctgcttgatcatttaatggggaagcttatggcagccctagaaaatagtccgcgtaatctacaagagacatgcatgtctgcaattgggtcggttgctgctgctgcagagcaagcattcaatccatacgctgagagggttctagagttgatgaagtttttcatggtgctcaccaaagacgaggatcttcgtgcccgtgccaggtctactgagcttgtagggattgttgcaatgtctgttgggagaaaagggatggaggccattttgccacctttcattgatgctgcaatatcaggatttgaattggagttcagtgagttgcgagaatatactcatggattcttcagcaacgtagcagaaatattggatgacacttttgcccagtatttgcctcgtgttatgccattagtatttgcttcgtgcaatcttgatgatggatctgcagtggacattgatgagtcagatgatgaaaatgtcaatgattttggtggggtatcctctgatgatgatgctgatgatgagcccagagttaggaacattagcgttagaacaggagttttagatgaaaaggcagctgcaactcaagctcttggcctgtttgcactccacactaaatctgcttttgcaccctacctcgaggaatcattgaagattatggacaaacattctgcatattttcatgaagatgttcggcttcaagcagttactggtttgaaacatatattggctgcagctcatgctatcttccagactcataatgatggaactggaaaggcaaatgaaattcttgatacagttatgaataattatatcaaaactatgactgatgatgacgacaaggaggttgttgctcaggcttgcatcagtgttgccgatatcatgaaggattatggttacccagccattcaaaagtatttatcaccccttgttgatgcgacattgctactgctgacggaaaaagcagcttgccagcagttagaagatgagagtgatattgatgatgatgatactggacatgatgaggtcctcatggatgcagtttctgacctccttcccgcctttgcaaagtgtatgggttctcaatttgaacctgtctttgcccaattctttgagccgttgatgaaatttgcgaaagcttcacgtcctccacaggataggacaatggtagttgctagtcttgctgaggttgctcaagacatgggtcttccaatctcttcctatgttgatagattaatgcctttggtgctcaaagagttggggtcaccagaagcaaccaatagaaggaatgcagctttctgtgttggagagctatgcaaaaacgggggtgaaactgctcttaaatattttggtgatgtgctacgcggaatttccccacttttcggggattcagaaccagaccttgctgttagggataatgcagcaggtgctaccgcaaggatgattgttgttcatcctcaactagtcccgctaaatcaagtacttccagtgttcttaagaggtctacctctaaaggaagatcaagaggagtccatggctgtttacacctgtatatattcccttgtttcgtcatccaatccacagatcttctctcatgttccggagctggttaaaatctttgggcaagtattggagtcgccagtcgaaaaagttgaagtgaaagcaattgtaggcagaactttctcccatctaatctcggtttatgggaatcagttgcagccaataataagtagtctaccgccttctcaagctaacgttctcgctgcgtttgcatccacgagttgattgtcgcttgtgatatatttaatatctcagaagcgaaaactgtcttcagcttttgtttttcttttgaagtctattctttgctcaattgagtctcaaatcttgtttttttttcttcttctttcctaaatatccaattttagcatttgagggtaagtgggtgtattcctgttttggcttggctatatgttccttacttcagagtttcgtcctcattgtttatttcattttctccacttatttatagtcttcaattcaaagtttgcaagctttgagtggatcagtggagtatctgtatttgtattttgacatacaatattttattttggccttgataaaattgagtatacataaaaaaaaagcggacgcgtgggag

SEQ ID NO: 1232 - DNA, 3066 bp, Arabidopsis thaliana
  unsure (1)..(3066): unsure at all n locations
  Clone ID: ARATH-23APR03-CLUSTER8847_1
tccccccccccccctccttgcctgtgtcgtggggggcggactgtgggctttgcaactttgtcgccccccccccctggctgtcttgtttgctcctcttgtgttcttccccccccctgcgatattcttctccccccttctctacatcggccgttggaatccgggggggtgccccccccgggccccgcggggcccccccatattcttcaggggggaggaaaattgctaatcggagaaacaagtgagtggaggagagagacagatataaaggttccctcactagtcccccccccgccaattaattaaggtggatatttgatgctaggagaggagagtgagagataagatgggtttcgtctgaagagctccaacttgattcgctcaattgatctcttttgtatcgacaacctgcgatggcgccggcggaatctggagtctctccccgtcggaatccttctcaactctcgtggatgaatctctctagtaacttgattttggcctaccagagctttggtgtagtctacggtgatctcagtacttctcctctttatgtcttccctagcacatttattggaaagttgcacaagcatcacaacgaggatgccgtatttggtgctttctctttgattttctggaccctcacgctcattccccttctcaaataccttcttgtattactgagtgccgatgacaatggagaaggcggaacatttgctctctattccctgctttgtaggcatgctaagcttagcttacttcctaaccagcaagctgctgatgaggagctctcagcttacaagtttggtccttccacggatactgtaacttcatcccccttcagaacatttcttgaaaagcacaaaaggctgaggaccgctttgctgcttgttgtactttttggagctgctatggtcattggagacggggttctgaccccagctttatcagttctgtcgtccttgtcaggcttgcaagctacagagaagaatgtgactgatggcgaactactggtgcttgcctgtgtcatattggtcggactgtttgctttgcaacattgtggtactcacagggtggctttcatgtttgcaccaattgtgatcatctggcttatttcaatattcttcatcggtttatacaacatcatccgttggaatccaaagataatacatgcagtttccccactgtatatcatcaaattcttcagagtgactggtcaagatggatggatatctcttggaggggttcttctttctgtaacaggtactgaagccatgtttgcaaatcttggccatttcacctcggtctcaatcagagttgctttcgccgttgtcgtgtacccctgtctggtggtacaatacatgggccaggcagctttcttgtcaaagaacctcgggtctattcctaacagtttttacgattcagtcccagatcctgttttctggcctgtctttgtcattgccacacttgcagccattgttggcagtcaggctgtgataaccactacgttctcaataatcaaacaatgccatgccctagggtgcttcccacgcatcaaagtagtccatacttcgaaacatatatatggacagatctatatcccggagatcaactggatcctgatgatccttactcttgcaatggctataggctttcgagacacaactttgattggaaatgcctacggaatcgcatgcatggtagtaatgttcatcacaacgtttttcatggctcttgtcatagtcgtggtttggcaaaagagttgttttctggcggctttgtttcttggaactctatggataattgaaggtgtctacctctcagcagcgctaatgaaagttaccgagggaggttgggtgccttttgtgctcacgttcatatttatgatcgccatgtatgtgtggcactatggcacccgtaggaaatacagctttgatcttcataacaaagtttcattgaagtggttgctgggattaggacctagtctaggtattgtccgcgttcctggaataggactcgtttactcagaacttgcaactggagttcctgcaattttctctcactttgtgaccaacctgcctgcattccataaagtcgtggtgtttgtttgtgtgaaatcagttccagtgcctcatgtttcccctgaggaacgcttcctcattggtcgagtttgcccgaagccttatcgtatgtacaggtgcatagtgaggtacggttacaaggacattcaacgggaagacggggactttgagaatcagcttgtacagagcatagcggagttcatccagatggaagcaagcgacctccaatcctcggcttctgagtctcaatctaatgatgggagaatggccgttctaagcagccagaagagtctctctaactcaatcctgacggtttcagaggtagaggagattgattatgctgaccccacgatacaaagcagtaaatccatgactctgcagagtttgcgttcagtgtacgaggatgagtatccgcaagggcaagtgaggaggaggcatgtgaggttccagttaacggcgtcaagtggtgggatggggtcctcagtgagggaagagctaatggatctgatacgggcgaaagaggcgggtgttgcatatataatgggccactcgtatgtgaaatcgaggaaatcctcgtcttggttgaagaagatggcgatagacatcggttattctttcttgaggaagaactgcagagggccagccgtagcactcaacattcctcacatcagcctcattgaagttggcatgatttactatgtttaagccactaatatgagtagcattcataattcatggggggaataatgggaacaatctattcaagtttcaagtgtccccaaggcaaaaattgtatacttaaatattcttctggttgggaatgtagtctgcgaaacattatatcttaatcctgaaatgtgtgcttggaagtgtaaaatgtaaaccactcttaataagctaaagacttcactctcaaaaaaaaaaaaaaaaaaaactcgagggggggcccggtacccttgnctcaccgggcgaaacaccacacaaatgggag

SEQ ID NO: 1233 - DNA, 3395 bp, Arabidopsis thaliana
  Clone ID: ARATH-23APR03-CLUSTER8849_1
aaaacttctctctatctctcttttctctgttccggatttgctctgtttttctctctgttccggatttgctctgtttcactctgttcttgatttgttctgtttccctctgttttcttgggtttattctgtctctgtcttatctttttcttctagaaaagatggaatctactgaactacacgacatagatttcatttcaaatccttttacctccttttctgaaccaactttcttcactccaaccacaagctctctccgacccgacttcgtatccgacgaaccggattcaccaaaggcaaaaaacgaagacgaagaagacgagtacatcaccgagttgactcgccagatgactaactatatgcttcaagacgatgaaaagcatcaaaagtcttgtggtagtggctctggctcgccgcaatcgactctctggtcaccatttgcttcaggattaagcagtccaataggcccttcccgtgaaccatcgccgccactaactccggcaacggtaccggtggagaaaatcatgacaaagattgatacaaaaccagtaacgatcccttttcaatcaaaacaagctctaatcgatgaccagatccgatccattcaagcaaacgtgagctcatcatgttttctcatttattattttactcagaatcttctttttaaaaaattccgtcggttatattatcaacggttcagatttaatctagggtttgtttccaccgttgttttattattttaagaattgatttttctaaacagttccagaagattaaaaaggagaaagagaaagagaggcaacgcaacgctgacgttttggggcacaaagcaagaaactaccaccacctccaccagaaccagagacctaggtcaggcgttaaggcggtgtttgttgacgggtcgggttcaagaaccgggtcgggtggtaccggagtgttcttaccgcgtggtcatggtaccgttgtggagtcacgcaagaaaacaggttaaaggttacaaaaatacttcattatctcgggtacaaagtggatcaccgtacgaaatggcgatgtcgacagagagccacgaagaaccaccggcggattttccacaggaatggacgtactgataaaacattggcacatgctcctggttgcttcagttataggttttcaaaaggtaggtacttttcggattgaatatcttctagtgggtcaaaataaaaataaaatgctttcaaaaaccattattttttaattggaaatacatagattttaaaattttggtgattttttgcttttattattgtgataaaatcaataattcctgtgataaaagaacaataaaatgttcatatatcccattcctatttggtataaaataaggggggtaaatctttatggggtctacgagaaggataagatttcattaccttgccatacattagcatagtgttggaatcgaatttttgattttgcacagattccattctttctgttgtgataatctttagtcaaatctgtttttgtttttttcgatttaactgacacttaagtgttagaagaatcttaaagagttgtgacataaaataatgtgaatggttattagttgggttaaggtcaggttgggttaagtttagctgattgagtaaaagctcaaaactcaattatttaggacaaaaattatattatagtaagaatcttgcgtacattattactttgtttgactgagtaagattccaaagattccttgtcaccaattaatctattgtgtggctattggtttgacagatacaccctcctaaattagaatcttccctcaactagttggtccccatttgtctccctttcactatcaacaaaaataaactatttaggttcaaaaatcaatctaaatcatttattttcttataagaccccactagtttcattcaataggtggattataatcttagataacctagatatttattcattttgtgattctttatttgttaccgttcgatcattgacaattacccaaggctataaaccaaaccacatagtgttaactttgtttctttctaaatatagtattatattcgagtcccgtattagatagaaacttaaaattctcacacccacatgtagcacttaccaggtttgttgatgatgttctttcaacacaaaggattatacttaacaactctcaagattaaagattttctgacaatttcattttcaagtcttaaccgttacccaatctaggagtcggtgagtttgtctactaaatatcaaccaccattttttttagaaatcattcttgttttatcatcatatgttttgacgtggcttggatattggtgggtggtggtggtggtgacaatttactatttattgtactgtttgtattcagatttgttgtcgttcgatgaaactgatgtttcaaccaaacagttttatgagttgttactctgaaattgcctaaccggtttaagtttggttagatgtagttttggttttggttttgacttttgtgtatggaaataaattggttgcaggatgttcaacagtaataataccagcaagagtagttgaagccttgaaagttcactttgacaaattgggtgttccttctacattctcttctgatatccctccttttcatggtaccaaccccacctatctctttcctaatttaatttcttgtgtttcttattctttaaagtaaagttatgatttacaagaattagataaataagggatgattgacaaacaaaaaaaatgaagaaaatttaatttaaaaaataggctaactatttgaaaaacgattaaaggaataatacaattttgtttggatgagttaacaaataagttttaagagttaggagttaaaaaaattgggtttatagaggtttaagtattattacagagtaagattgaatgtatttcgatatatgatgcttgaaatgctttactatatagatgcattgttggtgtccatgaacaacaaaaagatcaaaagtaacaaaaatacttcattatctcgggtacaaagtggatcaccgtacgaaatggagatgtcggcagagagccaccaagaaccaccggcggatttgccacaggaatggacgtactgataaaacattggcacatgctcctggttgctgcagttataggttttcaaaaggtagggacttttcggattgaatatcttctagtgggtcaaaataaaaataaaatgctttcaaaaaccattattttttaattggaaatacatagattttaaaatttggtgattttttcttttattattgtgataaaatcaataattcctgtgataaaagaacaataaaatgttcatatatcccatgcctattgtatgtaataaggggttggttgtttttatgtaagattccttgtaataaaagcattatgcc

SEQ ID NO: 1234 - DNA, 1912 bp, Arabidopsis thaliana
  Clone ID: ARATH-23APR03-CLUSTER8862_1
gatctcgccagtgagaaagactccaaggagagagagctcatacagagtattagaaattctcaaatcactagagaagatctcgtcttcttcctgattttaaacgcgatgcgaaggttaggtcaccaccgacttcatgggaagacgggaggagttggaacaaaggggatggtggcgaaactgtctatcggagtcattgttctactgatctgtacgctcttgctgcttttctcggctaacatcggtagcaatcgcgaaccgacccgtccatctaagataaacgtggaagagctctgggagagcgctaaatctggtggttggagaccgtcttctgcaccacgatctgactggcctcctcctacgaaggagacaaatggttatctccgtgttcgatgtaatggtggtttgaatcagcaacgtagtgcgatatgtaatgcagtacttgctgcgcggatcatgaatgctacacttgtgttgcccgaattagatgcaaactcgttttggcatgatgacagtggttttcaaggtatctatgacgttgaacattttattgagacactgaagtatgatgttaagattgtgggaaagatccccgatgttcacaaaaatgggaaaaccaagaagataaaagcttttcagattcgtcctcctcgagatgctcctattgagtggtacctgacaactgctctaaaggcaatgagggaacatagtgctatctatcttacccctttttcacatcgtttagcggaggaaattgacaatcctgaatatcaaaggttaaggtgcagagtgaactaccatgctttgagattcaagccacacatcatgaagttgagtgaatctattgttgataaactccggtcacagggccacttcatgtcgatccatcttcgttttgaaatggatatgttggcatttgcggggtgctttgacatatttaaccctgaggaacagaagatacttaggaagtaccgtaaagaaaattttgcagataaaaggcttatttacaacgaaagacgggctatcgggaagtgtccactgacccctgaggaggtaggtcttatattacgagcaatgagattcgacaactcaacaaggatatacctagcagccggtgaactttttggcggggaacggttcatgaaaccgtttcgaacattattcccacggcttgataaccatagctcggtagacccctctgaggagctgtcagcaagctcacagggattaataggatcagctgtggattacatggtttgtcttctctccgacatttttatgccaacatatgatggaccgagcaatttcgccaacaatctcttaggtcatcgcctttactatggtttccgtaccacaatcagaccagacagaaaagcattagctccaattttcatagctagagagaaggggaaaagggctggcttcgaagaggcagtgagacgagtaatgctgaaaacaaacttcggagggcctcacaagcgtgtatctcctgaatcgttttatacaaattcatggcctgaatgtttctgtcagatgaatccgaagaagtctagtgataaatgcccgccaaataatgttatagagattcttgacagccggttagagagtatcagagatccagattcaacttctcagacgaattccacggtcactggattagaacggtaaggatcttaactggtaagcctttggaacgttttatacctaaaagtgtttcaaacaaagaagagcagaagaagagagatgtgtctccaccattgttcatacaattcaggtagctcaacgtctctgtgtcaaacaattttctttatgaagcatagatttgaatcttgtttcaaaatttgtaacaaaatctaagagaagtgatgagattccactaatagttgttttattgagttaaaaaaaaaaaaaaaaa

SEQ ID NO: 1235 - DNA, 994 bp, Arabidopsis thaliana
  Clone ID: ARATH-23APR03-CLUSTER8866_1
aaaaatcaaaattccaaaaaaggggcttttaaaattttggacaagaacaaaaaaaaaagaaaaatggcaacgagaggagctgttgctgctgctgcatccacaatatggaagcaccgaagaaacccttctcttcgatcattatctcgccatttcaatcccaatttcaatcatagaatcatcccaacagggtttaaatatcaagttagggcgatacaaggaacaagtactgatcctgtcattacaccattaaagaacagagaggaaccaaagccacaaaactggaaaatcaaaatgctttatgatggagattgtcctctctgtatgcgtgaggttaatatgcttatggaaaggaatgaaaaacatggaactataaagtttgtcgacataagttcaaatgattattccccggaagataatcaagggcttgattacaaaacagtgatggggcagattcatgccattcagtctgatggtaacgttgttaagggtgtggaggcatttaggagattgtatgaagaagttgggcttggatgggtttacactatcaccaaatttgaaccaatagggaagttagcagatgttgtgtatgatgtatgggctaaataccgacttcaagtcacagggaggccatctatagaagctattcttgaagcaagaaagaaagataaggtagagacatgtggtgaaagcaagaactgcaagatatgaattttctttatactctttgaattgttacaaaataccaaaaccagtttggagttacaaattttctttatgtgagtgtgagaatttgtatatatatgatacacagccccattacattagccaaatcatcctgatgatacattatacacatgaataatttcagcaaattttgaaactgttaagagttttatatttggtaatgattttgtaaaggttagcttactaatgttattgaaatatttgtttgaataatgaaaatgaaattcaacattaaaaaaaaaaaaaaaaa

SEQ ID NO: 1236 - DNA, 1453 bp, Arabidopsis thaliana
  unsure (1)..(1453): unsure at all n locations
  Clone ID: ARATH-23APR03-CLUSTER8955_1
ccagtcgaactcgccggcgccatagcttcaccggagatccgcgaccccaaattgctcaacatgcccgagacaacgaacgcttgctgtctgaacgcggagcgcgcaaagcatcctgcgcataaggttatcagaacaaaataggaggacgacggtgcggcaattcgaggaaagggtcccggtgatcggaaacgacataagagtaaagatccgaccaccccccccctagtggaacgacgacggcacaaaagcttcaccggagatcagagacgcgaaaatggtgaacattccaaagacaaagaacacttactgtaagaacaaggaatgcaaaaagcatactttgcacaaggttacccaatacaagaagggtaaagacagtcttgctgctcaaggaaagcgtcgttatgaccgtaaacaatctggttatggtggtcagactaagcctgtcttccacaaaaaggctaagaccacgaagaagattgttttgaggcttcagtgtcaaagctgcaagcacttttcgcagcgtcctatcaagaggtgcaagcatttcgagatcggtggtgacaagaagggaaagggaacatctctgttttaagttggtttcatcttattttctgcgatttttgtacttgctggatttggaatccatttgttttagctctctcgtacaagattgtctcatctttgcttgttaactctatattttgaatcatcaagatatggttttgctgttaatcattgaccttcgataaataaaaggaaaaaaaaaaacagaaaactcgagggggggcccggtacccattcgcactttaggagccgtttgctttcactggccgtctttaggactggtcctgggaatccctgggcttcccactttatgcgtggtgttccccttttcctttgggtattcttagtcccgcccttggcggccacagtgtctgcttttggatggtattggagctctttggggggggggggccgaatttgtaaccggtacttttttggttaaattccctttcgcttgtggctctatgcgtgtgggngttgtntntgttgatgttttcttttcttcgtatactttttcctattatctttcttctngtttntnntgttctttggttttattcttnttgtatttttntttgtgtgatttattatttttttnttttttctttattctctctcgtgttggttgtngcttntgttcgtcttgttttcttgttttaggtttctgtttgttggatgtattttgtgtgtctactggttttctctacggtcttttggttttttaggcggtcttatgcangcgtgctgtctgcttattcggattgttttttctttgtttgaatttctnntnccctcttgtgtaccgtgagaacggaaacactcccggatactatgatggacgatactggacaatgtggaagcttccattgatcggatgcaccgactccgc

SEQ ID NO: 1237 - DNA, 1429 bp, Arabidopsis thaliana
  Clone ID: ARATH-23APR03-CLUSTER906_1
gatcttgatatctacttttgtttactagttacttaacgagagtaagtgaatatggagagtggttccaacagcacttcttgtccaatggcttttgccggggataatagtgatggtccgatgtgtcctatgatgatgatgatgccgcccatcatgacatcacatcaacatcatggtcatgatcatcaacatcaacaacaagaacatgatggttatgcatatcagtcacaccaccaacaaagtagttccctttttcttcaatcactagctcctccccaaggaactaagaacaaagttgcttcttcttcttctccttcctcttgtgctcctgcctattctctaatggagatccatcataacgaaatcgttgcaggaggaatcaacccttgctcctcttcctcttcttcagcctctgtcaaggccaagatcatggctcatcctcactaccaccgcctcttggccgcttatgtcaattgtcagaaggttggagcaccaccggaggttgtggcgaggctggaggaggcatgctcgtctgccgcagccgcagccgcatctatggggccaacagggtgtcttggtgaagatccagggcttgatcaattcatggaagcttactgtgaaatgctcgttaagtatgagcaagagctctccaaacctttcaaggaagctatggtcttccttcaacgtgtcgagtgtcaattcaaatccctctctctatcctcaccttcctctttctccggttatggagagacagcaattgataggaacaataatgggtcatccgaggaagaagtcgatatgaacaatgaatttgtagatccacaagctgaggatagagagcttaaaggacagctcttgcgcaagtacagtggttacttagggagcctcaagcaagagttcatgaagaagaggaagaaaggaaagctccctaaagaagctcgtcaacaactgcttgattggtggagccgtcactacaaatggccttacccttcggagcaacaaaagctcgcccttgcggaatcaacggggctggaccagaaacagataaacaattggttcataaaccagaggaaacggcattggaagccgtcggaggacatgcagtttgtagtaatggacgcaacacatcctcaccattacttcatggataatgtcttgggcaatcctttcccaatggatcacatctcctccaccatgctttgatcgatcctttaaaacgttattttattatatttataatcgttaaacagcttataatatgtataatctatggttctcggtatacttaggaacatatgaaacatgttccgattgatgaacaagcgtttgatgttgtggtgtgtatccttttgtgttgttctattgttatgcgaaattcctattcctattataatgatagtaaagcttttttgatctaaaaaaaaaaaaaaaa

SEQ ID NO: 1238 - DNA, 1589 bp, Arabidopsis thaliana
  unsure (1)..(1589): unsure at all n locations
  Clone ID: ARATH-23APR03-CLUSTER9167_1
gcccccggctgcaggaattcggcaccgggagagagagctcactagcccccccccccccccccctgttgcagcgagaattgtatcctccggccatgtattcaatggattgaaaccgccgatgctcaaggccacgccaccgtcgtcgtcgctaaattctgcggccgtgctggtctcgtgtcctttatctccgcggttccggattctcaacgtcctgctttgtttcagtcgttgctcttcgaggcttgtggaagatctgtctagccagtttacggagcaatcggaatgttatggactggaaactggaatatctgtcaagcggctgttgaaacagtgcttcgcggcggttctttaanacttcataaaacattttaatctctcttctcttttttttgtctgtgcaatcatatcacttttttgcttccgtggaaagatatcactttcttcttcttcttctcccagacatcagcaagattcaggagattaaaaccttaaattaaaacaatacaaactccaaattcaccggaggaaataacttaaaacttgaatctgaaaagatgagctgcaatggttgccgtgttctccggaaaggttgcagcgagaattgtatcctccggccatgtattcaatggattgaaaccgccgatgctcaaggccacgccaccgtcttcgtcgctaaattcttcggccgtgctggtctcatgtcctttatctccgctgttccggattctcaacgtcctgctttgtttcagtcgttgctctacgaagcttgtggaagaactgtcaatccagttaacggagcaatcggaatgttatggactggaaactggaatatctgtcaagcggctgttgaaacagtgcttcgcggcggttctttaagaccgatcccggagcttctcactcacggcggcggtttcgctggctttccttcgcctacatctgaagaagcatctgagatctgcaccgaaatgttgaatctccagcaaaatgattccaccgatcgtaacatctatcatcattcacgattctcaagctctagatctagatctactatggattcttcttctccgacgaaacgtaagagattatcatcggaagaccaaccatcttcggagcttgatctatctctcatccctaattttcccattaagcaaacaacaccttcttctacacggcggcgatcagtaacaccgtcgatgaactcagaggactccgggacgacgacgactacgacggcgttttgtgacaagggtgatgtgtacggtaacggaggaggagaaacgaccaagttgcttaacctttttgtttaatgcaaaacggcggcggttttctcagagttagtctagggttttaaatgtaattttacacattttcttcctttttcctggataaatattggaccggcgaattaacaactacgtcgttttgttctctcggttttgagtcccccccccccccaccattaaccaattgtaaaactttattgagtgaaaaatattatgtctagtttttctgcataatccagtaacaatgtgaacttaattcctttaggttgtttggatttgtattgaataaactcaaaatagttacgc

SEQ ID NO: 1239 - DNA, 1034 bp, Arabidopsis thaliana
  Clone ID: ARATH-23APR03-CLUSTER9242_1
acacacccatagtcgtcttcctcgatcagtctctctctcaaattgcaaaggtttcttcgaggactttggcatactgcagtttttctaaattgcaaaggtttcttcgaggactttggcatactgcaggttgttggagctgtagtgcttaaaaaccctaactttatactgtttagagcagcagtccctccatgtcaggtcttgtggcgttatgcagagctcgagcttctgcttcgtcttctttattcaacagcgttattcgtccagcatttcgcaatttctctacaggttttgctgatacacagaacaaatcattggtagcacaaatgaaagaagagatgctccacatggacatcaactcaatgataggaagttccatgccactaggtatgatgcgtatcggaacaatcatccacaacatcgagatgaacccagggcaaggcgcaaagatggtccgagctgcaggaaccaacgccaagatcctaaaggagcctgctaaagggaaatgcttgataaagcttccgtcaggggacaccaagtggatcaatgccaaatgtcgtgctacgattggcacagtgtcgaacccgtctcatggaacgaagaagctatataaagcaggacagagtaggtggttagggataaggcccaaagttagaggagtggcgatgaatccgtgtgatcatccacacggtggaggtgaaggaaaaagcaaaagtagtggaagcagaggaaggacatcggttagtccgtggggaaaaccgtgtaaaggcggttacaaatcagctagtgtcaagaagaagaagaagcgtttggcagaagcagcagccaaaatgtgatatgggtgaacaagtttcgattttcttcaaacgtttctttcttttaaaaagcctccaatgttatttggttacgttattgaatctgttttttgagagttttttaggcttcatgaaactagaagatctttgatcagttgagaataaatatggttacgtgtttacttttattaaaaaaaaaaaaaagaaaaaaaaaaaaaaaat

SEQ ID NO: 1240 - DNA, 881 bp, Arabidopsis thaliana
  Clone ID: ARATH-23APR03-CLUSTER9259_1
acactcactcaatcatacctttctctggagacctccacagggtttgtttccggaaatgtcgaacggcacggatcaggctcaaccaccaccggagaacccggctactccggtggattcgaagtcacggaaacgtgcgacgccaggggatgataattggcttcctcctgattggagaaccgaaattagggttcgaacctctggcactaaagctggtactgttgataagttctactacgaaccgattacgggtcgtaagttccggtccaagaacgaggttttgtactatttggaacacgggacgcctaaaaagaagtccgtcaagacagcggaaaacggagactcacattccgaacattctgaaggtagaggaagcgctaggcggcagacaaaatccaacaaaaaggttactgagccaccgccaaagccgttgaacttcgattttctgaatgtgccggagaaggttacttggactgggataaacggttcagaagaagcttggttgcctttcattggggactacaagattcaagaatctgtcagccaagattgggacagagtattcactcttgtcacctcccaaaacgctggaaaaacgatgttctagaagattgctgcagaaactcacaaattgtaataacacgcgctgctagattatcatatctacttagtatttactgatcgttggttggaatgcaggttaattttttagtagtgatagttttagtaacactttgatttgagttgtaatgtactttcttaacattttcttagataatttgaaggcaatgtatgtctatattattgcctttgagagaatccgatagtaacaaagttatgaaatctaaagttcgatgtgcggtactccaaaaaaaaaaaaaaat

SEQ ID NO: 1241 - DNA, 1107 bp, Arabidopsis thaliana
  Clone ID: ARATH-23APR03-CLUSTER9277_1
tcacataatcacattgcatgattgatcaaatactcgattttccgtgaaatctctttgaatatttcgattccttgttaccatggcgcttcatgggtctggagttttttgtaaagtttcaaacatggtagagatcacttctccgtttggtggttccatgaggctgcttcacttgcctaaatcttatccgattcactgcaacatggtttcagctagcaatacatttgggtcagctcatctcaagctgcaaaacaaagaaccgtgctcccgtttaaggccttgtcgagtcaaacgcgaagaaaataaccaaactgcggatgttgaaagcatttcaatggatgagaacacgttgaagcaagatctcgagactgcggtccaggaagagaattatgtggaggcagctaaaatccgtgataaactaaaagagcttcaagaagacaacaaagcctctgttttatcagccaattctcggttctaccaatctttcagaaacggggatttagctgcgatgcaatcactatggtcaaaatcaggaaacccgtgctgtgtacatccaggggccaaaggcataactggttatgattacgtgatggaaagctgggagcttgtgtggatgaactatgagtttccgttactgattgagctgaaagatgtcgaggttcatgtccgaggagaagtaggttatgtaacgtgtatggagtttgtgaagacgaaagggagtagtagttggggagctcagtttgtgtcgaatgtgtttgaacggatcgatggacaatggtttatatgcattcaccatgcttctcctgttgatatttgatcaaagaatcgaagaaacgatacacattttcaaaacgttttatttttatatgcgtttggaggttgcggtgggatacattggtggtttgcttaagggtgatgaaggactgttttttatttctgaggttggcgattgggaatgaaaacgccacacaaacgagaagaggcataagttgtgacgtttgtactagaagaggcacaaaggatcattttattataaaaagagccttgtagatctggcgaatcatgtaggcaatgaaaaatgagaagtaataaataaactctttttattag

SEQ ID NO: 1242 - DNA, 547 bp, Arabidopsis thaliana
  Clone ID: ARATH-23APR03-CLUSTER9297_1
atcactcataacttcacaattcagtgatcgtcatttgcccaatcacaaaaccaatgggatcaactaataaactctggagccgtaaaccagacgtcaaaaccgggaaatcagaatttccggttaccagattcctccgtacacaaatcgataacatcaagacaacaaccgtcggtcccggaatcggcggcggcattggctgcggcgctggaatcggcattggtctctccggcgggctcggaataggtgcctctgaaggacttgaccattctaacgtggttcttggattcggtattggttgtggtatcgggttcgggtttggatacggatttggagttggcggcgggtacagtttcgatgacatcaaagagagatttgacctatgaaaaaaagctccggttcataattccgggtcgggtttgggtaaaagatttttaaagcattatgttaattttgtactgtattaacagttttgttaattatataagttcaataaaaatatcctcccttgtgtctaaaaaaaaaaaaaaaaaaaaaaaaaaaaaaatga

SEQ ID NO: 1243 - DNA, 827 bp, Arabidopsis thaliana
  Clone ID: ARATH-23APR03-CLUSTER9300_1
gagcattcctgtttgcaagagaatcacaaatctttgcttacggttcacgctttaaaaacacaactctcattctccttctcttcacaaaccactcatattttttttcacatacttctttgtagtgctactttccattatatcaaacactcagcaacctgatggcaacgagacggatattgaaagaattgaaggagttgcaaagagaccctcctgtatcatgcagtgcaggtccaacaggagaagatatgttccactggcaagctactataatgggtccgaatgaaagtccttactccggaggtgttttccttgtcaatattcatttccctcctgattatccttttaaacctcccaaggttgtattcagaaccaaagtgtttcacccaaacatcaacagtaatggaaacatatgtttggacattctcaaagaccaatggagccctgcccttaccatttctaaggtgcttctctctatatgctctcttctaacagatccaaaccctgacgaccctctggtgccagagatagctcacatatacaaaactgacaagaccaaatatgaagccatggctcgaagctggacccagaagtatgccttgttttaaagctcacaattcctctttttttcctttttattttggtttggtcttatttgtaataaaaaaagaagaagaagaaattgttataattttaatacaaacatatataatatataaagtagagttttcaaagttgttaactcatatgattgatgagatatcgacatgtattaaatctaattttgttaatatataaaaaatcttctaactcaaaaaaaaaaaaaaaag

SEQ ID NO: 1244 - DNA, 826 bp, Arabidopsis thaliana
  Clone ID: ARATH-23APR03-CLUSTER93613_1
aatccaatctcttctccgtcgtcgtaaccatgtcttcaatcgtcgagcacgtcgttctattcaagctcaacgacgacgacgttgactccggcaagatcaactccatggtcaacggaatcaacgaactagtcaatctcgaccaagtgcttcacctctactgcggttcaatccaccgccttatcacgaccaccgcctccgacttcactcacgtccttcatagccgttacagatccaaagaagatctcaacgcttacgctatacatcccgatcacgttcgtgttgtcaaggaatcagaatcgattcgcgaagatatcatggccgttgattggatcgccgaacaagctccggaagccctagcaccgcctcttggttcaattggtaaaatcacgcttcttaaattgaaagagaatgtcatggaagaagcgaaattggagattatggaagtgatgaaggagaaatttgaaggaattgatcagattactgttggagaaaacttttctccggggagatctaaagatttctctattggatcgatttcgtattttagggatttgggtgaaattgaggctgtggatgatcagatgaagttgcagaatgataagattcgtgattatgttgatgataccattgttgttgagttcaatgtgccgtcttcttcataagtcttctaagtgtacctgtaaaatgctccaatttcattccttaaccgaaattttaaaccagtttggtctccggtgtaatttcgtcgattacagtcgtcgtcgccgccgccgccgccgtatgtattaaataaaatctttttttatccaaaaaaaaaaaaaaaaaa

SEQ ID NO: 1245 - DNA, 1461 bp, Arabidopsis thaliana
  unsure (1)..(1461): unsure at all n locations
  Clone ID: ARATH-23APR03-CLUSTER9399_1
aaaaatattacaacccaatgatggttacattcatggtcgacttagaagatgaaagttgatttcttaaaaaaaaaacacgcacaataaataaaccaccaattcacaaatacaagaaatttaataacctcgagcagttaccctatttaaatcccctctagccttgttttccttctcacacctatgaagcaatggaagaagagagagaccacaatgcatctgagtcgtctctcccatctttgagcaagcagttggagagctcgactcttggaggaagcgcggtcgacgttcccgtcgttgatctaagcgtttctgatgaagacttcttggtgcgtgaggtggtgaaagcgagtgaagagtggggagtttttcaggtggttaaccatgggattccaaccgagctgatgcggcagctgcaaatggttggtacgcagtttttcgagctcccggatgctgaaaaggaaaccgtggcgaaagaggaagacttcgaaggatacaagaagaattatctaggaggtataaacaattgggacgaacatctctttcacagactctctccaccctcaattatcaattataaatattggcctaagaatcctcctcaatatagggaggtgacggaggagtatacaaagcatatgaagaggctaacggagaagattcttggttggttatcagagggattagggttacagcgtgagacgttcacgcaaagtataggtggtgacacggcagagtatgtgcttagggtcaatttctatccgccaactcaagatacggaattagtcataggagccgcggcgcacagcgatatgggtgcaatcgcactcctcatcccaaatgaggttcctggacttcaagccttcaaggacgaacaatggttggaccttgactatatcgactccgccgtggttgttatcattggcgatcaactcatgaggatgaccaacgggaggttaaagaacgttcttcacagagcgaagtctgataaggacaaattgaggatttcttggcctgtttttgttgcacctagggctgatatgtccgtcggacctttgccggagtttaccggagacgagaatcctcccaaattcgagactttaatatataatgactatattgaccagaagataagaggctgggcgctcgaagatcttcctgtctactgaaaaccctcaatacctacaataaatgatgatgaattgttcaaggagacaattctttaatagcttccttttgagggtttctatatgtggtacaataaaactatttcaagaatttaaaataatatgtggaaaagctaagcggttagacaaaatattcatctgattgatgctatacattcaaatgtaatcgctcctatcctatgtacgtagtgattaacctcaaaaataatcagcttaagttgctgtattcgtttacgttatcatggtaaagcaacagccaacnattatgnagtcanaa

SEQ ID NO: 1246 - DNA, 3391 bp, Arabidopsis thaliana
  Clone ID: ARATH-23APR03-CLUSTER9480_1
atgttcatcccaaaaaagctttaataaaaaaataatcgtttctctgtgaagaagaagacgacgacggaagaggaagacctagcatcgccgacgatttatttttgaattttcttagtctaagatatctccggcgaggagacgtagattcatcgatctaatattcatcgatctcgttcttgtggcttttttaatcgcccagacttttaagagacgctggatttgatatccgagaagagccgtttgataaatacgtaatcgattcgagcggtggatagtgaaattacggcggaggagttgaatcggatctcggtggtggtgtgtttctgtatttgagtgaggaggaaggagaaatataaaaagtgggcggacgcccacaacaggtaagcgttcataaaacaaaaatcaagttttgtgggagtgcattgaagcatgacaagcaataaaggtgctatcatccctccagagcttccttggaaaccggtggctaaaggtagcagaagttcaacaaggcgtggcaagaaactagttaaacgagttgcagcttcagatattgagtcagaagacaagagttcaacacacacactagtagcaggagaatcaaagcgtccaaagcttggcgtttctgttctaggtcagcatttcgttgaaagagtagagcatgttccgattaagaaacggatatttgtggttagctctccatcaccatcaccatcatcatcaaagaggtcatctgctcaacgtgaaggctcagaacataaggcacagatcaaccatgttttacctgtttcgagattaaaccctaatttggtctcagacgtccgtgatgaaaagcctgattacagtgttcatgacttttctggtatcaagatacttgctgatgctgcttgcagtactgatgtgagtaatgattttgcaccagctgtagaccgtctgcctgctgaagaatttgctgttcagctacaagatacctcaaccatatcaactcatgttgaaggtaacgattcatcagctggaactgctgatgtctcgcatactgcggttgattccggtgatcagagtggccaaggaaagagcaatattgtagcgcctcagaaacatcctctaacaaatttgtgcaatgagttggctgatgagcagagtgtagagcacagcagagtaacctctggagggattatagcacctaaaaaaacctgcattgctctttcaaatgaatcctcaacagaaagaccaaaggataatgtagaagcaagtgaaagtgaacctttagcacctgatagtggagctgtaacggtgtcagagaaattatcagccgatgagccaactgaaaaaaacaatgaaggccttaaagatgttaaatttctctgggatttaaatattccttgtgatgtagaagatgaagcgtctcgaagagatgaagagggagaaatcacagagtctattgcccctaaagggagcgaaccttttgatggaagtaaacacagtatggatggggtagccacagacaacaaaattatcaacaacaactaagcgtcatgataacagataacgtaagagacttgtttgggttctttccaatagaatctctcttatgttagtttagatttgtttgttatgtttgttatcctaattttattttaggaagaggtgataaaaatgccatggagtgatctggtgctcttatgactctgctggtatttttgttttcttttaaattttctcattttctttctacagagtttttagggttttctaggcttgggaagaaaatgaagaggttgaacagttggattactgttctgagccagaggatgagagattctactctatgggttctgagaaaggaatcttgacaaacgagaatttaagacatgttaagtgtgaatctggtgatgcactgagaattgggcaggctaatgaaggaagtgacatgaagcaagctgttgtaaacatgagcgattcacatcctaagaagggctcttcttctccttcaaggagtttcggttcaaaaccatacaaggaggtgccttcaaatgatgccatacagagaagaaggccttatacttatgaagaggtgagcacgggtccagataggtttgttgggagagacgacaggtcagggatgcgtatgcgtaataggagtcctcagagagggtatattagtggttgggattccaaacgacgcttctcccctcctaattacaaagatggttcttatggttccgggcgtccatggcataaaagaatggcagatgatcgaggtatgatgaacggctttgatgagtcagggtcaggacaaggaccaggaccagaaccagaaccagagggttatgttcgtaggcaattctcaaatggtggatacagaggtcggtttaagagattcccagatggtggggatcgtaaattcaggggcccatacactgatacaaaccaattttctggtcggatgcacaaccggatgagtggtaataggagagagagaggtggctctccggttgtcaggagattgcaccacccgcaatcagagtcaagatccagaagccgttctccagtcttgtggaatggccgtaacagatcacctcctcctcctccaggtgggtttagagcagacgagaggatgacggaaagagtgaggctgcctttccagaaacggtttcctgcagatcaggagatgggttatatgtcacctccgagaaacagaatgtcgtcgccgaggttctttgaagggaggaataatggtgctggagagaattataatagcttcagagaaaggaagttccggcctggacagagattttatgtcggaaattccatgagaagaccgaattctgacaacaacaacttaagaccatttattccgaacagaagatttgacaatccggaagagagcactggtgggaacaggtttgagatgactcagcagcgaaggactcgacggtctgagaccacagaagatggaggtgatgttattcgacggttcaagtttaatgaagaacaacagtcagtggtggtagccaacgacaacaacaacaaagagtcatgataacagataacgtaagagacttgtttgggttctttccaatagaatctctcttatgttagtttagatttgtttgttatgtttgttatcctaattttattttaggaagaggtaagaaaaatgccatggcgtcatctgttacgtttatgactgctggtatttttgttttcttttaaattttctcattttctttctacagagtttttagggttttctaggcttaatttgatgctgttttccttttctggaaatgatttctatatttgtagaaaatcaacaaaatgaaatcaatatctttttttcttacccaaaaaaaaaaaaaaaaaatagggcggccgctctaaggatccaagc

SEQ ID NO: 1247 - DNA, 917 bp, Arabidopsis thaliana
  Clone ID: ARATH-23APR03-CLUSTER9483_1
attgttcttgaacatctccgaagctaactccgaacatcaaaactgtatcttcttctcctcctcctccttggcccttttcacaaagggacaaagagtttttgttgtcagtaacttcaagctctaagctatggctgtcaccaagatttatattgtgtactattccttgcacggccacgtcgagacaatggcacgagaggtacttcggggagtaaactctgttccagacgtggaagcaacactttggcaagtgccagagacattaccggagaaaatattggagaaagtgaaggccgttccaagaccggacgatgtgccggatattcgaccagaacaactggcggaagccgacggattcatgtttggctttccttctaggtttggagtgatggcatcacaggtcatgactttctttgacaatacaaatgatctctggactacacaggctctcgctgggaaacctgcaggaatcttctggagtacgggtttccacggtggaggccaagaactaactgcgttgacggcagtgacaaaactggctcatcacgggatgatatttgtaccggtaggatacacattcggtaaaagtatgtacgagatgggagaggtgaaaggtggttcgccttatggctcagggacttatgcagctgatggatcacgcgagccaacagagctggagattcagcaggcaaattaccatggcaagtactttgcaggaatagccaagaaactcaagaaacggtctcctgtctaaattctaaaccatatcaactctgtgtttcctatactaaacaatctgtaaatgtaaaggtgaacactgaaaataagatcgacatatacagagcaaaacaccggtgtgtaagctaatggtcaataaatcacattttccattgaaaaaaaaaaaaaaaaagggcggccgc

SEQ ID NO: 1248 - DNA, 2198 bp, Arabidopsis thaliana
  Clone ID: ARATH-23APR03-CLUSTER9486_1
gaaaaaaagcgactaacagaaaaaaaaaacgaaaaggattattccgccgtagaatccatattctctccctcatcactttgataaacaagagtctcatttttcgcttttccaaagggaacaacttcttcggattattatctatggcagagaagcttgagccggtgaaggttttgtactgcggagtttgctctcttccagcggaatactgcgaattcggtcccgatttcgctagatgtaagccctggctcgtcgaaaacgccccagatctctatcctgatctcctcaaagaagcaaatgagaaggcagcagataatgtttctgacaaactccagtcggtgggaatctcttcaggtggtgctgatggggcaccatcttcagctcagactggagggacatccaagaaggaggaagtgaagcgcctacctggggggaaagttaaaaagaaagatcgacaggaagttatcattgaaaaggttgtacgcaacaaacgcaagtgtatcaccattgtgaaaggactagaactgtttgggataaaactcagtgatgcctctaaaaagcttggtaagaagtttgccactggagcatcagttgtcaagggaccaactgaaaaggagcaaattgatgttcaaggggatataatctatgatatcgttgaattcattacagacacttggcccgacgtacctgaaagatccattttcttcatcgaagatgggaagaaggttcaggctggttgatgatcacctttgtcctcgttttttggcatggcgggttcatgtagacgagctagttcctgagttttcctatgtgtttggaggaaatcgcatcttgattataactttcaacgtaacgtatagttggatttatcatactattttcttattcgggttgcgatagttccagacatgtttctccaaacatttctctttttgggggtcttaatatttaaaatgtgtcttgaaatgaacgcgtaaatcatccttgacccatcatcagctttgtaagaccaaatatactctcattggccaaaccggtgatgatctctcttgtcagccaatagtttaggacagccagattcgaaaactgatcctaaacaaagcctaagaaaacaagtgaaacttttatgatcgattttgtgttgagatatttaaatagactgtatactaccaacaagattttatccataagaacattttggtttctaactgtgtttatcaaaccgtttattatcacccccgagaccgtgagacattaagtaactcagcaaagcgatttaaattcgcgatgtaataggaacaactgatctcatggagtcttggttacttgtactgatatcacctgaatcatcatctttcttaggatccaatttaaagaatgagagaacgattgaagcaagctgatgctggtgagaagtgaactcatgatcagctccttcaataacatacagcttatgattctttatctgtttagcaaattcggacgcttctgttacatgcacaatcctatcatttgacccatggactgtcaagactctgcagttttcacgaattgagagacatgcttcatgagcattggttgtgagacggtccattagactctcttctgttacccgatattcaaactttccctttctgttgccaacatcaatgaatccattatctttgattctcttgaagtagtccttaccaagccgaaattcgattcctctgtcaagaaaaaaccgccctgagatattcacaacagtctgcacatcattgtactttgctgcatacaaaagcaccacatttccacctttactatgtccgataatcgcagaaatcacacggttaacaccacgcaagtgttgcaaaacagagcgcaaatcttcaagttcacggcgatagttaccatactgaaatgatccttggctttccccgttgccagcaaagtcaaaccggaaagaactgatcattgctctttcaaagaaacttgcaatggtcagcattggaatccgattctttgatgaacgaaatccatggcatatgacaacagtctctgtagaaccagtatcatgcaaaactcctacgagtttctcaccatgactgttctcaattacaactctttggtgttgaatctctgatttttcgatttgttcatcgctagacagattccggcgagtctctgacatcgtcgcgcggaggagatacctcgaaaagctt

SEQ ID NO: 1249 - DNA, 2914 bp, Arabidopsis thaliana
  Clone ID: ARATH-23APR03-CLUSTER94_1
ggtcctttacctttttcatttactgttctctctctctctctctctctctatctctatctctatcttctattcatggacatgcaccgaagcgacaaagcttagggcttttctctcatccatggcggatttcttctatcttcattaaatatttccctctttattaaaatctcatgaatttcaacggttttctcgacgacggtgctggagcctcaaagctactctctgatgctccgtacaacaaccacttctctttctccgccgtagacaccatgctcggaagcgccgccattgctccttctcagtctcttcctttctcttcttcaggcctctctctcggactccaaacaaatggagaaatgagtagaaacggagagattatggagtcaaacataagtcgtaagagtagtagaggagaagatgtagaaagcagatctgaaagtgataacgctgaagctgtctccggtgacgatttagatacctccgatagacctttaaagaagaagaaacgttaccatcgtcacactcctaaacaaattcaagacctcgaatcggtttttaaagagtgtgcacatccagacgagaagcaacgtcttgatcttagccgtcgacttaacttagatcctcgtcaagtcaagttctggttccagaatcgtcgtactcagatgaagactcaaatcgaacgacatgagaatgctttgttgaggcaagagaacgataagcttcgagctgagaatatgtctgtacgcgaagctatgagaaaccctatgtgtggtaattgcggcggacctgccgttatcggtgagatctcaatggaagagcaacatctgagaattgaaaactctcgtctcaaagatgagttagaccgagtctgtgccttaaccggtaagtttcttggccggtctaatggttcacatcatataccggactcagcacttgttctcggcgttggtgttggttctggtggatgtaatgttggtggtggtttcactctctcttctccgctgttgcctcaagcttctcctagatttgagatttctaatggaaccggttctggtttggtggctacggttaaccgtcaacaaccggttagtgttagtgattttgatcagagatcgaggtatttggatttagctcttgcggctatggatgagcttgtgaagatggctcagacacgtgagccgctctgggttcgaagctcggattctggttttgaagtgctgaaccaggaagagtacgacacaagtttctctcggtgtgttggaccaaaacaagatgggtttgtctcagaagcttctaaagaagctggaactgttatcatcaatagcttagcgctcgttgaaaccttaatggactcggaacggtgggcggaaatgtttcctagtatggtctcaagaacttcaaccacagagattatctctagtggcatgggagggcgaaatggtgcacttcacctgatgcacgcagagcttcaactgctgtctccactcgtgccggttagacaagtgtcgttcttgcggttctgtaaacagcacgcggaaggtgtttgggcagtcgtggatgtctcaattgattccattagagaaggttcttcttcgagctgtagaagattaccatccggttgcctcgtacaagacatggccaatggctactcaaaggtaacatggatcgagcacacggagtatgacaaaaaccacatccaccgtttataccgcccattactcagctgcggactagcgtttggtgcgcatcgatggatggctgcattacaacgtcaatgcgaatgcctcacgattctcatgtcctccactgtttccacttccactaatccatcccctataaactgcaatgggagaaaaagcatgctaaagctagcgaagaggatgactgataacttctgcgggggggtttgtgcttcgtcgttacagaaatggagcaaactcaacgttggcaacgtcgacgaagacgttaggataatgactaggaagagtgtaaacaatcctggcgagccgcctgggataattctaaatgcggcgacgtcagtttggatgccggtatctccgaggcggttgtttgacttccttggaaacgaacggcttagatcggaatgggatatcttatccaacggtggaccaatgaaagagatggcccatatagctaaaggccatgaccgttccaactccgtctccctcctccgtgccagcgcgataaatgcgaatcagagtagtatgctgatattacaagagacaagcatagacgctgcaggagcggttgtggtgtacgcgcctgttgatatcccagcaatgcaagctgtgatgaacggtggagattctgcttacgtggcactccttccttcaggattcgccattctccctaacggtcaggctggtacgcaacgctgcgccgcagaggaacgtaacagtattggtaacggtgggtgcatggaggaaggagggtcgttactaacggtggcgtttcagatactggtgaatagtttgcctacggctaagctaacggtggaatctgtggagacggttaataatttgatatcgtgcaccgttcagaagattaaagctgctcttcattgtgatagcacctgatcatcgagatcagacgatggaggagattgagtcaagaacgaacctcattttgtgatgaatccgtttttgtgatggttcgggtattgactcgatgaaatttaaaaaaaaaaaaaaaacaaagaatgttgtaatttggatcggttttattttggatcatgtcgatgaaatgtaattgtttcttgtttctcttcttgtaatgactcgataatatcgggacagcattatatgaaacacacaagttttttttaggggagctcaaataattagttataagcaaaaaaaaaaaaaaaaaactcgagggggggcccggtacccaa

SEQ ID NO: 1250 - DNA, 1828 bp, Arabidopsis thaliana
  Clone ID: ARATH-23APR03-CLUSTER9516_1
acatctatctctttctctctctttccttgcaaattttcagctctcaaagagttaagagttagagagagagaggatggccattagggaaatcaaagatgtagagaggggtgaaatagtgaataaggtagaagatcttgggaaaccatttttgactcatgaagatgatgaaaaagagagtgagaataatgaatcatatttgatggttctcttcagtacttttgttgctgtctgtggctcctttgagtttggctcttgtgttggatactcagcgcctactcagtcatctataagacaagatctcaatctctcccttgcagagttctccatgtttggatccatcttaactatcggtgcaatgcttggtgctgttatgagtgggaaaatttcagatttctccggccgaaaaggggcaatgaggacatcagcttgcttctgcattacaggttggctcgctgtcttcttcaccaagggggcattgttacttgatgtaggaaggttctttacaggatatggaattggagttttttcttatgtggtccctgtgtacattgctgagatatctcccaagaatctccgaggtggactcacaacactgaaccaactcatgattgtgatcggctcatcggtttctttcttgatcggatctctcatttcttggaaaactcttgccctaaccggacttgctccctgcattgttttgctctttggcttgtgcttcatacccgaatctcctcgatggctggcaaaagcaggccatgagaaagagtttcgcgtagccctgcaaaagctgcgaggaaaagatgcagatatcacaaatgaagcagacggtattcaagtctcgattcaagctctagagattcttccaaaagcaagaatccaagaccttgtgtccaagaaatatggtcgatctgtcatcattggtgtttccctgatggtattccaacagtttgttggaatcaatgggatcggattctacgcaagtgaaacgtttgtaaaagccggatttacctctgggaaactaggaacaatcgctatcgcttgtgttcaggtgccaataactgttcttggaacaatcttgatagataaatctggacgaaggccactaattatgatttcagctggtggtatcttcttgggatgcatactcacaggcacatctttcttactcaagggacagagcttgttgcttgaatgggtcccttccttagccgttggaggtgtacttatctatgtagctgctttctccatcggaatgggacctgttccttgggtgataatgtctgagatatttccgataaacgtaaagggaatcgcaggaagcttagtggtactagtgaattggtctggtgcttgggctgtttcttacactttcaacttcctcatgagctggagctctccaggtacattctatttgtactcggcttttgcagctgcgacgataatatttgtggcgaagatggtgccagagacgaaagggaagacactggaagagatccaagcttgtattcgaagagaaacataagaagaaagatacaatcaatgttatgggaatgttatcaaatgaaaagactcgaactattcccgttggtgagctcaaagtggagtagagtaaaaattatcgccgggagataacgttgaaagtccgatgatgaggcataagggttttgcatgaatgttatgagaataggtttacttttatgtatttgttcacgttttaagttttcatcaaataggtttttgattggtatacagtatgtggaatattaatagaatggagtggcagatttcatattcaatcagaaaaaaaaaaaaaaccaaccaagtccgt

SEQ ID NO: 1251 - DNA, 4525 bp, Arabidopsis thaliana
  Clone ID: ARATH-23APR03-CLUSTER9521_1
ctctctcctccgagaaaggaaaagcaccacttctctctctaagaccccatttttcggtgaaggtttatgcgcttttcttcttcaacgagacgactaaaatacgtatacatgcgtatgttgatgtatgcataagtgttgttgtgtgttggagatttagaagagaaggtttgtttgtgaatttgtgtctctgaggttggtttttccagtttattcttctcaatgatccgaattggggttgaatcgaaaaccttagtagacttcgtctgtgatgactcttgatactagtggatggctcgatttcaattttgctgcgtcttcgtcttggtcgctcttgcggttttggccgtaaaccctagttcaagctatcgatttaccattgtggaaccgaaatcgggttctgattccgatttggactcagattcagagtcgttacttttccatcaggactactctccgcctgctccgccaccgccaccaccgcatggaccgtcggtatcttgtagcgaggatctcggcggcgttgggtttttggatactacttgtaagattgtcgccgatttgaaccttacgcacgatgtgtatatagctgggaaggggaattttatcatcctgcctggtgttaggtttcactgcccgatccctggttgttctatagctatcaatgtttctggaaacttctctttgggagcggaatctacaattgtcgctgggacattggagcttacagctggtaatgctagctttgctaatgggtcggcggtgaacacgacggggttagctgggagccctccgccacagaccagtgggacaccgcaggggattgatggtgctggtggtggacatggtggtagaggcgcttgttgtttgactgacactaagaagctacctgaagatgtgtggggaggtgatgcatactcttggtcgactctgcagaagccgtggagctatggtagtaaaggagggtcaactagtagagagattgattatggaggaggaggaggtgggaaagtgaagatggatattctgcagcttctggatgttaacggaagccttttggcaaacggaggctatggaggagccaaaggcggtggtggatctggtggcagcatctacatcaaggcatacaagatgtaatcaactttcgtttctatgctctctttcactagctgttaattagattaaatgcatatattttaaattcccgatagtctgcgggggctgcatgacccgcagttttttgtgcatggcggatacagtatcggatgtccagataactcgggtgctgctggaactctatatgatgctgttccccgaagccttttcgttagcaactacaatcagacaacagacacgtatacgcttctcttagaatttccattccagccactttggaccaatgtttatattcaggataaagcacgcgcaacttgtcctctgttatggagtcgtgtccaggttcaaggaccacgtggtttgttgtgccgtcgcgctttctgcgtccgcttcgctcatcatggggcctccctggttgtggtgggcgcagttgtccccttgttgcgtgttgctgccttcaggcttgtcgggccctcacgcctcccgctctagtcgttctcgttgcgggacgcacttttgcctttggttggaggacctcgcggctcgcctctgccatcccccgcgcgggttaatgccttattcagtcatggacccagacgctctgctggcttagcacgtgtttacgcattgtggaacttcatgtccttagtcaatgtgtttgtggcttttctctgcggatatgttcattatcatagtgaatcatcagctagcaagaaaatcccatttcagccgtggaatataaacatgggtgaaagtgaatggtggatattcccagcaggactggtcgtgtgtaagataatgcaatcgcagctcataaatcgacatgtagcaaacctggagatacaagaccgctcgttgtatagtaaggattatgagctgttttggcagtcgtgacaaagtcttgtcaggtaatttttctcagaacaactaaaaacagtcctgccccaagtttggagtggggatttcagtttgttttttttgttcttttgtttctcttcttgtaattctattactccaggtgaatagaattaggatacaaaagagaaggaactctgattgttaaaagaaaaaaagttttaatttgaggggatataattagggacaaaaacatgtaatcctaaagatcctgtttgggtttcttggggctctcggttttggttttgagtggatatggtcgtgttggtgactggtgaagatcctccttcaaaggttgtatgtaaataagtgagaaaccagaatgatgatctatctacttgaggctgtgcttattatatctgccgcagtacacctgagttggtttttggtgtatattagttgacacgaaatggactttggttcctgatttggtgtgtgcactagcttgggtcttgtcgtggggggtctggccggcctggtcgtggtggtggtggcggaggtgggaggattcattttcattggtcaaacattcctactggggacatataccagccaattgctagtgtaaaaggaataattcatgcacgagggggagcagcagcggatgatggtttttatggcaaaaatggtacaataactgggacggcttgtccgaagggactccacggtatattttgcaaggaatgcccatctggtacattcaagaatgttactggatccgacccttctctttgtcgtccttgtccggttgatgagcttccaactcgtgctgtctatgtcacagttcgaggtggtgtttctgagacaccatgtccatatcgatgcatatcggaaaggtatcacatgccacactgttacaccgcactcgaggagttaatttacacatttggtgggccttggttgtttggtcttcttctgatgggtctcctcatcctcttagcacttgtacttagtgttgcacgaatgaaatttgttggagttgatgatttacctggcccagctcccacacagcatggctctcaaatagatcattcgttccctttcctggaatcacttaatgaggtgttggaaacaaatagagctgagcaatctcagagtcatgtgcatagaatgtattttatgggtcctaatacattcagtgaaccgtggcatctctcacacattccccccggaggagattaaagagatagtatatgaggctgcatttaacacatttgtcgacgaaatcaactctatagctgcatatcaatggtgggaaggtgctatatatagtattctttcagtagttgcgtatccgctcgcatggtcatggcagcaatggcggcggaagatgaagttgcaaaaattgcgtgagtttgtacgttcagaatatgatcactcctgtttacgctcctgtcgctcccgagctttatacgagggtctgaaggtcgctgcaacctccgatttgatgcttgcgtatctggatttcttccttggtggggatgaaaaaaggacagaccttccacctcgacttcaccaaaggtttccaatgcccatattgtttggtggtgatggcagttacatggctcctttctcacttcaaaatgacaacattcttaccagtctgatgagtcagcttggttcgcctactacttggtatagactggtggctggtgtaaatgctcaattacgtcttgttcgccgtgggcgtctgagatcaacatttcattctgttctgagatggttagaaactcatgctaatcccgctctggaaacacatggcatacgggttgatctggcctggttccagactacagcttgtggttactgccaatatggtctcttgattcatactgttgaggattgtgaaccaacatcacctcagtgtgtcagtgaaacaacatggactgaaatccagccacgaaagaactatggagggataatcgaccttgacagcttaccgagtctgaaagagaagagagatatgtttttccttctctctttcttagttcacaacacaaaacctgtgggccaccaggatatggttggcttagttatctcgatgttacttttaggagattttagtctagtcttgctcacactcctccagctgtattcgatttctttgctggatgtacttttggctttgtttatattacctctcggcttgcttctgccattccccgctgggattaatgccttattcagtcatggacccagacgctctgctggcttagcacgtgtttacgcattgtggaacttcatgtccttagtcaatgtgtttgtggcttttctctgcggatatgttcattatcatagtgaatcatcagctagcaagaaaatcccatttcagccgtggaatataaacatgggtgaaagtgaatggtggatattcccagcaggactggtcgtgtgtaagataatgcaatcgcagctcataaatcgacatgtagcaaacctggagatacaagaccgctcgttgtatagtaaggattatgagctgttttggcagtcgtga

SEQ ID NO: 1252 - DNA, 1742 bp, Arabidopsis thaliana
  Clone ID: ARATH-23APR03-CLUSTER9524_1
attttcttaacattgttccaccaactcctcccacattctctccgcctctctcgtttacaaatcccacctcaaaggtcgactctttatctctcttctcaccaacccaacttctccaatggcttctcagagttcagtcgccgtcatttcctccgccgccgccagaggtgaatcattcccagattcaaagaaaccaatcgggtcagttcggttccaacaacccctccgtctctccttctcgtactgtaagtcagggaatatgtcatctagaatctgcgctatggccaaaccaaatgatgctgagactctttcatcatcagtagatatgtcacttagcccgcgagttcagtccttaaaaccttccaagactatggttataaccgatcttgcagccactcttgttcaatccggtgttccggttattagactagctgcgggagaacccgatttcgacactcccaaagtcgtagctgaggctgggatcaacgcgattcgagaaggttttactaggtatacgttaaatgcaggtattacagaactcagagaagcaatatgtcgaaagctaaaagaggagaatggattgtcttatgcgcctgatcagatcttggttagtaatggagctaaacaaagtctcttacaagcagtgcttgcagtttgttctcctggagatgaagttataattcctgcaccgtattgggtgagttacacagaacaggcgagattggctgatgcaacgcccgtggttattcctaccaagatttctaacaattttttgttggatccaaaggatcttgagtctaaattgactgaaaaatctagacttcttattctctgctctccttccaaccctactggatctgtttaccccaagagtttgctcgaagagattgcacggatcattgctaagcatccaagacttctggtgctttcggatgaaatatatgaacacattatttatgcacctgcaacacacacaagctttgcttctttgcctgacatgtatgaaagaactttgacagtaaacggtttctcaaaggctttcgcaatgacgggttggaggcttggatatcttgctggtcctaaacatattgtggcagcttgcagtaaattacaaggccaggttagttcaggagctagtagcattgctcagaaagcaggtgttgctgcgcttgggttaggcaaagctggaggagaaacggttgcagagatggttaaagcttatagagaaagacgagatttcttggttaaaagcttaggtgatatcaaaggtgttaagatctctgaacctcagggagctttttatctctttattgacttcagtgcttactatggatcagaagctgaaggttttggtttgatcaatgattcgtcgtctcttgcactatactttcttgacaagtttcaggttgcaatggttcctggtgatgcttttggagatgatagttgtatccgaatatcttatgccacatctctcgacgttcttcaagcagctgttgagaagatcaggaaagcccttgagccactccgtgccactgtctccgtttaacagttcggacacagaaatgtgtttaagattgtttatgatatgttgtaacttatttatcagctttgtctccaatccaataaaaagtctttttctatgctttgttcgttccttcaaattcatatataaccataaacaattatcttaattgtaaatcatttattagtatttaaggttgcttgtgcaaaaaaaaaaaaaaaaa

SEQ ID NO: 1253 - DNA, 938 bp, Arabidopsis thaliana
  Clone ID: ARATH-23APR03-CLUSTER954_1
agaaattaaacaagtgtatctatattgtatatatggactgcttacagatggtgttcaagttatttccaaactggaaacgtgaggcagaagttaaaaagctcggttacaaggttcatggcgatcctttctccaccaacacaaggcgtgtcctcgctgttctccatgagaaaagactctcttacgagcctattaccgtcaaattgcaaaccggtgaacacaaaaccgaacctttcctctctctcaacccatttggtcaagtccctgtttttgaggatggaagtgttaagctgtatgaatcccgagccatcacacaatacatcgcatatgttcatagctcaagaggcacacagcttctgaatcttagaagtcacgagacaatggcaactctaacaatgtggatggaaatcgaagctcatcagtttgatccacccgcatcgaaactcacttgggaacaagtcattaagcctatctacggtctagagactgaccaaacaatcgtcaaagagaacgaggctattctagagaaagttctaaatatctacgagaaacgactcgaagaatctagattcttggcttgtaatagctttactttggttgatcttcatcacctaccaaacatacaataccttttgggaactccaacgaagaaattgttcgaaaaaagatctaaagtgcgtaagtgggtggatgagattacgagtagagaggcttggaaaatggcatgtgatcaagagaaatcttggtttaataagccaaggaactaactgaaagcagaagtaatctttacgtgtgaatgtgtgtgtatgtgtatgttgagtttgggtctttgtttgtaagcttgtgcgtgttgtttgttgccttgcgaatcttattttatgtttggttaatatatgtttcatgtaaataaataaagaacaaaaaaagcattatttaaacta

SEQ ID NO: 1254 - DNA, 1360 bp, Arabidopsis thaliana
  Clone ID: ARATH-23APR03-CLUSTER956_1
aatcttcattggaagtttcttctttggttttatgctttgtgaactttgaaccacaaatcaacaaggagtttctccttgtccttttttcagttaaacatgacttgcttagttttagttatctatatgcaataaagtttgcttgcttttgctgctaattaaggaaacaaggttatgggcttggtccttgagagcattgtataagaggaacatattacttactctcatcttctactgcattacaagggaatcctccccctgctgtttcatcttcacgccggaatttaactcaagctcagtatctagttcatcaataacaataacaacgctggctacttaaaagaccgtcttctccttctccggcacccctcgtcgctcaccatctacaactgaaatggcagagttgtagtcgggtgataagcagcagcaactgaagcaattgtggtacgtatcttccgcttatcgtgtcgacgactaaccaagaaccaggacgttttgaatggatgattggtagatacttagaaaccagaaaaaaatggggggttaatagttaatacagaatatattaacattttcctgctaattatcggtttgatcttattaccatcatccgttttcttaactttttcaacatgtaaagagcttaggagaaaaaacccatgtagtgtttttaaattggtgtctgtaacataagtggctgaaaagggtttgtgtaacagaacttgataccaatcctttttaagcctatacagatcaccttagtagtagtactaaagccataagagaaggtttttagaagtaacccaaagtctgtttagggtttagcgtttagggtttagagttctttcggtttaagggtcagtgttttcttttatgaattccggtacagggggactctgcattctcttaaaactctttgtcctgtaaccattttaaaaaatctatccttttatgtgtatacatgtactgatctcaaactcttttcaataaagacttatccttctctttattgttctcttcatcttaagttcttgttcttatcatcatcatcattatggtccatgtgttgtgttcttctggcttataacatctcaatgacaggtaggtaatacatttctataaatacacaagtgtttactgataatagagagacagagaagctgttcgttatggatatggatagtgtcgcttagtggtctttgtgttgtctctgtcttctcactactttcaaaagtgttagaaaaaggttctcttgctctttctcttgctcttgtgtgcgtccattgtactttccactctgtgagatttgtgcccactatattatcttaaatatgtaattcgtactcaaaaaaaaaaaaaaaaa

SEQ ID NO: 1255 - DNA, 2920 bp, Arabidopsis thaliana
  Clone ID: ARATH-23APR03-CLUSTER9573_1
aaaaacccacaaaatgaatctaagatagtttgctttacaattcaaaaacccgtctctgtgattcaaaatccctaaatccagagatcgaactctcgatcatgttatcgaatcatctccagaacgggatcgaatccgataacctactctggtctcgtgtccctgaatccgatgatacttccaccgacgatattactctactcaactctcaccgtgacggtgacggaggtgtcaatagtctcgattacgaagtcatcgagaattacgcttatagagaagaacaagctcatcgaggaaagctttatgttggttactacgttgctgtcaaatggttcttctctttactcatcgggatcggaactggattagctgctgtgttcatcaatctctctgttgagaatttcgctggatggaaatttgctcttacttttgctattattcagaagtcgtattttgctgggtttattgtttatcttctcatcaatttagtcttagtgttttcttctgcgtatattattactcaatttgctcctgctgctgctggttctggcattcctgagattaagggttatctcaatggaattgatattcccggcaccttgctctttagaactctcattggaaagatatttggaagcattggttctgttgggggtggcttagccttggggaaagaaggtcctcttgtgcatacaggtgcctgcattgcatcgttgcttggtcagggtggatctacgaaatatcatttgaattctagatggccgcaactttttaagagtgatagagatcggcgtgatcttgtcacttgtggatgtgcagctggagttgctgctgcctttagagccccagttggtggagtgttatttgcattagaggaggtcacatcatggtggagaagtcaacttatgtggcgtgtctttttcacttccgctattgtggctgttgttgtgcgtactgccatgggatggtgcaagagtggaatatgtggacattttggtggaggtggtttcattatatgggatgtatcagatggtcaagatgactactacttcaaagagctactgccaatggctgtaataggagttatcggagggctacttggggcattatttaaccaacttacactctatatgacatcttggcgtcggaactctttgcacaagaaaggaaatcgagtgaagataattgaagcatgcatcatctcttgtataacttcagctatctcatttgggctgccactcctaagaaaatgcagtccatgccctgaatcagttcctgactctggtattgagtgtccacgacctccaggaatgtatggaaattatgtaaatttcttctgcaagacggataacgaatacaatgatctcgctacaattttcttcaatactcaggatgatgctataaggaatttgttcagcgcaaaaacaatgcgagagttcagtgctcagagtctactaacttttctggctatgttttacacattagctgtagtgacctttggcactgctgttcccgccggccagtttgttcctggaataatgataggatcaacttatgggcgccttgtaggcatgtttgtggtcaggttttataagaagctcaacattgaggagggaacttatgctttgctgggagctgcttcatttctcggaggctcgatgcggatgactgtatctttatgtgttatcatggttgaaatcacaaataacctgaaacttctgcctcttataatgttggtacttctcatctcaaaggccgtcggtgatgctttcaatgagggattatatgaagtacaagcacgcctgaagggcattccgttacttgaatcgagacctaagtatcacatgcgtcaaatgatagcaaaggaagcgtgtcaaagtcagaaggtaatctctttacctcgagttatcagggtcgcagatgttgcttcaattttgggcagcaataaacataatggatttcctgtaatcgaccacacgagaagtggtgaaacacttgtcatagggttagtccttcggagtcacttgcttgttctccttcaatcaaaagtcgatttccaacatagtcctttgccttgtgatccaagtgccaggaatatcaggcacagttttagcgagtttgctaaacctgtttcatcgaaagggttatgcatagaagatatacatttaacttcagatgatttagagatgtacatagatcttgctccatttttgaatccgtctccatacgttgttcccgaagacatgtccttgacaaaggtatacaatcttttccggcaacttgggttgcgacatctattcgttgttccccgtccttcccgtgtgataggcttgatcaccagaaaggatttactgattgaggaaaatggggaatcatcagcagtggaactccaacagtcaactagtgtaagaggtcggtacagtgagacagcaacgcggatggacgctgcacgaccgcttctagacgatcttttaggttaataaaacagaccaaacatatacaagcagttgaagctggtagctaagatctttagtcgggccaattcttcgtccatacaaggatacaagcttgttccgcatgttgccacccaaatccggtatggaggatatatgatcgtctcttgagatgggattgtgttgttcgctaaccgatctcattctccgttcacagagagtagaaagattatatatgtagagggcttttgattgttgtaattgtgcaatctttgattattttcttggtcactgtaaaataatccagcttttgatatatttacttgattaacttaaaaaccatattgtaaacaagaaagagaaaaccagaatttatcggtcataccgccatggaaaaataaatcatattttgccatcgtgctacgtgaccgcgcgcacgcccggtcgcccgcggctcgtggcatacgctc

SEQ ID NO: 1256 - DNA, 1726 bp, Arabidopsis thaliana
  Clone ID: ARATH-23APR03-CLUSTER9593_1
aaaaaggatcaaacatagtatagcttggactctttttgccgtctatgatctctctcaatctctcatcttagctttctttctctctctctttgtgtcttcatttgtttatctcatcaatggattcaaattttcattactcgatagatcttaacgaagatcaaaaccatcacgaacaaccctttttctatcctcttggatcctcttcctcgcttcatcatcatcatcatcatcatcatcatcaagtcccttctaattcttcatcttcttcttcgtccatttcatcgctctcctcttacctccctttcttgatcaactctcaagaagatcaacatgttgcctacaacaacacttatcacgctgatcatctccatctttctcaacccctcaaggccaagatgtttgtggctaacggtggatcatcagcatgcgatcacatggtgccaaagaaggagacaagactgaaactaacgataaggaaaaaagatcacgaagaccaaccccatcctcttcatcaaaacccgacaaaacccgattcagactccgacaagtggttgatgtccccaaagatgcggttgatcaagaaaacaatcaccaacaataaacagctcattgatcagactaataataataatcataaagaaagtgatcactaccctttgaatcataagactaatttcgacgaggatcaccatgaagatcttaatttcaagaacgtcttgaccaggaagaccacggccgcgaccaccgagaatcgctacaatacaatcaacgagaacggttatagtaataacaatggcgtgattagggtttgttcggattgtaacaccaccaagactcctctttggcgaagtggacctcgaggtcccaagtctctttgtaacgcatgtggtatacggcaaagaaaggcaaggcgagccgctatggccgcggccgctgcagccggcgaccaagaggtggcggtagcgccccgagtgcaacaattaccgctgaaaaagaagttgcaaaataaaaaaaagagatcaaacggaggggaaaaatacaatcactctcctccaatggtggccaaggccaaaaagtgcaagatcaaagaggaagaggagaaggaaatggaagcggaaacggttgccggagattcagagatcagcaaatctacaacttcttctaattcttcgatttcgtcaaacaaattttgcttcgatgatttgacaataatgttgagcaaaagctcagcttatcaacaagtgttcccacaagatgagaaggaggctgctgttttgctcatggctctgtcgtatggaatggttcacggttgatcagatcatcacaatatcctcattacaaaaaggtttattttaatagtaatatatagattatagtaatcataataatgattgattgttaaatcttggagtgattagtttagtttttgcagttggtctaatatcaggagtcaaaacattttataataagagtgtgtgagagtttaatatgataattaatagctctatatatgtttatggagattttggttttgagtttgttgtgtttttgttttccgatggaacgaacattagtcacccgataatgtgggtaattcttgttcatttacaagttttatagtactgtattgtgtaacgaggttggagaaataatataatcaattaagggtacttttattaaaaaaaaaaaaaaaaaaactcgagccgaattccgagcttacggacgg

SEQ ID NO: 1257 - DNA, 1661 bp, Arabidopsis thaliana
  Clone ID: ARATH-23APR03-CLUSTER9618_1
gcaccaggagctcactagtcccccccccccccccaaaacataactgcagtctcttcttgtttcgatggaactcaataaggatcagacagtcatgtcggaggataaaaagcctcaagatccaaatcccagatttgcttgcgaaggttgcagcgttctgctcgacatcaacgatggtgaccgtctcgtcttcgctcgtttatctagtggcgctatattaaaaattgggaataagaattattctttaaagccattgatcggagctccgtttggatctctgttccaagtcgaaaccggagaagatggttctttcctctctcgcattcttcccattaaacaagaaagtaacagtaataatgttatggacgattcgagagataatcgagaaatcgtcgacaataatgaagctcagaatcttactggtgaagaaattgaagctatgcggagagagggtgcaaaaggggatgaaattattgaagctctaattgcaaacagcaaaacttttgataagaagtttcagttgtctcaggaaaaatataagcttaaaaagcagaagaaatatgcaccaaagctgcttcttcgacggccttttgctcgaagtatatgtgaagcttatttcaagaaatacccagccagaattggattcttacgagtagatgcgttatctcttctgttaacgatggctaatgtcactgcatactcggatgtgcttgtggtggatatggttggtggccttgtcactggtgcagtggctgaaagattaggaggcactggttatgtttgcaatacatataagggaagttctccttatcctgtggagatggtaaggatgttcaactttagtgacaaggttttaaagaggatcgtgcagtcatcgataaacgagctctcgtcagccaaaactgcgtctactgaaggaaacaatcaacaagaaggagtttgcaaagctgagaacaatattaatgaaacagctacatctgatgttatggttgaagaaatatctgtgacaactgaggctggagtagtagatattgttgtaccagagagcaaaattatcaaagccgcaaaagctggagccaaagcttcaaaagaaacaatagagatgtggcaagaaaacggtttttcgagtctaatcatggctgcgcaagaccaagacccatggatcgtagctaaggatgtattgccactactgtcctactctgctccttttgcaatatatcatcagtatttacagccgctggcgacatgtatgcacaagcttcaacagggtaaaatggcgatcaatctgcaaataacagaaccatggctacgcgaatatcaggtgcttccttcaagatctcaccctcacatgcagatgagttcttttggaggctatgttctgagtggcatcagaatctctaccacttgactgttgttttcataaccagaaactgtggtttgatgtttggtcttttctttcacaacgtctttctggttgttttgttgttgtaacattaagggcttagattatgagaacactgaaaataattgaaaattttgacggatatttgaagttaatactagcatttaccttctaattttaaaaaaaaaaaaaaaggaccacacctgaagactgatagtctgatacgcttgaactatttttggatgattagtgcatccgatcg

SEQ ID NO: 1258 - DNA, 2097 bp, Arabidopsis thaliana
  unsure (1)..(2097): unsure at all n locations
  Clone ID: ARATH-23APR03-CLUSTER9642_1
gaaattgaccccaaaaccaaaaacaaatcagaagaaaattaaaataaacctaaaagagcaaatttttattcgcattgctctcaaaaatcatccatggcggccacctctagcatctcttcttctctatctctcaatgctaaacccaacaagctctctaacaacaacaacaacaataagcctcaccgtttcctccgtaatcccttccttaacccctcctcctcctctttctctcctcttccggcttctatctcctcttcttcttcttctccttcgtttccgctcagagtttcaaaccctcttaccctgttggcggcagacaacgatgattatgacgagaagcctcgggaagagtgtggagttgtcggaatctacggtgactcagaagcttcacgactctgttacttagctctccatgcgcttcagcatcgaggtcaagaaggtgcaggtattgttaccgttagtaaagataaggttcttcagaccattacaggtgttggtttggtctctgaggttttcagtgaatccaaactcgatcaattaccaggagacatagccattggtcatgtcaggtactcgactgctggttcttctatgctcaagaacgttcagccgtttgttgctggttatcgatttggctctgttggtgttgctcacaatggcaatttagtgaattacacgaaattgagagctgatttagaggaaaatggttcgattttcaatactagctctgatactgaggttgtgcttcatttgattgccatttctaaagctagaccctttttcatgagaattgttgatgcttgtgagaagcttcaaggtgcttattcgatggtgtttgtgactgaggataagcttgttgctgttcgtgacccacatgggtttaggcctttagttatgggtaggagaagtaatggagctgttgtgtttgcttctgagacttgtgctcttgatttgattgaagctacttatgagagagaggtttatcctggtgaggttttagttgtggataaagatggtgtcaaatgtcagtgtttgatgcctcatcctgagccaaagcaatgcattttcgaacatatttacttctcgttgcctaattcgattgtctttggtcggtctgtgtatgagtctaggcatgtctttggtgagattttagctactgagtcacctgttgattgtgatgtggtgatcgctgtgcctgactcgggtgttgtggctgctcttggttacgcggctaaagctggtgtagcgtttcagcaaggtttgattagggcgtattatgttggaaggactttcattgagccgtctcagaaaatcagagattttggagtgaagctgaagctatcgccagtccgaggagttttagaagggaaaagagttgttgttgttgatgattcgattgttagaggaacaacttcgtccaagattgtgcgtttattgagagaagcgggtgcgaaagaggttcacatgaggatcgcgagtcctcctattattgcatcttgttactacggagtggacacgcctagctcaaatgagttgatatcgaataggatgagtgttgatgaaatcagggattacatcggatgtgattcccttgcgtttttgtcgtttgagacgttaaagaaacatttgggggaagattctagaagcttctgctatgcatgcttcacgggggactatccggtgaagcctacagaggataaggtgaagcgaggaggagattttatcgatgatggtctcgttggaggaatccacaacattgaaggaggttgggtacggtagatagcagatattcaagttctgcattatgatgatcaattttgggtactaatggagtaagatgatgacgatatcttgttgaattttgtgttccatttgaccttaattgctggcacatttttactattttattgagtctgggatggattaagatttaagggttgttcttgtctgaatctttgaaaggttttgtttacttttgtctcgttaagaattcaaatcttctctctaaaaaaaaaaaaaaaaaaaaaagggcggccggtaatgggtgatgtggtatatgagagacatctctctatttactaaaatttgattcggttn

SEQ ID NO: 1259 - DNA, 856 bp, Arabidopsis thaliana
  Clone ID: ARATH-23APR03-CLUSTER96692_1
aaccataaaaatttcaacagttgttaagttacaagtctcttcaaaaacacacacacacgtctctctttacagccaatcatcgatcacagctcgatttttctttattgttccgttggttttcttgagaatttttctttcttggtatcatcaaactcgtcggtaaggaaacttcacgcacgtatcttcaatgttgagctgttctaatggtaccgtcgtgatcgcaaccgccatggtttgctcaagcaccgctctgtttctcgccatggctcgtcaattccatggaaatcatcaaaatcctaaggttcttgatcagactctacgacccattctccgttcttgtctatcttcagaggaaacgaagaaacaggggaagaagataaagaaagtgcggttcgcggataatgtgaaagatacgaaaggtaacggggaagagtaccggaggagggaattgaaccggaaaagcgtaccgaagccagtgactaaaccgggaaagaccggttctatgtgtagaatctctaccatgccagcgaaccggatggctctgtacaatgggattcttagagaccgagatcacagagttcaatattcttattgactttttcttcttgattagtcaatagatttaggttttgtaaatctttcttttgtttttcggtaatattagattttttcttggaaatttcagatattgtagactttgtagttgggtggtcttctttttctccctttttgtgtctcatagtagtaggtggttttcttatgctctacttatctacttacttgttttaaatcaagtgatgatgtaaataattgacatgtaagtagtcattagaaatttgaaaaaaaaaaaaaaaaa

SEQ ID NO: 1260 - DNA, 1245 bp, Arabidopsis thaliana
  Clone ID: ARATH-23APR03-CLUSTER9674_1
ggcgaatctgggcccgccccctcccccccgctccgtttcctccaaaatggctacaccaaacgaagtatcagctcttttcctcatcaagaagtatctcctcgacgaattgtctccgttgcctactactgccaccaccaatcgatggatgaacgatttcacgtcatttgatcaaaccggttgtcaaatcaaatccttcttcctcttcaattctctgtttcctccaaaatggctacaccaaacgaagtatcagctcttttcctcatcaagaagtatctcctcgacgaattgtctccgttgcctactactgccaccaccaatcgatggatgaacgatttcacgtcatttgatcaaaccggtttcgagttttctgaatttgaaaccaaaccggaaataatcgatctcgtcactcccaaaccggagatttttgatttcgaggtgaaatctgaaatttcaattgaatcgaacgattccttcacgttccaatcgaatcctcctcgcgtcactgttcaatccaatcgaaaaccgccgttgaagatcgcaccaccgaaccgaaccaagtggattcaattcgcaaccggaaatcctaaaccggaacttcccgaaccggttgtagcagcagaagagaagaggcattacagaggagtgaggatgaggccgtggggaaaattcgcggcggagatccgagatccgactcgtcgtggaactcgggtttggcttgggacgtttgagacggcgatcgaagcggctagagcttacgacaaagaagcgtttagactacgaggatcaaaggcgattctgaatttcccgcttgaagttgacaagtggaatccacgcgctgaagatggtcgtggcctgtacaaacggaagagagacagcgaggaggaggaagtgaaggtggtgaagaaagtgctaaagaaggaggagagttacgccgttagcgacggagagaatgttgagtcaggtttgacggcgatagatgactgggatttgacggagtttctgagcatgccgcttttatcgccgttatctccacacccaccgtttggttatccacaattgaccgttgtttgaattctatttttctgtttgggtcagcttgttgtatgctgacgtggaattatgctatatcttttgcttattttatgttcacattcgagcaaaatttattcattcgtttatttgttttttaatacaactcttgatatttctaaattctaaccaaaaaaaaaaaaaaagggcggccgc

SEQ ID NO: 1261 - DNA, 1321 bp, Arabidopsis thaliana
  Clone ID: ARATH-23APR03-CLUSTER9692_1
attaaacgcaacaaatcaaaagtaataatccaaattatatatacatatatgcaccatttggttaaaaactaagaagaaaccaaaatgagaagttttactaatttaaatccttgctacgttctcttaccgttcttccttgtcctagccacgaatgcaacacatacaaacaatttcctcccaaggccacggactgggtattacggtagtgcatgctggaatgtagaatcgatagttcggtccgtggttgagtctaactatcttgctaatccagccaatgctccaggcattttgcgtatgcactttcacgattgtttcgttcaaggctgtgacgcctccgttctcctagccggacctaactctgagcgaacggcgattccaaatctatcgttgagagggtttaatgtcattgaagaagctaagactcagcttgagatcgcttgtcctcgaacagtctcttgtgctgatatcctcgcactcgctgcacgtgacttcgtccatttggccggtggaccatggtggccagttccattggggagactcgatggccgaatttctctagcctcgaatgtcattttgccgggacctaccgactccgttgccgtgcagaagctgaggtttgccgaaaaaaatcttaatacccaagatctcgttgtccttgctgctggacatacgataggaacggccggatgtattgtgtttagggacagattcttcaactacgacaacacaggaagtccggacccaaccatcgccccgagttttgtccctctgatccaagctcaatgccctctgaatggtgaccccgcgactcgtgtagtgctggacacgggaagtggtgaccaatttgatacgtcgtaccttaacaacttgaagaacggtcgaggtctcctcgagtctgatcaggtcctatggactaatctcgagacccgacccatcgtggaaaggcttctaggactacggtttccgtttcttattttcggactggagttcgcgaggtccatgaccaagatgagtcaaatcgagatcaagacgggtttggatggggagattcgtagggtttgttctgcggttaactaattaatataagattaattaaccattacaatatgatataaagtaatgaataaaaatggagattatatagactctccagcttttaataataaaccagctagtttaacattttcttttaatgtgactaagaggtttaattacgacgatgtgagtgtgagggaatacgtgtttaaatcacacataagaaaaaagaaatcctatgtaattgtaatctcttaagaaaatttaaaataagctatatatgtgt

SEQ ID NO: 1262 - DNA, 1689 bp, Arabidopsis thaliana
  Clone ID: ARATH-23APR03-CLUSTER9711_1
accaaaatagatctaaaacatggaaacatggaaaccaaaaccctaattttctcaattctcttcgttgttctctctctcatttacttaattggaaaactcaagcgaaagccaaatctacctccgagtccggcatggtcattaccggtgattggtcatctccgccttctcaaaccaccgattcatcgcacattcctctccctctctcaatccctaaacaatgctccgatcttctccctccgactcggtaaccgactcgttttcgtgaactcgtcacactcgatcgccgaggaatgtttcaccaaaaacgacgtcgtactggcgaacagaccaaacttcatcctcgctaaacacgttgcgtacgattacacaaccatgatcgcagcttcctacggtgaccactggcgtaacctccgccgcatcggctccgtcgagatattctccaatcaccgtctcaatagctttttgtctattcgtaaagacgagatccgacgacttgtgtttcgtctttctcggaacttttcacaagagtttgtgaaagtggatatgaaatcaatgttatctgacttaacattcaacaacattttaagaatggtggccggaaaacgttactacggagacggtgttgaggatgatccggaggctaaacgtgtccggcagcttatagcggatgtggtggcttgtgctggtgctggaaacgctgttgattacttaccggttttgcggttggtttcagattacgagacacgggttaagaagttggcgggtaggctcgacgagttcttgcaaggattggttgatgagaaacgagaagctaaggagaaaggaaacactatgatcgatcacttgcttactctgcaagaatcccaaccggattacttcacggatcgtatcattaaaggaaacatgctcgctttgatactagcagggaccgacacatcagcggttacgttagaatgggcattgtcgaacgtgttgaaccatccggatgtattgaacaaggcgagagatgaaatcgatagaaagataggtttagacaggcttatggatgaatcagatatctcaaacctgccttatctccaaaacattgtgtctgaaacgttgcgcctttatcctgcggctcccatgcttcttcctcacgttgcctcggaagattgtaaagttgcaggatacgatatgccgcgtggcacgatactattgaccaatgtgtgggctatacacagagatcctcagctatgggatgatccaatgagcttcaagccagagaggtttgagaaagaaggagaagctcagaagctaatgccgtttgggttaggaagaagggcgtgtcctggttctggactggctcatcggcttataaacctgactcttggatcattgattcagtgtttggaatgggagaagattggagaagaagtggatatgagtgaaggcaaaggtgttacaatgcctaaagccaagcctttggaagccatgtgcagagcacgtccctctgttgttaaaatcttcaacgagtccgtttgacgtttagacttttggtaatggctatgtatacattagataactagttatgtttgtatgttttctttttttttggtgaaaatattatgtttgtatgttaatgtatatgtgaatatttaacctatattcctagatggggcaaaaaaaaaaaaaaaaaaaatatttaaggtt

SEQ ID NO: 1263 - DNA, 1262 bp, Arabidopsis thaliana
  unsure (1)..(1262): unsure at all n locations
  Clone ID: ARATH-23APR03-CLUSTER9722_1
gaggaatcagctgagactttgcgacgaagtaggtttggtctttcttcgccacgtacgaaccctaaatcctcttttactcattttcctccatcttcgagctccccaaaaacctctgcttttgtcgaacctttcaaaaagtttaaagcttatacctttggacggcgccaaaaacatggtcttccataggctatcaagattaggttctcgcattgttaaagagctcccaagagagagacatttgtcaatgtgtggaaagaggattcttcaaaggtcttatggccagtatcttcaatcttcgccaatgctgcaaaggcaaactaggagttttaaggaagcattattctcgaataatcataagttttgtacatctttcagcactacctctgagaaaggtggcgaaaaaacagaaaagataaacgttacctttgttgataaagatggagaggaaattcatatcaaggttccagtaggaatgaacatccttgaagctgctcatgaaaatgatatagaactcgaaggggcatgtgaaggttctctagcgtgttcaacctgccatgtgattgttatggacaccaaatactacaacaaactcgaagaaccaacagatgaagagaatgatatgctagatctcgctttcgggttaacagcaacgtcgcgattgggatgtcaagtcatcgcaaaaccagagctagatggagtacgcctagccattccttcagctactagaaattttgcggttgatgggtttgttccaaaacctcactagtcacttaatagtctcagagcaaatgatttttcgaaaaaaaacccattacataaaaattacccttacggagagtcatacaaatgtaattcagacggtgagatttcaactcagcttgtttttgcagcattgttttattgtgtcttgagtttaatatatatttcatgaaaaagctataaaaccaagttgtattctagatagttaaaaaaaaacctcgagggggggcccggtacccaattggccccccgctagtccgtgtgcattcactggccggcgtttctcgacggggggcccggtaccctgngttccaacttattgccttgggnnaantcccctttttccggnggggnannaaaaaaggcgnccngaccgcntnccanantngngccnatgganggggagggaannnnnnttttttttaaaaancggtttttttnnaaanntttttttnagngggggggggggggnntnttanaaaaaanaccnggagggggggnnc

SEQ ID NO: 1264 - DNA, 2337 bp, Arabidopsis thaliana
  Clone ID: ARATH-23APR03-CLUSTER9736_1
tggaggcgcgatgcctcaggcgtacttcatcacgcaactatcacgagcctctctgtcgttatatacgactttcagtttttcttctgatttgggaaagaatcaaacttttgaatgtgaagttgcgggaaagaatcaaacttttgaatgtgaagttgcttctttcgtctcaagatctctctttatctctctatctgtttgattgagggtttttgttggatggcactttgtggtgtttgttcgactccaaatctgccgaatttacaagtgtttcgttctgttaggaactcgagcattggttataaacgaaaccatagtctatggcagctcagaagttcatcatttcgtgctaaatctgtgatatttcattgttcatcgtccttaagacagtcaccatctaatgtggaggagatagatgataatccttcggtatcattagaggatgaatcagcacatgtgatgcagttcaagtggtctgattttaggattcttgatcgtgttagcattggtcatggcggcagggctgatgagcttgtgtttgaagctatagttcaggttccagatagccctttgtttaaccaaggagttgttcttcggaaattgaataccactcgagctcaaagacgaggaagaagagctatagaagtttttaagaagctttcgtcggagacttctctaccattcttactcaatgcaagttcacggttatatcaccaataacttaagcgatgatcagtactcatttacccttgtacatgggtgccatggaagtttctcgattaggcactggcttcactaatccgtacactaatgagggatattttgatcggagtcaattacttgcacagccatggtctggctcacacagaactgagattggaaaatgtgcatattagccctgtggatagacatatcaaagtagggattctcggaaatgctgctgactttaacggggatgttccaagtactagcaacgcttacagtaccatggacagacgacaaatgatgatagcatttgacatgagatgtgttggattcatgatggcaaaaatggtacttcaagaattgatggatccattaatctttgcgaaattgaagtctttcctggcaaaggggaatgatccttcctcgctgcgggagttttttgtgacgacgctcaatacaaactcggaatctggaaataccggagtgcaaatacttgatagaaactggggagcaggttggcaccttttatctttgttaattgctaccagaccttctgaaagaataagttgcttggatgctcttaagcatccctttctatgtggaccaagatggcgtgttgccccatcaatggatatcatcagatggggtcttggatcaaccgcagtaaagatttcagaagaatacatttaccgcatgcctcagcgccaaagacttgcccacttcattggactgatggagatgctaaatccttatccaaagccaaactgttggttggagcttttaccgggaagatggcgtcttttatactcaactggaaagcacataggtctaactctgcgtcagccttccacacgtgccttaataggcaacgttcacttaacgataactcgagcttcagaatccataaacaacacttcactttcctttacctctgatatacgcttcactgccataaccagcaaagactggccacacaacaaaatcggagctgctgggaaattacaaacgctctctcaattcagactaatagctggaaaaagactttacctcaaagaagagaaaaagaacattggtaagttctcaatgggtgaaccagatgctgaagaaggtttagccgagaagcttgaaaccgagaaatggaaaaaagtcgtgcccttcaaggagtttccgtcgagtcttcctgtagcaaaactcgtctctggagaaatcgaagtgacgatgaacatgaatgatcatatagattcacctgggagtgtgattggagaagttagaaagcaaattccgccggaaatgttcgatctttctaagcttgtgtgtgggacttatatagacagtaggttacttgtacttaggtgtgtaaatggttcagcattgttgttcacaaggtccagcttggaccataagtctatgtagccatttggctcaggttcttatgtatataacaaatgaatcattctttttgggactaaaccgttgtagtctctgtgtatgttgtggtaatgtatgcttttggcttttaggttgtaataagagctttttagtaaaagctttatactatggtattcttttcatgattataatagaaacacaatgatttgcaataaaaaaaaaaaaaaaataaaaaaaaaaaaaaaa

SEQ ID NO: 1265 - DNA, 1390 bp, Arabidopsis thaliana
  Clone ID: ARATH-23APR03-CLUSTER9760_1
aaaatcagtcacgaaaacccccaaatccacagattaattagggttttcgatttctctgatgaaactgagaagaatctctcattagggttcttcattcttcagagggatttctcatatctctctcattgagcttgctaaagctgaaatctgagtttgaaattggaattcagattcccatcccatgttgacctcttcttgctcttcttcgtctctcctctgccatcgcccagctctctctagttcgcgttccaagtttagggttccttgtcgaactgttttctctcctgctcttaccaagatttcccctttaactgcttcttcaccttctaagtccgccaagcataaatggaagattttgtgttttagaaatgaagattctgctcccgagaatccggagcattttgtgcctgaggaattagttaagccagatcaagattctccatgtacagataaaacagattggaaggcaacttttcaaaaggctgcagatgcagttttgaaggccattgggactcgttggaaggtaccatggactgtcgagaccattgtgcaggtaatgcttctgtgggtagccgctttctggttcattggttcatggatgatcccattcatggctcatatatcaggtttccacaaagaatccctaacatttagaggccaagctttgttcagtctgataaccgatgtaacagaaggcctagccgggattgctatcctccaccgttgcctctccatgttccgtccacttgcaagtgattggttccgctttacccttaaaggaaactggcaactagatgttatcataggctgtttcatgttccctttcgttaaccggctctcccaattaaacctaaacctcttgccactcccaccaacctcaagtccagtctcactctcaagtgtcgagcagtctataatggctagagaccctgtggcaatggcactgtatgcagttgtagtatcaatttgtgcaccggtttgggaagagatagtgttcagagggttcttgttaccgtctctaactaggtacatgccagtttggtgtgcgattcttgtgagttcgattgcatttgctttggcacatttcaatgtgcagaggatgttaccattggtgttccttggagtggtattgggtttgatattcgcaaggtcaaggaacttgttaccttcaatgctgttgcatagcttgtggaacggctttgtattcatggaattgatgcgatgatgactatcttttgtaggtgtcttgtttcttattcttcttgtaattgattcaaagtatgatgttagcttttatttttttataataaatggacagttcaattgtacaaagataaaaccaaaaaaggtcaaaaagaaattctaattttataaaaaaaaaaaaaaaaca

SEQ ID NO: 1266 - DNA, 1493 bp, Arabidopsis thaliana
  Clone ID: ARATH-23APR03-CLUSTER9761_1
gctcactagtccccccccccccgaccaatcaaaaatgtctttgctctctcctcttcctctgctccactcattctcctccaccgtcgccacaaaatccaccgcctctagaatcactgccacgccgtcgaaaatccgcttctctgtcataaacgccacgtcggagaatggaaacagcggtggtagtaaaaacgatcgtgatgaggatccatcttttaacccatttggtttcgttacagacaacccgtctagccggagtgcaattcagttaccagagtctccggcggaagacggcaatgtcggccaaatgctctacaggactgaagataaaggtaaagagtatggctcaactatcaaatctgggaagcttagatggtttgtgagagagactggatcaaaggagagtcgtcgaggaaccattgtatttgttcatggagctcctactcagtcttttagctacagaactgtcatgtctgagttgtcagatgctggatttcattgctttgcacctgactggataggattcggattcagtgacaaaccgcagcctggatacggttttaattacacagaaaaagagtaccatgaggcgtttgataaactgcttgaagtgctagaggtcaaatctcctttctttcttgttgttcagggatttcttgtaggttcatatggtttaacttgggctttgaaaaatccaagcaaggttgagaaactcgcgatccttaatagtccgctgaccgtttcatccccagttcccggattatttaagcagctgaggattcccctgtttggtgaattcacctgccaaaatgctatcttggccgagcggttcattgaaggaggtagcccctacgtcctgaagaatgagaaagctgatgtgtatcgtctaccatatttgtcaagcggagggcctggctttgccttgctcgagactgcgaagaagatcaactttggagacacattgagtcaaattgcaaatgggttttcatcaggcagctgggataaacctacgcttctggcttggggaatagctgataaatatctgcctcagtctatagcagaggaatttgagaaacagaacccccaaaatgttaagcttcgactcatcgaaggtgctgggcatttgcctcaagaagactggccagagaaagtagttgctgccctccgagcatttttctgacttccaaatacaacaaaaaaggacagaggtactgttttggtggggtgtttagagtcttacctctttgatggatgtgtgcaaagcttcacattgctctttggagaggctagaagcagtctgcaacgggtggattctggcctgcgaaaaaaataaactagaattaatcgtacagcatgtaaacccgtttcttctgtcgtcaaatgtacagaaaacaaaagtggatactttgtgaatcaaatgagtggttacatagatgctttacttcatttcaaaaaaaaaaaaaaaaagaccacttacggggcccggtacccaatcg

SEQ ID NO: 1267 - DNA, 1305 bp, Arabidopsis thaliana
  Clone ID: ARATH-23APR03-CLUSTER97640_1
aactcacagttatggctacggcaatggaagagccaaggaagctgagaggccacaaatcaactgccacttgttgtatagcttctcgtgaccggcctggaattgttctcacttccggcgaggatggttgcatttgctggtttgatttgcgatgtaaagatgttcaattcatcatcgatgttggaacagaaccagtttcatctctttgtttcaagacaggtaatgagaacattctctatgcttcttgtggaaacgaaatcaagtctttcgatgttcatacgctaagtgctacttcttggaagccattagagagttacaattacaacaaagatgaagttaaccaggtagtatgtaacggaaggtcgtcttttcttgcttctgcagatgattccggcgatgttaagatgatcgaccttggtcagaaatgcctttataaaacccttagagctggtcacacaagtatatgtagttctgtacaattcattccatggagaccttgggaagttcataactggtggacttgattcaaagcttgttttatgggatttctcaaaaggtcgctcgcaaaagattatagactttggatctgatacaaataataactcgggacaatgcctaaaccctgcgtttgttcactcaatagcaataccggaaatggacatggttgataagttagacaagatatgtgcggttgctagaggtgatggaattgtcaatttgatcaatatcgaatcagaactttcccgaaaaggaacatcatcaaaaggaagtagcagcagcagcagcaacaatgtggtcaaaagggtttgtttagactactctgttggtggacacaattctgctgtttcttgtgtagccttttctctgtttcaggagaaaggtagattcttaatctctggtggtaatgataaaacagtcaaaatctgggattgctttaaatgtcttgatccaaacaacaacaacaataacagtgatctcctccatttgaatattaacctaagcaagaaggtgaattggctttgcacgaatcaatctgattctgagaatcttgtagtgtgtgacacaacaagagtagttaaggtttactcaatctcttaaataggcctgatgggtccataaaaatagtctaaaagcttcatcctttttgacattgttattagtctaagagattcatttttatttttgacattagaatggttgcttgatctacaagttagtttatttttttgtttgataaccaaattataaagaatgattacatttaattattgaaaaaaaaaaaaaaaaaagggcggcaaaaaaaaggat

SEQ ID NO: 1268 - DNA, 1082 bp, Arabidopsis thaliana
  Clone ID: ARATH-23APR03-CLUSTER9764_1
gatcatctctttcctcaatcggagtgagcgcaaaaaatcaaaaattcgccgagagcacaaaccctaatggcttctctctcaatggcttccgttaacgttagcttctgtcatcctttacgctcttcttctccaaaggtctcacttcgcagttccgttcatttcgcgacgagtctttcctcaagtcactccatttctgggcttcgcgctgttttgcctctgaagatttctacagttgcttcccccaattctcaactcgtgccctcgtgccgaattcggcacctgggcggggcccggtccgcgggtaccactccccagcggcctctacttaatcatctctttcctcaatcggagtgagcgcaaaaaatcaaaaattcgccgagagcacaaaccctaatggcttctctctcaatggcttccgttaacgttagcttctgtcatcctttacgctcttcttctccaaaggtctcacttcgcagttccgttcatttcgcgacgagtctttcctcaagtcactccatttctgggcttcgcgctgttttgcctctgaagatttctacagttgcttcccccaattctcaaaagcttcattcttttaccgttttcgctcataagggctacaagatgaagacccacaaggcctcagcgaagcggttcagagtgacgggtagagggaagattgtgaggaggagatctggaaagcagcatttgttagctaagaagaacaacaagaggaaattacgtctatcgaaaatgacggaagtgaaccggagcgactatgacaacgtgatcggagctctgccctacttgaaagtcaatcgaaaggcgacttaagcagagcaggcttgatccttttcttacctgcaattctcattttgtaatctaaagttgtggtaatatccttttgtattgtgatataatttggtcaatgagttgatttttgtttcataaaaaaaaaaaaaaaaaaaaaaaaaccataacaaaaaaactacgtgtgccgggtgccgggtcaccgaatttgccccttgaccgtgagccggatttagcccccgtcctgctcggcccggtccgtttataacaagtcc

SEQ ID NO: 1269 - DNA, 887 bp, Arabidopsis thaliana
  unsure (1)..(887): unsure at all n locations
  Clone ID: ARATH-23APR03-CLUSTER97681_1
ngattggaggaggggagttttctttgggaaagtttttgtgtgtgttctcctcgtggcccttttttcccaaaacttgtgtttgtggcagcggagggaggggggggagagatagatgtgtttccccccaaccccccccccaaaaaaaaaaaaaaaaaatgaagaaacttcttttgatatttctgttttctcttgtcattctccaaactgcttgtgacgatagatgggcatgaagatgtacccgaaaacgacgaaaatgctcttcttaaggctgttgcaaaccaacctgtatctgttgcaattgatgctggaagttcagatttccagttttattcagagggagtgtttacgggatcttgtggaacagagctgaaccatggtgtggcagcggtcgggtatggatctgagagggggaaaaagtattggatagtgagaaactcatggggagctgaatggggagagggaggctatataaagattgaaagagagattgatgaaccggaagggcgttgcggtattgcgatggaggcatcgtatccgatcaagctatcgtcttctaatcctaccccgaaagacggtgatgtcaaagatgagctctagatatgtgtacacattgtgtaaaaccatatcaaaggtgatcccaattccttgttgattcatgttgttagtttcgtcttcatgatttgattttgttgttggttttgaatttgaataaaaatgtctcgtgttttctcaatcctttgtttattaattatgtacaagagaccaataagacacttttggcgaaaaaaaaaaaaaaaaaaaactcgagggggggcccgcgtacgcaattcgaagnnnccaaacattaatatattatatattggggggngggggggggaggggggaaa

SEQ ID NO: 1270 - DNA, 1000 bp, Arabidopsis thaliana
  Clone ID: ARATH-23APR03-CLUSTER97767_1
aaggagaaaaaaaaatatctttttttttttttcccccccgccggggggaaaaagaaaaagagcctcccacctatttgttctcacaccgggggaggggggagaatacgcggggggtgggtttttttttttttttttttccccccacctctttgtggaaagaggaaaaaccctcctctttcttgtttttgccccccccaccacacaacaaaaaaagtgggggaagagagtttcccccccaaaggtcacccccccgcccccaaaaaaaggggtattcttcgggggaaaaaaagggccacgaaaaaatccggcgtttttttccgaaaaaaaggccccccaaaggatccccccgggttaaaaaaagaagggggggcccccgcgtcggcgcccccccctcggcctccgggcggggggcccccacctagtgggcccccgggccccgcgggagccccaccgtaagcataccaaatacatatgtgcctttcaagaagcataccagcgccaacccgaagaatttaaagttcaaatcaacttattccaaaaacttaactcatcaaggaatcacggagaagtggaattggttcaaaaatcttttcagatgaagatgatattaaagttacaaatcagcagatttccaaagaacccgatggagaccaacagctacgtattagaggatttcgacctgaccagaaggagttaacctacaaagttaattctcagatattcttgactcataagatgtagaaactagagaagagtttgggggaaaactctttcttatgtcttgttgatctcaatagcattgatacaatgtatatatatgcaatttagaatatgtttttcctaatttgaataagaaatagataaacatgaataagtatatatatatttcctatttagaggctttatttattcaaattaggtgaaacataatctaggttgtatatatatatgttataccaatgcgattgagagcaccaagacataataaagagttttctgg

SEQ ID NO: 1271 - DNA, 764 bp, Arabidopsis thaliana
  Clone ID: ARATH-23APR03-CLUSTER97802_1
cctttttttttttttttttgggtttttttttttttttttttttttttttttttttttttttttttttttttttttatttaaccaatgaatcgattctaatatgttgattggaaactcactgttatacatcaaggcatcaattgcagaacctgtttatttactgtgatgatccataagcaattcattgtaagaaaggcgtgtccttgatatttaattaaactatctcttattgagtatggaacaacttctgttctttattggttgctttcatcaaggaagtctggttactcctcttttctttttatttatcaaccttcacattgaaatgctgaaactttaaatgttcgtgacaggccggtggtattagcaaaggtgatcttctcaggatctttctctttgatgaagatatcattcacaggaacccagatcatgagctctttgcttttgactccggtaagtctcctcatacggcggtcctcaacaaacgcagttatctccgtgtcatataaaactctgcgacctatctcacggaatgtatgctcaatcttgcttctcagcctcatccacacaaacccttttgttttgttgtacccaacttccgtcatatccttcaatggcaacaatcccgtgggtagtttgatgagagcaagaagctccttggctttatcaagacaaagagattgatcactgtagctctctatgtcatcactctcatctattatcatctctcttaacgccataataaatcactttgttttattgtt

SEQ ID NO: 1272 - DNA, 2623 bp, Arabidopsis thaliana
  Clone ID: ARATH-23APR03-CLUSTER9795_1
gatgaaatctgcaaatttaggtcttttaatagaaatctgaatttcatgttgctgaaagaatttacaacgaagttgtaagtactctgagaaacatgtaagtcaggagagagtcccttctatggtttatatttggcggcttttaagaagcatacgcatatcaagtgtttgatgaaattcctcagagaagatgatgtccaccacagtcagattaaacaggtttacgtatctaacgagtactgcaaaactgacacgttacttttgctctcaccatttagttgaccgatcggaaacggcgttgcatgaagttattcggatagtttcttctccagttggtggtctagatgaccttgaagaaaacttgaaccaggtttctgtttctccatcatcaaaccttgttacccaagtgattgagtcttgcaagaacgagacttcaccgagaaggctgttgaggtttttctcctggtcgtgtaaaagcttgggatctagtttacacgacaaggaattcaactatgtcctaagagttttggctgagaagaaggatcacacagctatgcagatactcttatcagatctcaggaaggagaatcgggcgatggacaagcaaacgtttagcattgtcgctgaaactctggttaaggttggtaaggaagaagatgcaataggtatcttcaagatcttggacaaattttcttgcccacaagatggtttcactgtgacggctattataagcgctctttgttccagaggacatgtgaagagagcattgggagttatgcatcatcacaaggatgtaatatccgggaatgaattgtctgtgtatagaagtcttttattcgggtggtcggtacaaagaaacgtgaaggaagcaagaagagttatacaagatatgaaatcagcagggattacaccggatttgttctgtttcaactcgttgctgacctgcctttgcgaaagaaacgtgaatcgaaacccgtctgggcttgttcctgaagctttgaatattatgttggagatgaggtcttacaaaatccaacctacgtctatgagttacaacattttgctctcttgtttgggaaggactaggagggtgagagagtcctgccagattttagaacagatgaaaagatcgggatgtgatccggatacagggagctattacttcgttgtgagggtcctgtatttgacaggaaggtttggtaaaggcaaccaaattgtggatgagatgatcgagagaggatttagacccgaacgcaaattctattatgatctgatcggggttctttgtggggtcgagcgggttaactttgctcttcaattgtttgagaagatgaagagaagctcagtgggtggttatggtcaggtttatgatctgctcataccaaaactatgtaaaggaggaaactttgagaaaggaagagagctttgggaagaggcattgtcaattgatgttacacttagttgctccattagtttgcttgatccatctgtcacagaggttttcaaacctatgaagatgaaagaagaagctgcaatggtggatcgtcgtgctcttaacttgaagattcacgctagaatgaacaaaacaaagccaaaactgaaactaaaaccgaaacgcaggagcaagacaaagaagaagaatctgcaacattgattgatttcttctacccattgttaagaacatctgatatagcaggcaatgtatcacaagaaactcaagtaagatgttctgctttttatgtattagtagtaatgcagaagcaaaggacatgagattcttttgttgttctctttgtcccattgattcttattacgaaaaatatgggttctgaagaatacaaaacaagagacaagaatattgtgatcaattggaatgtgttatttttacaagtaactcgttcatctgagtaatctgatgcaagaggtgagctattctctcgtctctctctttgattgtatctctgagatgagcagcgatgatttcacctttttcaagtcgtcggcgagttccggttacgcttccaccaccaaaggaatatgaccataaccgaataaaatgaccggagagtctttgagaaggaacagagactatttctggagaagcaggtaaccaaattctggaaatttgacattactcgagcgagaagaatcttccaccaaccttggataatatcaatctcaattacggatttccacggagatttcccgacatcttccgatggctgagaatgcgatttccggctaaattgaaattgttcgtctgaatcggacggagagaaggacgaatctgagagtctcgacgaggaagatgaagaagaggatgataccgacggagattcgagtccgttgacgtagagattctcgtggttgatcggcgggaagatagcgagatcgtccttagcgaaacaagtcgattctctaacgaaaaccattggaaactggggctcgtttctcagatccaagtgtgtgatcctcctctgttcttcaccttccaccatctctggttaaattttgagtcgttggtttgttcctgacaaaggaacgatggagactacctgaaactccccccttctgtcgtcttctcgcagccgtacggacgcgtggccgacccggcatgcctgaccgt

SEQ ID NO: 1273 - DNA, 2230 bp, Arabidopsis thaliana
  Clone ID: ARATH-23APR03-CLUSTER9808_1
gcacgaggagagagctcactagtccccccccccccccgatagcatttctgttcctcctcttggttttttgggtttcttcttcctcgtcttggtttcgttaaaacccttttgaagccctctggaacagtaaaatctgagggatgggattaacgaattgttgttcccacgaggagctaatgagtcgactcgttgactccgttaaagaaatatcagggttttcatcttcaaggggttttattgggaagatccaaggcgatcttgttcgtaggatcacgcttctcagccctttcttcgaggaattgattgacgtcaatgttgaattgaaaaaggatcagattacagggtttgaggctatgagaatcgctcttgattcaagtcttgagctttttcgatcggttaatggaggaagcaagctttttcagcttttcgatagagattctcttgtggagaagttccgtgacatgacagtggagatagaagcagcgttaagtcagattccttatgagaagattgaggtatcagaggaagtcagagaacaggttcagcttctgcattttcagttcaagagagcaaaagaaagatgggaggagtctgatctacagcttagccatgatctagctatggcagagaatgtgatggatcctgaccctataatcctcaaaagactttcacaagagctccaacttactaccattgatgagctgaagaaagaatcgcatgcgatacatgagtattttctttcatatgatggagatcctgatgactgtttcgagaggatgtcttcacttcttaaaaacctggtagactttgtaacaatggaaagttcagaccctgatccatccactggcagcagaatcgtttcgagacatcgttctcctgttataccagagtattttcggtgtccgatatcacttgaactgatgaaggatcctgttatcgtctccactggacagacatatgaaagatcatcaattcagaagtggcttgatgctggtcataaaacatgtccgaaatctcaggagacacttttacatgctggattaacccctaattatgtgttaaagagtctcattgctttgtggtgtgaaagcaacggcattgagctaccgcaaaatcaagggagctgtagaaccacaaaaataggaggaagcagctcttcagattgtgatcgaacatttgtcctttccttgttagagaaattggccaacggtactacagaacagcaaagagctgcagctggagaattaaggttactagccaagaggaacgtggataacagagtttgtatcgctgaggctggagccataccactccttgtagagcttctatcctcaccagatcctcggactcaggaacattctgtgacagctcttctgaatctttccataaatgaagggaacaaaggagccattgttgatgcaggagccataacggatatagtagaagtcctaaagaacggaagcatggaagctagagagaacgctgctgcaacccttttcagtttatctgttatagatgaaaacaaagtggcaataggtgctgctggagctatccaagcacttataagcttgcttgaggaaggaacccgaagaggcaaaaaagatgctgctacagcgattttcaacttatgcatataccaggggaacaaatcaagggcggttaaaggcggtattgttgaccctctgaccagattactgaaagatgcaggtggcggaatggtggatgaggctctggccattttagcaattctttcaactaaccaagaagggaaaacagcgatagctgaagcagaatctatcccggttttggttgagattataaggacagggtcaccaaggaaccgggaaaatgctgcagcaatactttggtatctatgtattgggaatatagaaaggctaaatgtagcaagagaggttggtgcagatgtggccttgaaggaacttactgagaatggcactgatagagcaaagaggaaagctgcgagcttgttggagcttattcagcaaaccgaaggtgttgcagtaactactgttccatgaaagcctcgctcttttggaatgttatttgtttcagtgtagattatatgtataggaacctttggtttgagtctgacataagaatcttatgtaatgatgttatatgtaattttcgactcagagttgtgtatatctatttgatatttaaaagtaaaagtaaccctattatttactgaataaaaaaaaaaaaaaaa

SEQ ID NO: 1274 - DNA, 1761 bp, Arabidopsis thaliana
  Clone ID: ARATH-23APR03-CLUSTER9816_1
ctttaacaaagaagcaaatttcatttatcaacatttgacaaaatcttcttaaaggttttgatttttcggtgcaaaacggtaaactacaactccgattctagcaccttcttgaggatcatcacaatgtataacatcaacatcgaagaatctccgagctttcttgaaaaaaatcgattctttcttccatctcttgaggtgagccataagaaacactctctcggatgatccttctaagagcagaaaacgcagcgttttgaggagaggttcataaagatgaacgtgataaaccacgtcagacgctagaatcaagtcaacgttttgacccaaactttccacgccatcgatttcgccccaacgaagagacgccacgtggactttcccaccgaacttagccacgacttgagcgtttgcgtcggcgttgaatttgagattctcgattacgtttgggagatccgtcaccgtgacattagcacctagtgtcgcagccgctgcgataccgacgattcccgttccagatccgagctcgacgatgttaatcggagaagaagaatctgaaccgtcggattgaaaactcgagaaggtgcgattgagaggactaatgtttgggtcacgacggtagttatctaaaagcgtgacgagagttgttgcaggtatccagagcttgaaggcaatgccttgtgtcggtaactgacgaatcacaaccgttgattcgatcgaattgatccggtacttctgaagctccgattctacgtcgactactttttctccgatgttaacatcgtcgtcgtcttctcggagagccattgattgtgaccaatcctcacgacggccccgctactatttattagggcactcaaatttggttacacgtggagggttgttattggtgatgacgtcatcaaatgtaattgaagaagcctctaagatagagagagggtttgaaaatgtgagattcagagtttgtcagcgagagagacgaagaaagaaagagaggagaggtggaagatgattaaggcagtgatgatgatgaacacacaaggcaaaccacgtctagctaaattctacgattacttgcctgtggagaagcagcaggagcttattcgcggcgtgttttcagtattgtgcagtagacctgagaacgtaagcaattttctggagatcgaatcattgtttggaccggactcgcggcttgtatacaagcattatgctacactctattttgttcttgtatttgatggttcagaaaatgagcttgctatgcttgatctcattcaagttcttgttgaaacactggacaaatgcttcagcaatgtctgcgaactcgacattgtgttcaactacagcaagatgcacgcggtgttagatgagattgtatttggaggacaagtactggaaactagttctgctgaagtcatgaaggctgttgaagaaatatcaaaattagaagctgcctcaaattcgatttcacttgtccccaagtctgtttccgggtggcgtggccgttagcttcgaaaaaacttgcctgaataagtcagagaacatgtaacaaaagcttatccaagtcttgatccaaacatgtttgtttaatgagcgtggaatgttgcgtggatgggctcagtagtctaacgtgggcctgtgaattgtaattgggtaacggacggaactgcttgctatttttgagaatgtaacaaaaacgacgagaagttaagatctataaatgataaatgatgtccaaattcagattaaaaaaaaaaaaaaaaa

SEQ ID NO: 1275 - DNA, 1392 bp, Arabidopsis thaliana
  unsure (1)..(1392): unsure at all n locations
  Clone ID: ARATH-23APR03-CLUSTER9822_1
acaacaaaaacataagctaagaaaacgaaactcaactaattttgttatcacccaaaaagaagttcaaacacaatggctttcgctttgaggttcttcacatgccttgttttaacggtgtgcatagttgcatcagtcgatgctgcaatctcatgtggcacagtggcaggtagcttggctccatgtgcaacctatctatcaaaaggtgggttggtgccaccttcatgttgtgcaggagtcaaaactttgaacagtatggctaaaaccacaccagaccgccaacaagcttgcagatgcatccagtccactgcgaagagcatttctggtctcatatccaacaacaaaaacataagctaagaaaacgaaactcaactaattttgttatcacccaaaaagaagttcaaacacaatggctttcgctttgaggttcttcacatgccttgttttaacggtgtgcatagttgcatcagtcgatgctgcaatctcatgtggcacagtggcaggtagcttggctccatgtgcaacctatctatcaaaaggtgggttggtgccaccttcatgttgtgcaggagtcaaaactttgaacagtatggctaaaaccacaccagaccgccaacaagcttgcagatgcatccagtccactgcgaagagcatttctggtctcaacccaagtctagcctctggccttcctggaaagtgcggtgttagcattccatatccaatctccatgagcactaactgcaacaacatcaagtgaaatggaagcttacgtcgccgttttggcgttaagagtatggtttaccagaagtactagaataaaatacggctatatatcttagctgatattaccatgtatttgtttttgtctcaatgctttgtcttattttcatatcatatgttgtattgatgtgctaaaactatgataatagtaccttattagtcaaaaaaaaaaaaaaaaaaaacaaaaaatctcaacaaccgaatcataatttcccaacaggccctcacgcgaatacagctacttccgctcccccgctcccccctcccccttcccccctttcctagcccttgctcttttnnntggcnggggnttaaaangtggggnangggaaaacccnggggnncccaannnaanncggttggngaaanncctttttcccaggnggggtntaangaaaagncccncccnatccccctttccaaaanttgccnaccnnaagggaaagaggaattganngttantttgnaaaatcggggnaattttgtaaanagnnatttttaacaatggccnattggnaaacnnttnaannaaaaaanaccnnngggngggtntnccgttgnaaaaaccccttnaaacgggcccangtaaggggaaacgnttnagggaggcccnng

SEQ ID NO: 1276 - DNA, 3682 bp, Arabidopsis thaliana
  Clone ID: ARATH-23APR03-CLUSTER9832_1
gggagatcacaaagcaatctaaaaacatttctcttgatctttttcctttaccaaaaaacaaagatcctttcttctgtttcgtaatgatggctagaaacgttctagtaagcggtggtgctggatacatcggtagtcacacggtgcttcaacttcttctcggtggttactccgtcgtagttgttgataatctcgataattcctccgccgtctctcttcaacgtgtgaagaaactcgcggctgaacacggcgaacgcctctccttccaccaggtggatcttcgagacaggtctgctcttgagaagatattctcagaaacaaagtttgatgcagtgatacattttgctggacttaaagcagttggtgagagtgtagagaagcctttgctctattataataataatcttgttggtactattactcttttggaagttatggctcaacatggctgcaaaaatcttgtgttttcatcatcagcaactgtgtatggctctccaaaagaagttccttgtacagaggagtttccaatttctgctttgaacccatatggacgaacaaagctattcattgaggaaatctgccgcgatgtatacggttctgacccggaatggaagattatattgcttaggtatttcaatcctgttggtgcacatcctagtggtgacattggtgaagaccctcgtggtattccaaacaatctcatgccctttgtacaacaagtggctgttggtaggagacctcatctcactgtctttggaaatgattacaatacaaaagatggaacaggggttcgagattacattcatgttattgatttagctgatggacacatagcggctctacgtaagctagaagattgcaagatcggttgtgaagtgtacaatctcggaacaggaaatggaacatcagttcttgaaatggttgatgcttttgaaaaagcatccggaaagaaaatccctctggtgatcgcgggacgtcgaccgggagatgctgaagttgtatacgcctcgacggaaagagcagaaagtgaattgaattggaaggccaaatatgggattgaggagatgtgtagagatttgtggaactgggctagtaataatccttatggatatgattcctcttctgaagacaactctcattaacttttcttaatcgttttcttcttttgctaaaacatatttctccacactaaattattatagtatccgcaagaaaaaacaacaacaataaagagtcagattttagggaaatatagggacattatgtattattattacaatcaatacttagtctgtaattgatttggatatgttcttgtataatcaaaaaagatttgttatgaaaaatcataagttaaaaatttagctctatacggcaaaaagtaccttgaggttgacacgacgtcgttttcagctcggtgatagttgaaatgtatctttctgaagcttttaagttcaagagcccacacacttcttctcattctttataaacataacactggacagtaaccaaacttaagatctgaatcaacctcttaagtggtacagaagaagagaaaggaatgatgattagtgaaagagatgattttagtctcactggaccattacacttaacatctatagattgggcaaatgaacatcatcgacgatccgtagctggctctttggttcaaggaatctatgtagctgagcgtgaccgtcagctacaaagagaaggtcctgagttagctttatctccaatatggtctgagttttttcatttccgcctcattcgtaagtttgtcgatgatgcggataactctatcttcggaggaatctatgagtacaaaccgccgcaacagctctctcaaaccgtcaaatcaatggaatttagtccacgttttgtgattgctttcagaggaacggttacaaaagtggactccatttcccgtgacatcgagcatgacatccatgttattagaaacgggcttcacacgacaacacggtttgatatagctatccaagcagtgagaaacattgttgcttcggttggtggttctagtgtttggcttgctggtcattctcttggtgcatctatggcattacttaccgggaaaaccatcgctagaaccgggttttttcctgagtgtttcgcattcaatccgccgtttttgtctgcccctatcgaaaaaattaaggataagaggattaaacatgggatacgcattgcaggcagtgtgatcacagctggacttgctctagccaaaaaagccacccaacactacagccaaaacgaccgtgcattacccgcacctcctgatccatttgaagctttatccgactggttcccgcggctgtatgtcaaccctggtgaccacttatgctcagagtatgttggttactttgagcaccgaaacaagatggaagaaatcgggattgggtttgtagagcgggtagcgacgcagcactcgttgggcggtatgctgttaggaggacaagagccggtacatctgattccatcttcggttttgacggtgaacttaagctcctcgagagatttcaaacaagctcatgggattcatcagtggtggagggaagataacaagtttgagactaaagtttaccagtacaaatgatttgtatcagtttttttttaaatggatttaaccggtattaggcttttactttccggtttagacggttcaatgtatcgcaatcataaataagtgtctctctatagtcggtatatataaaccggaaataggcgtctacgttctaatttagccggttcaatgtgttgtaatcttatatatagtctcttgatcatttgcacggcgacgttccccgttgtctctctagctgatcgtttaggcttaccattcgttcctagctatcttggacaaactgggactgttgaagacatgtttcaaggagtaaactatgcatcagctggtgctggaatcatcttatcaagtggatctgaattgggccagcgggtttcatttgcgatgcaagttgagcagtttgttgatacgtttcagcagatgatactgagtattggggagaaagcttcggaacgtttagtgtcaaactcggttttctacatatcgattggagtgaatgattacatacatttctacatcagaaacatctccaatgtgcagaatctctatactccatggaattttaatcagttcttggcttctaatatgagacaggagctcaagaccttgtacaatgtcaaggtgaggaggatggtggtgatgggactgccacctattggctgtgcaccatactacatgtggaaatacagaagccagaacggagaatgtgcagaagaagtgaacagcatgatcatggaatccaactttgtcatgagatacactgtagataaactcaaccgtgagcttccaggggcatccattatctactgtgacgtgttccaaagcgctatggacattctcaggaaccaccaacactacggttttaatgagacgacagatgcgtgttgtgggctagggaggtacaaaggatggcttccatgcatctcgccggagatggcttgctctgacgcctccggtcacctctggtgggaccagtttcatcctacagacgccgttaacgccattctagccgacaatgtatggaatggtcgccacgtggacatgtgttaccctactaacctagaaactatgcttcattcttaa

SEQ ID NO: 1277 - DNA, 2593 bp, Arabidopsis thaliana
  Clone ID: ARATH-23APR03-CLUSTER9852_1
gatatttataactttggcgaaatctcaaatttccgattactaccaaattcgattccttcatcttcttctccaccatttttcgatcgcagacgaagatctttcaccgattgtgaatggaaatgggagttatggagaatttgatggtacatacggagatatcaaaggttaagtctcagagcaatggtgaggtggagaaacgaggagtgtcagttttggagaatggtggtgtttgcaagcttgatcgaatgagtgggcttaagtttaagcgtcggaaggtttttgctgtgagggactttccaccgggttgtggttcgagagcaatggaagtgaagattgcttgtgagaatgggaatgttgttgaagatgttaaggttgttgagtctttggttaaagaggaggagagtttggggcagagagatgcctctgaaaacgtgagtgatatcagaatggctgagccggtggaggttcagcctctgagaatttgtttgccaggaggtgatgtggtaagagacttgtctgttaccgcgggagacgagtgttcaaacagtgaacagattgtggcgggttctggtgttagcagcagcagcggaactgaaaacattgtcagggatatcgttgtttacgcagatgagagcagtctaggaatggataatttggatcaaactcagccgctagaaattgaaatgtcagatgttgcagttgcaaaaccgaggcttgttgcgggtagaaagaaggcaaagaaaggaattgcatgtcattcatccttgaaggttgttagccgagagtttggtgaaggatctaggaagaagaagagtaagaagaatttatattggcgtgatagggaaagtctggattctcctgagcagcttcggatactaggtgttgggacaagcagcggttcaagcagcggtgatagtagtcggaacaaagtaaaggaaactctacgtcttttccatggcgtttgcagaaagattctgcaggaggatgaagcaaagcctgaggaccaaaggagaaaaggtaaaggtcttagaatagattttgaggcttcgaccattctcaaaaggaatggcaaatttctcaactctggtgtgcatattttgggagaagtgcctggggttgaggttggtgatgagttccaatataggatggagctgaacattcttggtatacataaaccaagccaggccggtatcgattatatgaaatatggtaaggccaaagttgcgacaagtattgtagcctctggagggtatgacgaccatctggataactcggatgtcttgacctacactggtcaaggcggaaacgtgatgcaagtaaagaagaagggagaggaactgaaagagcctgaagaccaaaagcttattaccggaaacctcgcgttagcaaccagcatagaaaaacaaacccctgtgcgtgtcattagaggcaaacataagtcaactcatgataaatcaaaaggtggaaattatgtttacgacggattatatcttgtggaaaagtattggcaacaagtcggatctcacggtatgaatgtcttcaagtttcaacttaggcgcatacctggacaacctgaactttcttgggtagaggtgaagaaatctaagtcaaaataccgggaaggtctatgcaagcttgacatctcagaagggaaagagcagtcacccattagcgctgtgaacgaaatagacgacgagaaaccgcctttgttcacctacactgttaaactgatttacccagattggtgcagaccagttcctccaaagtcatgctgttgcaccacgcgctgcaccgaagctgaagcgagggtgtgcgcttgtgtggagaaaaacggtggagagataccgtacaacttcgatggagccattgttggtgcaaaacctactatctatgaatgtggcccactctgcaaatgcccttctagttgctacctaagagtcacacagcatgggatcaagttaccgcttgagatcttcaaaaccaagtcaagaggttggggagtgagatgtcttaagtcgatccctattggtagcttcatatgtgaatacgttggtgaacttttagaggatagtgaagcagaaagaagaatcgggaacgacgagtatctctttgatattggtaacagatatgataactctttagctcaagggatgtcagagctaatgctggggacacaggcaggccgatctatggcagaaggtgatgagtcgagtggattcaccattgatgcagcaagtaagggtaatgttgggaggttcataaaccatagctgctcgccaaatctgtacgcccaaaacgttttgtatgatcatgaagactctagaatccctcacgtgatgttcttcgcacaggacaatatacctccgcttcaagaactctgttacgactacaattacgcgctcgatcaggtacgtgactctaagggtaatatcaagcagaaaccttgcttttgtggtgctgccgtatgtaggcgtaggctctattgatagatgattcgcctccaacttttatctctgtgtcattatgattctttcttgttttcatttgtattgtctaatgaatataatgaacttgatgaaaaaaaaaaaaaaaa

SEQ ID NO: 1278 - DNA, 1870 bp, Arabidopsis thaliana
  Clone ID: ARATH-23APR03-CLUSTER9862_1
gttccccgccccggaaccccacaccccccttggccccgccccccagagcccccgtaacccggtgcctggcccatgacacaaataaaatccggggggactcccccaaaccaaaccttcccttcccccaaaaacctttgaacgacaccccaaccgccgaaaaactcgccgactaacagcaccacctggggcagagcccccaccggcgacaagtggtcaaagccaccgccccccccccctgacgcgaaactggggacaccagcagccaatcgcacgcagacgcaatctctctatatataaattcctctgtctttcaagtttcagagcaaactttcagtagatctatcacacgccttgaccctctcatccaacggtcattattcactccaaacccactctgcttcttcttcttccaaacatctctcagcagagctaaccatctctcttttgtaatggcttcacttatttcccttgttcttcttcttttgctcactttatcttcagcagagtccaagactttctggggtgacgtggcagctctcaaagacttcaagaactcagtggatgccaaatccatgagtccaggctcttgcctgagttcttgggatttctccgtcgatccctgcgacaatatattcagcgacacattcacttgtgggttccgctgcgactccgtcgttaccggatcgggtcgggtcacggagctcagtctggaccaagccggttactcaggctccctctcctccgtctctttcaaccttccttatctccagaccctcgatctctccggcaactacttctccggtccacttcccgactcgctctccaatctcacccgtctcacccgcctcactgtgtccggaaactccttttccggatccatacccgattcagtcgggtcaatgacggttcttgaggagctcgtgctagacagcaaccgcctctacggctccattccggcgagcttcaaaggcctttccagcctgaaacgactggaaatccagctaaacaacatctccggcgaattccctgatctgagctcactcaaaaacctgtattacctcgacgcgagcgataaccgcatctccggtcggatcccatcatttttacccgaatctatagtccaaatctcaatgcgaaacaacctcttccaaggaacgatccctgaaagcttcaaacttctaaattctctcgaagtaatcgatcttagccacaacaaactcagtggctcaatcccatcgtttatcttcactcatcagtctctacagcagctaacactctccttcaatggcttcacctctttagagtcaccctactattctcccttgggtctccccagcgagctcatatccgtagatctcagcaacaatcagatcctcggtgcgttacctctgttcatgggtctatcaccaaagctctcagcattgtcgttagagaacaacaagttctttggtatgattccgacccagtacgtctggaaaaccgtatcgcccggatccgaattcgccgggtttcagagacttttactaggcggaaatttcttattcggagtcgtaccgggtcctttgatggcgttaaagcctggatcagcgaacgtgcagctcgccggaaactgcttctcatggtgtccggcgacgttattcttctgccaaggacaagaacagagatctccgaaggaatgtagaaagtttagccgcgtcgtcccgtaatcttctctttccttgttagtatccggtccggtcgagtttttccggcaattgcttaacccgataattgcatcggttaaattgtgattaatttaataaaattgccgtttggagagataaaaaaaaaaaaaaaagactcgagggggggccccggtacccgggcgggg

SEQ ID NO: 1279 - DNA, 2759 bp, Arabidopsis thaliana
  Clone ID: ARATH-23APR03-CLUSTER986_1
gtcgactgaagtgtgaaggtggagattatgtattcacttgttgatttggtatacattctatctacggttccattcgttacgttcggtacttataatgtcgtaatttacactgcttgggtcaaaatggtttccttcgctccggtcaatacggtttccctgttaaacccggcctagatatgctcttatgaccagcgcgccacatctatggctacattcgaggagacgtagaggtttagagtgaatgcagacgtggtcgttattggagtgagctgaggcaagtgaaaccgagttgccttaatcttaccagtgctggtttttgatacggtctgagatggtaaagttgtgtctcgatccgttgatcactatgaccaagatcctccgtgataatgaacagatgcgagatgggagagatcacactcatgctgcctaccccacctttatcctcaacaatctcacctttatctcccaaaacatcctcaaaaatctcaactttatctcccaaaacacaaaacaaaaaaaaatggcttccactgctctctcaagcgccatcgtcggaacttcattcatccgtcgttccccagctccaatcagtctccgttcccttccatcagccaacacacaatccctcttcggtctcaaatcaggcaccgctcgtggtggacgtgtcacagccatggctacatacaaggtcaagttcatcacaccagaaggtgagctagaggttgagtgtgacgacgacgtctacgttcttgatgctgctgaggaagctggaatcgatttgccttactcttgccgtgctggttcttgttcgagctgtgctggtaaagttgtgtctggatctgttgatcagtctgaccagagtttccttgatgatgaacagattggtgaagggtttgttctcacttgtgctgcttaccctacctctgatgttaccattgaaacccacaaagaagaagacattgtttaagcctcacctactcaccagcttttgatggtttaaaaatcatgtctttataaatttcacattttgggttgagtttgttgttactaaaaactattgttatctgttgttattgttcctggtttggctcaccatcaatcgatgacattttaaactatgcaactgcaaattctgcaacactttcgatgagaatctaacattatcgtttaaacattggaaatacattttcttgaagtctagctagctttggtttgtagttcttattctgaactcaacaatcatcaaagtatcaagaaaaatcttttttgcgagcaattgtgaaatcttagattgataaattctctagaaagaactatacatgttatttgtagctatagaagaaactatggaatcttatactctaattaagcccaaatggcaagagaagacatgagtccagctcctaggaacaacattacataagatacaatttgaagcctaaagttacacctcatttttgtactcaagaaatcagcagctatgagatccactaaagccatgtacacaagaattccggctgagagcgagtccaagataccttcagtgaccaatgctccgacactgtgagaattgaaagacgacgccactgcggttccaatcccgatccctatcggggttgtgagggcgaaaaaacaagccattatggtcgctgatttgttcctgaattgcgcttgggagatgcatccaccgagcgcaaatccttcaaagaattgatggaaggatagtgctgcgattagaggccggattgtgcaaggagactgagatactccaagggatagaccgatgattatggaatgtgacacaattccaagctccagaacctgagaaacaacgatatgcctagctccattaacagcatccaaacccccgtgtacgtgtccatgtccgtgtccatgcccgtgcccatgagcatgagcatgaccaatgtcgattttactgtgtccttcacatgaatcatgaccaggaggatgactatgtctatgatgagcagcatgagcatgaatgccaacaatgtgaatcccaccactgtcttcttcaccaaacactttcccatcattcgttccttctccaatcatgggaacaacaatacccggtgattgttcacggccaaacggttcaacagactcactagcttccctctcttgcttccgttcatagtactgagtccccatgaaatccacaaacagagtgatcaaagcagcaatcatcgcaaagaatcccgggaaaggaaacttagaccaagggaaatccggtaagcacgggttcttcaaagcttccgtgccacccgccaacatatgaacaaaacccgtggcgagaatcacaccagctgcaaaagctttagcagtcacaaagagattaccatcagtttgaaggaaacgacggttcctgccaatgagtggtatagttacaccagcagctccagctaagagaatcgaagcaatggctacaaatttaagtagaaatgcagcggaatcatcacgacaaagatctgactcgctagcattgcaaaggacgttagatgaagtagcagccattgcctcaggaactatctgcaaaatggactctgttgctgagagagactgtgtttctgatccgaacaagtatagaggaaccagtttccaaagaacatcgacgaagaacatttggggtctaagatgtcctcgggatcatgaaaagtgaagaaataacgtaggattctcgcaatccgaaaaaacacgaatgggaattaaaaaaaaaaaaaaaaaaaaagggcggccgc

SEQ ID NO: 1280 - DNA, 1081 bp, Arabidopsis thaliana
  Clone ID: ARATH-23APR03-CLUSTER99365_1
atcatcttcattttctctataggtttatgagaagctaaagctatgatgatttctttaatcaaaatagcttagggttttggagagagattactaagaaagttttaatgtttgtttaagagaaaagttatatattagggttttctttattcagaagcttcaagatcagaaaagatggaagttagagagaagaaagatgagaaaatggagatgacaagaagaaaatcatcagctctagatcatcatcgtcttcctccgtacacttactcccaaaccgccaacaaagagaaacccaccaccaaaagaaacgggtcggacccggatccggatccggatcttgatactaacccaatttctatatctcatgctccaagatcatacgctaggcctcaaactacttctccggggaaggcaaggtatagagaatgccaaaagaatcacgcggcgagctccggtggacacgttgtcgacggttgcggcgagtttatgtcttccggggaagaaggcacggtggagtctcttctttgtgcagcttgtgattgccaccggagcttccatagaaaagagatcgatggtttgtttgttgtcaatttcaatagctttggccattcacagagaccactcggaagccgccacgtgtctccgataatgatgagttttggtggtggtggtggttgtgcggcggagtcatcgacggaggatctaaacaagtttcatcaatcttttagtggttatggagtggatcagtttcatcattatcaacccaagaaacggtttaggacaaagtttaatgaagaacagaaggagaagatgatggagtttgctgagaagattggttggagaatgacaaaactagaagatgatgaagtgaatcggttttgtcgtgagattaaagttaaaagacaagtgtttaaagtttggatgcacaacaataaacaagcagcaaagaagaaggatttgtaagagatttctatatatatatatatactatttttacttctctttgttcaacattgctttaacttaaagactttgtgtttattgtataacaaattgattttagagcccaaaaaaaaaaaaaaaa

SEQ ID NO: 1281 - DNA, 1053 bp, Arabidopsis thaliana
  Clone ID: ARATH-23APR03-CLUSTER9938_1
gagccaatcctgttgttagagaaccgctccccatccccaccctcttacccatctcgcattaccaatttcgatcgtcatcttcgtctccttcactcctagaaaacgttggaaccctaatcttcttagaaatttcaatcgaatctgaagaactagattacgggattaaagcgaggtagaatcgaagacgatggcagggagagaagttaaagaatacacaaatctgtctgaccctaaagataagaaatcagggaaaggtaagattgatgatgaagacgtcacctttcaacgaatggttgcaaagagataacggccccgccacattttctggttattgcatatagttgcaagaggttgctggtgaacgtggaggctatcttcatggacgaggcgctttagatagcgacgatttactttatctgaaagaacagatggaagcagaggaagatgcagaacgtcttctgagacgaactgagaaacgggcttttgctgcctttccaagctgattcatctccagcatctattcccttgccacttcgtgtggagcccaaaccaaagagtggtatcaggcagcaagatttgctgaggaaagttgtagaggttaaacctaaacgtccaaagatctcaacaccatcaagcccaagcttatctccccctgttagaagtgatagaggtccaacagaggcaaaagttcacagagataagcagaaagaagaagctatgccagtgttgaagaaacctggcgcagacagaaatgacggaaaagctacggaaagcaatgggcaaggtcaaaatgctccgaaaggcttgttgggattagcatatgatagttcagatgaagaagactgagtggagtgataaccctgcaatctcctataagtcttcttgctttttattttgtcgaaagcttacaagagtttagctttaggatacaatacatcttttgccatctagccctgtacttgttgtaattgttgaaaccaaatgggttagttggagtttgaactttgaagcagagaatctaaagaagatgatttccaaaaaaaaaaaaaaaat

SEQ ID NO: 1282 - DNA, 831 bp, Arabidopsis thaliana
  Clone ID: ARATH-23APR03-CLUSTER9948_1
atcattctcatcaaaagctatggctactctccaaataccttctgctcttttaagatctttccttcttatgttttgtctctttgtaatcccatctctctcatctgattctgatcctttacaagacttctgcgttggcgatctcaaagcttctgcttccatcaatggctttccatgcaaatcagccgtttctgcttctgacttcttctactccggtttaggtggccccttagacacgtcaaaccctaacggagtaaccgttgctcccgccaacgtcttaaccttcccgggtctaaacactttaggaatctcgatgaataacgttgagctagctccaggaggtgtaaatccgcctcacttgcacccgcgtgcaaccgaagtaggaactgtgatcgaaggctcggtgtttgtcggattcttgagtaccaacaacactttgttctcaaaagttttgaatgcaggagaggcgtttgttatccctagaggattggttcatttccaatggaacgttggccaagtgaaagcgcgaatgataaccgcttttaacagccagctcccaggagcagttgttttgcctagtactctgttcggctcgaaacctgagattccaaacgcagtcctgaccagagcgtttaggactgatgatacaactgtgcagaatctcaagtccaagtttgctgtttgaatctttttatttatgttttctaaaataatctttcacaataagctttatagcaatattggtatacacttgtctctgtaataatcggtatgaatattcgaaacaaaacaataataagattgatctctttctctctcaaaaaaaaaaaaaaa

SEQ ID NO: 1283 - DNA, 1398 bp, Arabidopsis thaliana
  unsure (1)..(1398): unsure at all n locations
  Clone ID: ARATH-23APR03-CLUSTER99570_1
tttttttttttttttttggacatagaaacacatttatatactgcttcctaccgttgagacaatctgagagagaggaaccaaaacaacgaaaggtccaaccttgataaacattaacatacttatcttcttcttaactaaaatatttacccacaaattaataaaacaaaaccctagtttttttttgtttgcgcttcagttgatctgaacagtccacgtcattcagactaaaaaaggtaagccgacggtcacgatgtatccacgtcatcatcaccacacaaaaatttccccaaaaaagaagagatttttaatcgaaagagtgatgatgatggtcgaagaaatgatccacatcccatggagaagactcgaaatcatcaatcaaaccaaactcgaaatcttcagtttcgttttctccttgtttcgaaacctctgtgtttggtaacaacgttgattggattttggtttcttcatcgagaaacaaaaggtcaggggcaatttcggtatcccaaaaacattcgccggcgagagataaatccggtaacagatacggatccgggaacaccaaacccgccgacgattcttcttcttcttttataaccgtcgactttctctcggagatagctcgatcgcttcaatctcatgctctgtttcctcgttgacgttgaatcttagaacagaggtcggtgaatgaaggctctgccgagaatctctaccgtaatcgcaggcggaaaccgtttggagatcgataaccggcgttggcgtcggcggagttaggaaattcgtgagcgctttaggtcctttgagatgaatcgcggctctatcgtacgctatagcagcttcctccgccgtgacaaaagtcccaagccaaatccgagtacggctcgacggatctctaatctccgccgcgaattttccccaaggtctctgtctcacgcctctgtactttttaggcttcaccgacgtcgacacgtcatcttcaaccactacgctttcctcctccttgtgcttacctttcctcgccgcggtggaggaagaagattcaccttggcagaatctaatctccttcacgtatcgtttcactcttggaaccaccgtgacgttgttgttgtcgtcgtcgtcgctagacgagtcagtagcgaaaggatcagtaacagtgatacggaccagtctcggagacccgttagatggtgtagctgctacgtttgtgaccgtacgattctctgtgaacttcactcgtctcgttcgtctctccatagagagagagagagagggagttaaaaaatgaagagaggtttttttcactgttttgaatttgcagagagagagagaagaagagtcaaaaggttttttgggtggggtggcctctagtgaggtctccggcgaattctgncagcccgggga

SEQ ID NO: 1284 - DNA, 1319 bp, Arabidopsis thaliana
  Clone ID: ARATH-23APR03-CLUSTER9_1
cgaaaactcacacacacacacacacactctgttttcttcgtccattctattaccagaaaacagagtttgatagagagaaaagaatggaactgtcgactcaaatgaatgtgttcgaagagcttcttgttccgacaaagcaagaaacaaccgacaacaacatcaacaatctgagctttaatggcggatttgatcatcatcatcatcaattcttcccaaatggatataatattgattacctctgtttcaacaatgaagaagaagacgaaaatacccttttgtatccttcttctttcatggatctaatctctcaacctcctccattgcttcttcaccaaccgccaccgttacaaccactgtcgccgccgttatcctcctccgcgaccgccggagcaacatttgactacccttttcttgaggctttgcaagagataattgactcttcttcctcatcgcctccattgatccttcaaaatggtcaagaagagaactttaataatccgatgtcgtatccctctccattgatggagtctgatcagagcaagagcttcagtgttggttactgtggaggagagacgaacaagaagaagagcaaaaagcttgaaggccaaccttctaagaatctcatggcggagagacgacggagaaaacgacttaacgatcgtctttctatgctccgatccatcgtcccaaaaatcagtaagatggacaggacatcgatattaggagatgccatagattacatgaaagagcttttagacaaaatcaacaaattacaagatgaggaacaagaacttggaaatagcaacaattcacatcactctaagctcttcggtgatctcaaggatcttaatgcgaacgaacctctggtcagaaactcaccaaagtttgaaatagatcgtagagacgaggatactcgagttgatatatgctgctcgccaaaaccgggattgctactatctactgtgaatacattagagactctaggcttggagattgaacaatgtgttataagctgctttagtgatttctctttgcaggcttcttgttctgagggagctgagcagagagatttcataacatcagaagatataaaacaagcattattcagaaacgcaggttatggtggaagctgcttgtaatgagtcatgattgaaactaataaaccaaaactattgtttatttctaataatactagcgcttataaactttagatgttgttttaattcccttgtgagtttggtttttttttcctaggggaaaacattatgagttcagttgtataaacaaaagaaggaaatttaaaaaaaaaaaaaaaaact

SEQ ID NO: 1285 - DNA, 1238 bp, Brassica napus
  Clone ID: BRANA-23APR03-CLUSTER10133_2
agagagagattattacacattatagtcgatgatatgacaacatctctgctgcttctcagacattcctcctcacctgctgtcttcttctcttcctcttctttcgtcttcgccaagaacacaaactcttctcgttccttcgcttccatcaagatggaacaaaacacggcgaagaagaaggtcttcgtcgccggagccaccggacaaaccgggaagagaatcgtggaacagctcttatcccgtggcttcgccgttaaagcaggcgttcgcgatgtagacaaagcgaaaacatctttcagacaagacccatctcttcacttcgttaaagctgacgtgacagaagggtcagagaagctagccgaagccatcggcgacgacactcacgccgtgatctgcgctactggcttccgggttcgatctcttcgctccttggaagatcgataacttcggaacggtgagcttggtggacgcgtgtaagaagcgaggagtgggcaggtttgttctcgtgagctcgatcttggtgaacggagctgcgacgggacagattcttaacccggcttacatcttcctcaacgtctttgggcttactttgatcgctaagcttcaagctgagaagtatatcaaaagatctggcgttaactatactattgtgaggcccggtgggcttaagaacgatcctccttcgggaaatgtagtcatggagcctgaggatacgttgtctggagggagcatatcgagagaccaggtggctgaagttgcggtggaagctttgcttgatgaggaggagtcttcttacaaggttgtggagattgttgctagtgctgatgctcctaaacgttcttacaaagatctctttgcttcggttaaaggacattaactaacgagaatcacaatgtaatgatgagtcttatgctctattacagaatatttatttctcttactgtcttgagtacaacaacaacaacaaacagagatacataagcttctaacgcatagaccgagttttattcagttcttaagaaccggttaatggcgcttgttcccggttgcttgctcccatgagttcatgacgtggttgactttttcctcaaccccaagcccatgatgcttcgcctgaattcactgttttcacttcccatatcttggtaaaatatgaagaagtatgttgtttagtaaaatatttaaatgattatagtgatagtataaaacacaaaataaaaaaaaaaaaaaagggcggccgc

SEQ ID NO: 1286 - DNA, 739 bp, Brassica napus
  Clone ID: BRANA-23APR03-CLUSTER10414_1
aattgtttaaaaaaactaaaaacagatctagagagagatctagagaggtgtgaaagtaagatagatcgaagacgatgaggagctctgcatcatccgcgatgaaagctgctggagttttggttctccttgccgttttaacatcagtttatgcgaagaagtcaggtgatgtgacagagttgcagattggtgttaagttcaagccgaagacatgtgatgttcaggctcacaaaggggacaagatcaaggtccactatcgaggaaagttaacagatggaactgtgtttgattcaagttttgagagaggtgaccctattgagtttgagcttggaagtggtcaagtcattccaggatgggaccagggtctacttggagcttgtgtaggtgagaagagaaagctcaaaatcccgtccaagcttggttatggtgacaacggctcaccaccgaaaatccccggtggggcgacattgatattcgacaccgagctagttgctgtgaacgggaaaccatccggcgatgcaaaaacgaagaatgagctttgattgcatccatctccttcttaatttctcatgaaacatgttaagtcgtgttcagcatttgaatctgaaacatgctagagactagactcgttactttttggctagttaaggacaataattgcctgtatggtcataatactaaaataacaaggtgttggcagttggaaaataacgtggaagcgcaaaaaaaaaaaaaaaaaagc

SEQ ID NO: 1287 - DNA, 1169 bp, Brassica napus
  Clone ID: BRANA-23APR03-CLUSTER10529_1
aatttcgtttctagggttttgatttgattcgattccaagtcagcaacgaatatctcaagctccggaaggacaaggattagtgttgatggcagctttgcaaatgtctcgtgaatggatcggtattcagcagttcccacctgctactcagtctaagttgatcgagatccttaacaagttcaaagaagaggatgtgagctcgctgacagtacttgtaatggggaaaggcggtgttggaaagtcatctactgttaattcagttataggcgagaaagctgctgcagtcagtactttccagtctgaaggactgagaccgtccttggtctctcgctcaaggtcgggttttacgttcaacatcatcgacactcctggtcttattgagggaggatacgtgaatgatcaagccgtcaaccttataaaaaggtttctcctgaacatgacgatagatgtgctgctatacgtagacagtttggatgtgtatcgggtggatgacttggataagcaggtagtcacggctataaccgatgcatttggtaaagagatatggaagaagtctgctcttgtcctcagtcatgctcagttctctccaccggacgggttaaactatgatctctttgtctccagaagatccgatgctcttctgaaactgatccgtgctagcgctcagctgaagaaacaggatattcaggattcatctattcctgtcattcttgttgagaacagcggacgatgtcataagaatgagagcgatgaaaagattcttccagacggaagtagttggattccgaatctgtacaagacaatcacagatatctcctttaatggcaacaagtcgatccacgttgacaagaaactggtcgaaggaccaaacccaaacgcaagaggaaaacgactaatcccattaatctttgcattccaatacctgctagtgatgaagccactggttagagcaatcaagtccgatgtctccagagagagtaaaccggcgtgggagatgcgcgaatccggttcagcaagtcgaaggtcttaaactcgggctttcttgagaaaattcccgtagtcgagttattatatgttttcacagattttaactgcctgtaacgacattgtaagctttatatgtattggtcctccttttgcaaaaaaaaaaaaaaaaaaaaaagggcggccgc

SEQ ID NO: 1288 - DNA, 752 bp, Brassica napus
  Clone ID: BRANA-23APR03-CLUSTER10530_2
ctcctccttagctcatctctcggcgcgatcagatctcgaaaaacactaaatcatatcgaatccacaacatgactcttggcgctggaggatcgagtgttgttgttccaaggaactttcggttgctggaggagcttgaacgtggggagaaaggtattggagatggaactgtgagctatggaatggatgatggagatgacatttacatgcgctcttggactggcaccatcatcgctcctcacaacactgttcatgaaggtcggatctatcagttgaagctcttttgtgacaaagattaccctgagaaacctcccaccgtccgcttccattcacgtatcaacatgacttgtgtcaaccatgaaacaggagtggtggaacctaagaagtttgggcttcttgcgaactggcaaagggagtacacaatggagactatactaacacagctgaagaaggagatgtctacgtcgcataaccgtaagcttgttcaacctccagaaggcacttgcttctagtagctcttggtttgttcaaaatctttgccccttctcatactgaagtatgtatctgggggtactccattgtcgttctcaagcttttttcttctaaatttgtgataaaaaaaaatggtctatgtggatggtggtgatgatgttcgattgatcatctgaagtttatccttgtgtgcaaattatccaaaaaaaacagcgtcttccccaatccatgtgttcaatctcttgaattttacttggtttatg

SEQ ID NO: 1289 - DNA, 639 bp, Brassica napus
  Clone ID: BRANA-23APR03-CLUSTER10549_1
ctaaaaacttgctcacgaagaaaaaaaaatcgccgagtcagatctcaatcgcaaaccgtctccaatggctctcgagtgggttgtcctaggctacgcggccgccgccgaagcgatcatggtgatcctcctaacgatgccaggactcgacgcgctccgcaaaggcttgatcgccgtcacgcgcaacctcctgaagccgtttctctcgatcatccccttctgcctcttcctcctcatggacatctactggaagtacgagactcgtccctcctgcgacggcgactcgtgcaccccttccgagcacctccgtcaccagaagtcgatcatgaagtcccagaggaacgcgctccttgatcgcgtcggcgcttgtgttttactggattttgtattccgttacgaatcttgttgtgaggatcgagcagcttaaccgagagggttgagaggcttaggaagagggaggaaagccgaagagagagtgacgcctcttcggtctcttcgatgcgctgatttgatgtcctttcttcgtttttttatgtttgcttttatcttgcggagattgtaaggatctatgctatctcttatactttagatcaatcctctgaggttagtctatgaatcttgacatagttttatcacttaaaa

SEQ ID NO: 1290 - DNA, 964 bp, Brassica napus
  Clone ID: BRANA-23APR03-CLUSTER10589_1
acttctattcctcaaatagatctcaaagggagaaagtgaatcggaggtcgaggagacagaggagcagaggaagcagcagcggatacgatcgccgaagaacaattctccctaccgaagtacgccttccgcaaggtgaatattccttcaaagacgtggaattcactgccatcaaagcagccggaatcagatccatcgatgttcgaggaaacgttacagtatgcgtagttacccagaagaaagtacccgacaagcttctagatcactcatgcgtatctcaccttttccctgtcaccaagtacacttggcttgttagccacttggcatgactagctgattcagggtcatttggtcacggcaagcaaggaattgaggcacctgagtttaggttccaatacggatacgagatgcctgccgacatccttgctaaatggattgcagataagtcctaggtcgatactcctcgggcttgctggagagctcttggtgtagttgccatggtgctgggtatggacgaagagagaggacccctgctttacaagtgtgacccagctggtcacttttacggtcacaaggcaactagtgcaggtatgaaagagcaagaagcaattaatttcctggagaagaaaatgaaagaaaaccctgccttcacttatgacgaaacagtgcagactgccatatccgctctgcaatctgttcttcaagaagacttcaaggcaactgagattgaggttggagttgtgagagctgataaccccatcttccgttcccttgaaacagaggagatcgaggagcatttgactgccataagcgaacgcgactgatcactttgaatcaatcagactttgcattctcttccttttgctttcaactctttctaagaacattcacatctcagataaaacatgttttcatgagtgttatgaatcttgtggtttccaaaaaaaaaaaaaaaaagggcggccgc

SEQ ID NO: 1291 - DNA, 1044 bp, Brassica napus
  Clone ID: BRANA-23APR03-CLUSTER105_1
aaacagaaacctaaatctagaaatctttcatttttatctcactccctgacatccaaatgtgaaatgataaagcgtcttgtcccaacgttacctccacatccaggtgcagcgagtcatccagcctgctaaccccaagcgcagaactcctcctccccgagaacgcctccttgctgaccccacgcaaggttgtagcagggggtcatgattaaagggagaaagatggcagagtaattccggtctatgtcaaagaaggcgagactcaccttattcccgagtacggagggccttatgacgagctcgccctgagaggcgaagacctcttccgggatgagtacgactagggaacgttccacgaggaatgagtcttctcccctcagaaacgagcgtgcttctttggcgaccgtcctatggttgttaactctactcattattagatgtttttcccgttgcgtttaaacttatttgattataattgaaattcagaattctaacacagctaatccagcatatttttatgtcagagtttcgcaggacatgaagtgcgttgggatgcagtacctcgaggccatacgcaagctccaggcttctggaaaaccgagagcggcatcctcctccctgagaaagcctccaagctgaactcgggcaaggtgatagcagttggacctggatcaagggataaggacgggaaattgattccggtctctgtcaaggaaggtgacactgttcttcttccagagtacggcgggactcaggtcaagctcggcgagaaggagtaccatctcttccgtgatgaggacgtcttggggacgttgcacgaagattgagaaggctaagtagctacgagtggcggtcttgttggcgttttatgttatgggaagagaacaagcaacttattttattaagtttatctttgaatgtggttggacatgtcattgaaattttaccttaaatggactatcttaatcccctatgagtcgttcttgtttttccaaatggtcatcaatcttaagagaagttaacttgaaagaaaaaaaaaaaaaaaaa

SEQ ID NO: 1292 - DNA, 676 bp, Brassica napus
  Clone ID: BRANA-23APR03-CLUSTER10701_1
acatccctctgtatttgccatttctacgcttggccgctatcgctggaacattccgattatccacagaagaagcagagcagaacattccgattaaccacagaagaagcagagctgaggaagatgtcgtggcagacttatgtagacgatcacttgatgtgcgatgtcgaaggcaaccgcctcaccgccgccgcaattctcggccaagacggtagcgtctgggctcagagcgcaaatttccctcagttgaagcctgaggaaatcagtggcatcaacaaagattttaatgagcctggaacgcttgccccaacgggattgttcatcggtggcacaaagtacatggtcatccaaggagagccaaatactgttattcgagggaagaagggagctggtggtgttaccatcaagaagaccacacaagccatggtctttggtatctatgaagagccaatgactcctggacagtgcaatatggttgttgagaggcttggtgactacctgattgaatcagggctctgaaacccatgctgctgctatgttgctgtcgctcatgctgtctttatattgagagaaaacctatttatatatcgaatgtgatcaaatccttttaatagtccaactgtgtattaccccttacaaggggttgtatgattttataataaaattttgtaatttcctt

SEQ ID NO: 1293 - DNA, 1633 bp, Brassica napus
  Clone ID: BRANA-23APR03-CLUSTER107_1
aattgaacttcgttaccaaaaatttctttccaatcttcaatcggaaccctggctgcaggcggagatccgacgacttccttctcttctgccctcaccaaatctccccccttctatctccccctccccgccgcttcttcctcctccgacccccgctccgccgcagcagccgttttcgccgcgtcgacaccgcgccgcggcggagaagtcgtcgccgccgtcctctccccccccggcgggagggagatggagcacgtggtggcggcggagctacggcggggggagaagaaggaggtggcggcgcagctgcgccacgtggtgatctcgtccatcgtgcagcggatgctggtgctgatgagagaatgcgcggttctccacatcggcgtcttcatcggactccccgtcgtccacgaacctcatgtcaacatgtcgcttcctaacgacgtcgccgtcgtcgacatgtacgggactatcgtggccgtcctcaccgacattgagatttacaagcatcccaaggaagagcggatagccagaacatggggtacgaccgctccaggtttgccttacgtagatgaagccataaccaacgctggaaactggctcatcgggggtgaccttgaggttctagagccagtcaagtacaatgatggccttgaccgtttcaggctttcccctgctgagctccgcaaagagcttgagaagcgcggcgcggatgccgtctttgctttccagctcaggaacccggtccacaacggtcacgcacttcttatgactgatactcgtaggagacttcttgaaatgggttaccaagaaccctatccttttgcttcatccgttagggggtacacaaaggctgatgatgtgcctctaagctggaggatgaagcagcacgagaaggtgcttgaggacggtgttcttgatccagagaccacagtggtttccatattcccatctcctatgcattacgctggtccaacagaagtgcagtggcacgcaaaggctaggatcaatgctggtgctaatttctacatagtgggtcgtgatccagctgggatccgacatccagttgagaaacgtgatctttacgatgctgatcatggaaagaaagtgctaagcatggctcctggactcgaaagactcaatatccttcctttcaaggttgctgcatatgacaagacacaaggcaagatggctttctttgatccgtctaggcctcaagatttcttgttcatctccggcactaagatgcgcacgttggccaagaacaaagaaaaccctccagatggattcatgtgtccaggtggatggcaagttctggtggattactatgacagcttgactccggcaggtaatggtagactaccggaagtggtttctgcctaagacaaagaaactatctctggctttgggttgtgggcctggtggcgagagtcatattgtggtataggacaagcctatatataaagactccttttcttttaccaaagttgtaatacttgatccaactaaaccgtccgatgaacttgtagtaccataaccaaacgattgtgtttatatgaaaacaaacgcagctttgctttttctatgcaactttcataaaaatataagaatctatgccgttgaataaaaaaaaaaa

SEQ ID NO: 1294 - DNA, 1487 bp, Brassica napus
  unsure (1)..(1487): unsure at all n locations
  Clone ID: BRANA-23APR03-CLUSTER108_1
acacaaccaaaacacgagaagattttattcgattttatctgtcatttgcttcagctgttactatcgaccaatctcggtgttcgtagccatgagtcttcttacagatctcgttaaccttaacctctcagagacaactaaaaacgagaagattttattcgattttatctgtcatttgcttcaacttgttactatcaacaaatctcggagtttttcgccatgagtctttttccagatcgacgttccaccttagcatcatagtagcccactgaaaaagtcattctcctaattaaatatgggttggcggttcaggaatggatatgagatgcaaaaccacattcttcctggaccagtaagagacccttcgttagctacgaaagtgaaactaatgatggctcaagcacaggcaaagcaactggtaaacacaggaagcatcatataccctcaacccaccctcaaagatctgtccgtagaggcaataacattcttgtcatgtgcgatgcttacactccagcgggcgaaccaatcccaacaaacaaaagacacgctgcggctaaggtctttagccaccctgatgttgtagctgaagtggccatgatatggtttgcgaccatcaaaacggcatgcgggcggccaagatctttagcgacccaacccgttgccgcccgaagaaacatggtaaggtaattgagccacaacatactatgttccacaagcttcctaacgctgccatccaatattagcgcgccctcaaccgagacgtcctccccggccaccgggacttccaagttggtccagctgttggcatctcggccggtgatgaaatttgggtcgcacgtttcattttggagaggatcacagagattgctggtgtggtggtatcttttgacccaaaaccgattcccggtgactggaatggtgctggtgctcactgcaactatagtaccaagtcaatgagggaagatggtggttacgagattatcaagaaggcaattgataaactgggactgagacacaaggaacacattgctgcttatggtgaaggcaatgagcgtcgtctcacgggtcaccacgagactgctgacatcaacactttcctctggggtgttgcgaaccgtggagcatcaatccgtgtaggacgtgacacagagaaagaagggaaaggatactttgaggataggaggccagcttcgaacatggatccttacattgtgacttccatgattgcagagaccacaatcctctggaaaccttgatcagatcaaagaagcttgttgaagaatgttcactccgtttgggtttcttgcatggttcaacgtttgtgtgtttctctatcaagcattgtctcagagcaagtcaagagatttgctttgttcttatggcttttattgtttcacatccattgaaaacatctctttgtatcaatttatgaataaagtgtggtttggttctaaaaaaaaaaaaaaaaaaaaaaaagggcggccgcntag

SEQ ID NO: 1295 - DNA, 785 bp, Brassica napus
  Clone ID: BRANA-23APR03-CLUSTER10903_1
actcacctcgtcggctctgccaagaaaaaaaagtctctatctctctcattcgcgggagttatgggagaagggaaaggctctactcttgttttcatcctcgtcatcgccctctgtttagtcgccttcggcttctccatcgccgccgaacgccgccggagcattggaaaaagtatacaagacccaataacaaatgcaacgtactgcgtttatagctctgatgtagccactggttatggagttggagctttccttttcctcctctctagtgaatcattgcttatgggtgtcaccaaatgtatgtgctttggtagacctttatcccccggaagtgaccgtgcttggtctattatctatttcatctcttcttggatgacgtttctggtagctgaagcttgtttaatagcgggagcgactaagaacgcataccacacaaagtacttgagcgcacaagccttctcgtgtgaatcgttacgcaaaggaattttcattgcaggagcagtttttacggttgcaactatgatccttaatgtctactactacttccactttaccaaatctgtctcttctccgcctactcacaaagctaaccgctccggttcaaatatcggtatggctggtggctatgcatagaagaacaaaaaaaaaagagaaattgattagtcatttgtgggatgtaagaaaagaggttgttgcattgttacaatgggttactcttacatgttttgtttgttatatatatataatatctactattttgatgaaaaaaaaaaaaaaagggcggccgc

SEQ ID NO: 1296 - DNA, 706 bp, Brassica napus
  Clone ID: BRANA-23APR03-CLUSTER10907_1
gggtccgtctaaatccaaaaatcgtaaaccgccactaaaccggaaaaggaaatagttttcgatggagtcaccagcagcagcaacagcgaagccggcgagaggagcaggaggaaggaaaggaggagatcgcaagaagagcgtcaccaaatccgtcaaagctggtctccagtttcccgtcggccgtatctctcgttacctgaagaaaggccgttacgccgtcaggtacggcgccggtgctcccgtttacctcgccgccgttctcgagtacctcggccgccgaggttttggagctggcggggaacgcggcgagggataacaagaagaacaggataaaccctaggcatctttgcttggcgataaggaacgatgaggagctggggaagcttcttcatggagtcacgatctcaagcggaggggttcttcctaacattaacccggatctactatctcaaaagcggctggagttcttcctaacattaacccggttcttctccccaagagagctgctggttctgagaaagcagctgcgaaatctcccgtttttttttgggtttagtgattatgtaggttgtcttttgtatgtttatctccgtttggttttgtctatgatgaatccagtggaagattatgttattaaaagccattttgtaatgaaagaagtaccttcctcggtatcaaaacaaaaaaaaaaaaaaagggcggccgc

SEQ ID NO: 1297 - DNA, 1193 bp, Brassica napus
  Clone ID: BRANA-23APR03-CLUSTER10_1
aactagcaaagtaacagtaccaatatgatgtcaaaaaataaaataaaaaatctacagcaattattaaaaaaaaaaattgtttgatgaaaggttgttgttttgtggttggggatatttagcagagaaaatggtggctactaagagcatctcctcccttctccttgtggactcttcttcttgcttcttctctccgattccacgattcctaactcttcgaatcgcgactacaactgcccttagatcagcagcaaccttcacgctccgcaggtctccttctcataggagtctaacgccttcactcgccgtcatgtttccggacaattcggtactatcggatgtctgcgcctccgggatcaccagcgtcgtggcggtctcttgcctcggtttctggggtgagattggcaagcgcggcttctttgatcagaaacttatccggaagcttgtgcacatcaatattggtcttgtttttatgctttgttggccactattcagttctggacgccaaggagcgcttctggcttctcttgtacctggactcaatatagtaaggatgctgctcctgggccttggagtctaccaagacgaaggtactatcaagtctatgagcagacacggtgatcgcagggaactacttaagggaccgctttattatgcactctcaatcacatccgcctgtttcttctactggaaaacatcccctatcgccattgctgtgatatgcaacctctgcgcaggagatggtatggctgacattgttgggaggcgtcttggaacagagaagcttccttacaacagaaacaaatcattagctggtagcattgggatggcaatcgcagggttcttagcatctgttgggtatatgtactacttttcttcatttggctacatggagagtaccgggtgggatatgattcttcgcttcttagtcatctccatagcatcggctcttatagaatcactccccataagcaccgacatagatgacaatctcaccatccccttaacctctgccttggtcggtactctactcttctaatacagagtcctcgagcttgattacctctatgtagtaaaaaaaaactacatccttagttgccataatcttgtgtatgtacttgttagtgaaaagacatcatattgttgttgcagttgggtacaatgttgtaatgtagtgaagagatatagtgactact

SEQ ID NO: 1298 - DNA, 624 bp, Brassica napus
  unsure (1)..(624): unsure at all n locations
  Clone ID: BRANA-23APR03-CLUSTER11038_1
aatttaatgaaaaggaaagtgtccctctgaaaaaaaaaaccgtgaagagtaaaggaggcgacgcatcgcacaccttcattctctctttctccgccatgaccagctcttccgctccctcacgcaaggccttaagcaagatcgcgtgcaataggttgcagaaagagcttaccgagtggcaattaaatcctcccactggatttaggcacaaagttaccgacaatcttcaaaaatggacaatcgatgtgaccggagctccggggacgctctacgcgaacgagacttaccagcttcaggttgaatttcccgttaattaccctatggaagcgccccaggttatttttgttcctccggcaccgtcacacccacatatttacagcaatggacatatttgtttggatattctatatgactcgtggtcacctgcaatgactgtgagttccgtctgcatcagcattctctccatgctatcaagttcacctgcaaaggaacgcccagcagattctgatcgttacgtgaagaattgtaagaacgggaggtctcccaaggaagacgaggtggtggcttcatgacgaccaggcttgatgcnacgaacaaganaagccctttaatcgcatatggaagatg

SEQ ID NO: 1299 - DNA, 3172 bp, Brassica napus
  Clone ID: BRANA-23APR03-CLUSTER112_1
atggcgccgagtagacgggatttacagcttactcccctctccggagacactgctgcggagatcggtgccatggaggaagttcgtctcctcgattcctatgacgacgacgacaacgacgattctctgagtaagatcgaggaaggaagcggcggttccggtttacggaagattcaggtgggaataaccggtatgacttgcgccgcttgttctaattccgtcgaaggtgctttgataagcgttaacggcgtcttcaaagcctccgtcgctttattacagaacagagccgatgtcctcttcgaccctaacttagtcaaggaagaggacattaaagaggctatagaggacgctggatttgaagccgagattttggctgagcctgttacttctgggaccaagacgcaagctactttggtgggtcagttcactattggaggcatgacttgtgctgcttgtgttaactctgttgaaggcattctaagagatctccctggagtgaaacgagctgttgtggctttagctacttcgttgggagaagttgagtatgatcctaacgtgatcagtaaagatgatattgtgactgcgattgaagatgctggctttgagagttctcttgtgcagagtaatcagcaggataagctccttttgagggttgatggtgtgttgaacgagcttgatgctcaggttcttgaaggtatacttactagattgaatggggttaggcagtttcgtcttgacaggataacgggggagcttgaggttgtgtttgatcctgaggttgtgagttcgagatctttggttgatgggattgaaggagaagggtatgggaagttcaagttgcgtgtcatgagtccttacgagaggctgacttctaaagatactggagaggcctcaaacatgtttcgtcgttttatctcaagtctttctctcagtattccactcttcttcattcaagtgatctgcccccacattgctctttttgacaccgtgctggtatggagatgtggacccttcatggttggtggttggttgaagtgggccttggtaagtgtgattcagtttgttattggcaagcgtttctatgttgctgcatggagagctcttcgaaatggttcaactaacatggatgtgctggtcgctctgggcacgtctgcgtcttacttctactctgttggggctcttttatatggggcagtcactgggttttggtcaccaacttactttgatgcaagtgctatgttgataacatttgtcttgctgggtaaatatttggaatctcttgcaaaggggaaaacctcagatgctatgaagaaactagtacaacttactccagcaacagcgattctaatcgaaggcaaaggagaaagagagatagatgcattactgatccatcctggtgattcattaaaagttctacctggtgggaagatccctgcagatggtgttgtggtgtggggttcaagttacgtcaacgaaagtatggtgactggtgaatctgttcctgtatctaaagaggttgattcaccagtgatcggtggtaccatcaatatgcatggtgttcttcacatcaaagctacaaaagtgggatctgatgcagttctgagccagattattagtttggtggagacagcccaaatgtccaaagctcctatccagaaatttgcagactatgttgcgagtatatttgttccggtggtgatcactttggcattgttcactttagtaggctggtcaattggtggagctgttggagcttacccagacgaatggctaccccaaaacggaactcactttgttttctcgcttatgttctcaatatccgttgtggtaattgcttgcccttgtgcactcggcttggcaacaccgaccgctgtcatggtggcaacaggagttggagcaaccaatggtgtattgatcaaaggaggtgatgcattggagaaagctcacaaagtgaaatatgtaattttcgacaagacaggcaccttaacgcaagggaaagctaccgtgacaaccgctaaagtcttctcggagatggaccgtggagagttcctcacacttgttgcttccgctgaggctagtagtgaacacccgttggcaaaagctatagttgagtacgctcgtcatttccacttctttgatgaatctgccgaggacggcgacacaagtaacaaagtctctcaaaacgctggatggttactggacacatcagacttctctgcccttcctgggaaaggcattcagtgcttagtagacaacaagctgattctggtgggaaaccgtaaacttatgtcagaaaactccataaccatcccagaccacgtcgagaagtttgttgaggagcttgaagaaagcgcaaagacaggagtcattgtagcctatagcggccaattagtaggggtgatgggagtagctgatccgctaaagcgagaagctgctgtagtcgtggaaggtctccttagaatgggggttcgacccattatggttacaggtgataactggagaacagcaagagcagtcgccaaagaggttggtatcgaagacgtgagagcggaagtaatgccagcaggaaaagctgaagtgatccgttcactgcaaaaagacggaagcacggtggcgatggttggagatggaatcaatgactcgccggctctagccgctgcagacgtgggaatggccattggtgcagggaccgatgtagcaatagaagcagctgattacgttctgatgagaaacaacttagaagatgttattacagccatcgatctctctcgcaaaaccttaacacgaatcaggttgaactacgttttcgccatggcttacaacgtggtgtcgataccgatagcagcaggagtgttcttcccggtcctgagggtgcaactgccgccgtgggccgcaggagcgtgcatggcactctcttcggtgagtgttgtttgctcgtctttgcttcttagaagatacaagaagccgagacttaccactattttggagatcaccaaggagtaaaagtctttttctttttttttctttcttaatttgagtgatttacttttgttttggtttgttgtttgtaatcatgtaacgacgataaaaatgggtcttgcgatgtttctcggccttcgttgtaaaaaatggcgtcctttcttgtgaaaaaaaaaaaaaaaaaaaaaaaaaaaaa

SEQ ID NO: 1300 - DNA, 1004 bp, Brassica napus
  unsure (1)..(1004): unsure at all n locations
  Clone ID: BRANA-23APR03-CLUSTER11335_1
accgccttctgccgactgtgcgcgtcaatggagagcgagccaactcgagtgatggtggcggtgaacgagtcgtcgatcaaaggctacccacacgcgtcgatagagcagcaattttcagaggactttgccaatccaccctgctggattgcctcttcaccgccttcttcctctagagaacgacgacagagacgaagatttcagaaatggagagcgagccaactcgagtgatggtggcggtgaacgagtcgacgatcaaaggctacccgcacgcgtcgataagcagcaaaaaggcgttcgagtggacactgaagaagatcgttaggtccaacacctctggcttcaagctcctcttgcttcacgctcaagtccaggacgaagacggttttgatgacgtggacagcatatatgcttcccctgatgacttccgaaacatgagggagcgtaacaaggctaatggacttcaccttcttgagtttttcgttaataaatgtcatgagattggggttaggtgtgaggcctggatcaggaaaggtgatcccacggaagtgatatgccatgaagttaggcgtgtcaggccagattttctggttgtgggaagtcgtggtctcggtccatttcaaaaggtatttgttggaacggttagtgagttttgtgtgaagcatgcagagtgcccagtcatcataatcaaacgcagtgntgaagagagtccacaagatccagctgatgactaaattccaaaagcaagacaagccatgcggtgttcttttgtctgtgagagaacatccaaaactcttttggatgatctagtagtatgttgtgcgagtagaaactcgattcacatgatatataattgtgtgcggtcaatgccttcgtctttcattctctaaaacatccaaacagaagttctattattcggtgtgtaatctttcgactcttctgtcttaaatatgtggtttatataaaaaacgtaacatctctattgctaaaaaaaaaaaaaaaaaagc

SEQ ID NO: 1301 - DNA, 823 bp, Brassica napus
  Clone ID: BRANA-23APR03-CLUSTER11583_1
aacaggcttaattctaaatccggaaaaatggctctccgatctgtcaaaacgccgccgtttgtaactccaaccgccgtcgtgtcctcctcaattatcaacaaaatccggaaaaaatggctctccgatctatcaaaacgccgtctgtaactccaaccgccgccgtctcctcctcaattaccaacaaaccacagtctttcagattcgtctccaaaccgtcggcatcactcgccgtccacaacctccaccaaccgatctccatcacccgttcgaatctcctacccaaactcaaaccagcatctccccccgcgaaattccggtgctcggcgtcggcggcgctcacgccgcagcttagagatacgctggagaagctggtgaactcggagaaagtcgtgttgttcatgaaaggaacgagagatttcccgatgtgcggattctcgaacacggtggtgcagatcctgaagaatctgaacgtgcctttcgaagacgtgaacattctggagaacgagatgctgaggcaagggctgaaagagtactccaattggcccacgtttcctcagctctacatcggcggcgagttcttcggtggttgtgacatcactctcgaggcgtttcagagtggggagttgcaggaggtggttgaaagagctatttgttcttgaagctgattggtactttgtatttggtttggttgttgatgcttggatttgggttttgtaatgatgttattaattatctcttatgtcctgaaccaaaggcttctatgatggaagcactatgtgcatggaactcttggcattaaaaaaaaaaaaaaaagggcggccgc

SEQ ID NO: 1302 - DNA, 988 bp, Brassica napus
  unsure (1)..(988): unsure at all n locations
  Clone ID: BRANA-23APR03-CLUSTER11649_2
atctatatgttttatgtgtgtctgtaagaatattgattcattaatgaccatcntctcgatcgatgctatgttgtttggaatgtgcagattctattataaaagaaatggctgcttcaagtgctgtaaccgctgactacgttctcaagccacctccatactctctggatgctttggagccgtttatgagccgacaaactctggagtttcactggggcaagcatcacagggcttacgtggacaacctcaagaaacaggttcttggatccgatcttgaaggcaagaccttagaccacatcatcctcaacacttacaacaatggcgacctactccctgctttcaacaacgctgctcaggcatggaaccacgagttcttctgggaatcaatgaaaccaggtggtggtggaaaaccatcaggagagcttcttgctctgcttgaaagagatttcacttcttatgagaagtttatgatgagttcaatgctgctgccgccactcagtttggagctggctgggcctggcttgcttacgcagacaacaaactcaaagtagtgaaaactccaaatgctgtgaaccccccngtgcttggctctttcccattgcttaccattgatgtctgggagcatgcatactatctcgacttccagaaccgcagaccggattacataaagacattcatgaacaatcttgtgtcttgggaggctgttagttccagacttgaggctgccaaggctgcttcttcctgagtcatcatcagacttattcggaccaaaatctgacttcagttgtgtatgttatgcattactgaagtttcttaataaaatattggtcgcggttataaggacactgctctcttgttgtaatgtctcatcgagtctttcatctatttcttgtttactgagattttaatcatcgtgtaataaagaactaccatgttctcttgggtggtttggtttttatctatttaaaaaaaaaaaaaaaagggcggccgc

SEQ ID NO: 1303 - DNA, 757 bp, Brassica napus
  Clone ID: BRANA-23APR03-CLUSTER11692_1
gctgatgctgcggtgggagggagggcggtccgtgcgattagatgtttgcatctcggccaagtaacagtcatcggataatcaaatgggtttcggcgcgattagatcgattctccgtccattgtcgaggaccctagcttctcgtgtcgcctctagctgctcgtctccgccgttccctgctgcgaagcccttgttatgctccttcttcggtggatcgaggctgccatggattccagtggctaaccatttccacagcttgagcttaactgatactcggctcccgaagagacgacccatgactcatcccaagaagaaaagattcaaacttaaacctccagggccttatgcatatgttcagtatactcctggcgagccaattgcttccaacaatcccaacgagggtagtgttaaaagaaggaatgccaagaagcgcattggccagcgccgtgctttcatactgtctgagaaaaagaagaggcaagcgctggtgcaagaggcgaagaggaagaagagaatcaaagaagtggaacgtaagatggctaaagtcgcaagggagcgagcttgggaggaaaggctggctgagcttcagcgactcgaagaagagaagaagaagtcaatttcctcttaaattttgctttccttcatccaaaaaaaaaacatagaataaatctatttcttttgagctaggttttgctcctaactctttgttgtgttgccgagattcactcactcttgtccctctactgttttgtaagaaccg

SEQ ID NO: 1304 - DNA, 869 bp, Brassica napus
  Clone ID: BRANA-23APR03-CLUSTER1196_3
atctcattctctcgctcactcataaaactcacaagtcacacaatcctcaataccaaaggataacacacacgaaaaaaactttcactaagataaaccaagaatcttcatcatggcttcagtaacctcagccaccgtcgcaatcccatcgttcaccggcctaaaatccaccatctccaaaacctccgccgtcgtcagactccccaccacaacatcacggaacctcaccgtgaagtcatctctaaaggacttcggagtcgctgtcgttgcggctgcagcttccatcgctttggctggaaacgctatggccattgatgttctcttgggatcaggagatggagcgttggctttcgttcccaacgagttcacaatagcgaaaggagagaagattgtgttcaagaacaacgctggattcccacacaacgtcgtgttcgatgaggacgagatcccaagtggtgttgaagcgagcaagatctccatggacgagcaagatctactcaacgctgctggagagacgtacgaggttgctttgactgagcctgggacttacagcttctactgtgcgccgcatcagggtgctggtatggtcggtaaagtcaccgttaactaataaaattgtgagtgtaaaagcggaagagtgtctctgatccgagtagaggcttttctttcagtcttgcttacataaggtgttttgtacttctaaagagtgttggaatcaaatggacattgatttgttataatgagagtactggttccatccatgaatggtttgtcttggtttataaattacttgtagatttaaaaaaaaaactgaagctttttaagataaagaaaaactaagaaaaaaaaaaaaaaaaaaaaagggcggccgt

SEQ ID NO: 1305 - DNA, 836 bp, Brassica napus
  Clone ID: BRANA-23APR03-CLUSTER1196_5
ttgttctatctcattctctctctcacctcataaaactcactagtccaacatcaaccaaggtataacccacgaaaagaaaaaaaattcacttagataaaccatatcttcatcatggcttcaataacctcagccaccgtcgcaatcccatctttcaccggtctcaaatccacatcctccaaaccctcaaccgtcgtcaaaatccccaccgtggcggcagcatcaacgaagctcaccgtgaagtcatcactaaaggacttcggagtcgctgccgtagcggctgcagcttccattgctttggctggaaacgccatggcaatagatgttctcttgggatcaggagatggggcgttagcctttgtccccaacgacttcacaatagccaaaggtgagaagattgtgttcaagaacaatgctggattcccacacaacgttgtgttcgatgaggacgagatcccaagtggtgttgacgcgagcaagatctccatggacgagcaagatctactcaacgctgccggagagacgtacgaggttgccttgactgagcctgggacctacagcttctattgtgcgccgcatcagggtgctggtatggtcggtaaagtcaccgttaactaaataaaatgtgagtgaagtgaaagagtgtctctgaaccaaagtagaggcttttctgtcagtcttacataaaggtgtttttgtaattctaaagagtgttgaatcgaatggaccccgtgattgttatagtatgactggttggttctataaatggtttttcttggtttataaattatatgtagacttatgtctcgccatcaaaaaaaaaaaaaaagggcggccgc

SEQ ID NO: 1306 - DNA, 1084 bp, Brassica napus
  Clone ID: BRANA-23APR03-CLUSTER1199_3
acaaccctcaaaagtcaaaacacacttccatcataaaccagagagagaaaaagaaaaggagagagagagaaaatggcgtacagcgcgtgtttcctacaccagagcgcactagcctcctccgccgcacgatcatcatcttccaactcatcccagcgccacttgtccctctccaaacccgtccagatagtgtgtaaagcacaacagcaccatgaagacgataactccgccgtctctcgccgtctcgctctcacactcttggtcggcggcgccgccgttggttccaaagtgtctcccgctgatgccgcctacggtgaagctgcaaatgtgtttgggaagccaaagaagaacacagacttcactgcatacagtggagatggattcatcgtgcaggtgccagctaaatggaacccaagcagagaggtagagtatccaggacaagtccttaggtacgaagacaactttgacgccactagcaatctcaatgtcatggtcactcctaccgacaagaagtccatcactgattacggctctcctgaagagttcctctctcaggtcaactaccttcttgggaaacaagcttacttcggtgagactgcctccgagggaggctttgacaacaatgcagtggcaacagcaaacattttggagacaaatgttcaggacgttggtgggaaaccatactactacttgtccgtgttgacaagaacggccgatggagatgaaggtggtaagcatcagctgatcacagcccccgtgaacggaggcaagctttacatttgcaaagcacaagctggagacaagaggtggttcaagggagccaacaaatttgtcgagaaagcagccacttctttcagtgttgcttgaatcaaagcaacacaaacagaacaatgctctgctttctttttttttcccccgtctcttgtaaaaaaatggaaaatgaaactaagcttttgagaaactatcaagatgatgatgatgctatatctttgctatagactagctttatatgcttgatcaaaaaaattgaatttggtaaaaaaaaaaaaaaaaaaaaaaaaaaaaaaaaaaaaaaaagggcggccgc

SEQ ID NO: 1307 - DNA, 1179 bp, Brassica napus
  Clone ID: BRANA-23APR03-CLUSTER1215_1
attcaccttgagtcttctacttgccctcttctgtctatatccacgcccgaatccgaaacttctcaacatagagaaaagcttagagctctggtagtaatggcgggattggcaatttcacctcctctaagtcttaccttctcttctcgaactagaaacgctaaacccacttcgtatctatctcacaatcaaagaaatcttacaaggcgtatagtttctgctcttccaagtccttatggcgattcattgaaagctggactttcgagtaatgtctctggcaacaaagatcctcgtagcatagctccaagatttggagtgatagaggcgaagaaaggaaacccgcctgtaatgccagcagtgatgacacctggaggacctttggacctctcttcagtgttattccgaaaccgcataatcttcatcggacagccaatcaacgcacaggttgctcagcgtgtcatatctcagcttgttaccctcgcttctattgatgataaatccgacatcttgatttacttgaattgtcctggaggcagcacttactcggtcttagcaatctatgactgtatgtcttggataaagccgaaagttggaccagtagcgtttggagtagcagcgagtcaaggagcacttcttcttgctggaggcgagaaagggatgcgctatgcaatgccaaacactcgtgtcatgatacatcaacctcaaactggatgcggaggacatgtggaggacgtgaggagacaggtgaatgaagccattgaagctcgacaaaaaattgacaggatgtatgcagctttcactggacaaactcttgagacagtgcagcaatacactgaaagagatcgtttcttatccgcatctgaggcgcttgaatttgggcttatcgatggtctattggaaacagaatactgaagcaacatgcaaagacatttgcatagatgcagctcatagcgatgttcagaccttcccatttcatttgaatatgaaaagttgtaaccaatctgaaaaacttaatgttctatttcggttaggtccagctttttactattcagttatgtaatcagattctatgcaatgaactctgtagcattactggttgtcagaacaaaatgtgaacaaatttgcagtaatggtggcagcactagattagtaactaaaaaaaaaaaaaaaaagggcggccgc

SEQ ID NO: 1308 - DNA, 2209 bp, Brassica napus
  Clone ID: BRANA-23APR03-CLUSTER121_1
ctcattcaccattcccgtttcatctttatttgtaagggtaatattaatacacatatggctgcagctgctgatcatgtggtgatagtggaagaaggacggcaagccaccgcagagcatccatcggcaggaccggtttatcgatgtaaatacgctaaagatggcctcctcgatcttcctgctgatcttgattctccttggcagctatttagtgaggctgtgaagcaatatccgaatgagcaaatgttaggccgtcgcgtaacggttgattctaaggtcggtccatacacatggatcacatatagggaagctcacgatgctgcattgcggattggatcagcaatcagaagccgaggcgttaatccgggaaactgttgtggaatatacggatctaattgtccagaatggattatcgctatggaggcctgcatgagccaagggataacttatgtacctttatacgacagtttaggtgtaaacgctgtagagttcatcatcaaccatgccgaggtttcgctggtattcgttcaagagaaggcactttcctccatcttagcatgccgcaagggatgttcttcgaatttgaagactattgtgagctttggtgaagtctcgactactcaaaaggaagaagctgagaaccaatgtgtttcgttattttcttggcatgagttcttactaatgggaaactcggatgagacaacacttcctcgtaagcaaaaaacagacatatgcacaataatgtacacaagcgggacgacgggagagcccaaaggtgtaatcttaagcaatgcagcgattatggtcgaagttttatccattgataaaatgcttcaagtcaccgatcgatcgtgtgacacaagtgatgtgtttttctcgtacttgccattagcacattgttatgatcaagtcatggagatctactttttatcaagaggctcctctgttggatactggcgtggcgacattcggtacttgatggatgatgttcatgcactgaaaccaactgtgttttgcggtgttccacgagtttacgacaaactctatgctggtgtaatgcaaaaaatctcagctggtggtttgatacgcaagaaactcttcgatttcgcttataactataaattggggaatatgagaaaaggattgtctcaagaagaagcttctcctcgtctagacagacttatgttcgataagataaaagatgcattaggaggaagagctcatatgttgttatcaggtgcagcacctttacctcgtcatgtagaggagttcttgagaatcatccctgcctctaatctctctcaaggttatggattgactgagagctgtggagggagcttcacgactttagcaggagtattttctatggtggggacagtgggtgtgccaatgcctacggtggaggcaaggctagtttctgtaccagagatgggttatgaagctttttccggggatgtggctagaggagagatttgtcttagaggaaattcaatgttctctggttaccacaaaagacaagacctaactaatcaagtcgtgatcaatggatggttccacacaggagatattggggaatggcaagaagatggatcgatgaagatcatagataggaagaagaacatcttcaagttgtctcaaggtgaatatgttgctgtcgaaaacctcgagaatacttactcaagatgccctctcattgctcagatatggatctatggaaacagcttcgagtcttttctggtagcagtagttgtacccgagagaaaggctattgaagattgggctaaacttaataaccaatcatctcccaatgattttgaatctctatgtcaaaatctcaaagctcaaaaatacttcttggatgagcttaactctaccgcaaagcaataccaacttaaagggtttgaaatgttaaaagcggttcatttggaaccaaatcttttcgatattgaaagagatcttataactccaactttcaagttgaaaaggccacagctcctcaaacattacaagagcataattgatcaactttacaccgaagcaaaggcgtccagagcatagaaccggacggctattcattttccgatgtttttttagttgtatgatatgtcaacattgtattcgaatcctcttatcatatattattcatatgatacactttacattatatattgttataagaaaattttaaaagtaaaaaaaaaaaaaaaaaaaa

SEQ ID NO: 1309 - DNA, 571 bp, Brassica napus
  Clone ID: BRANA-23APR03-CLUSTER1236_1
aacgctttccacagactcaaacttcttaaaacaccatctcacaagcattgcccgagagagagaagaatcaaaaacgtagaatcaaatcaattattaagcaatggcatcgatgaccatgacagccacattcctcccagccgtcgctaagctcccctcaaccaccggcggacgaaggctgtcggtgatcagagcttcaaagagcgacaacacaaccagcttacaagccaaggagacacagagcagcaccacgatgaggagggatctcatgttcacagctgctgctgcggccgtttgttccttggctaaggtagccatggcagacgaggaggagcccaaacgagggacagatgcagctaagaagaagtacgctcaagtctgcgtcacaatgccgaccgccaagatctgtcgctactgattcaacattccatctttcatgcctctctctctctctctttcttatatttcggttaatttttctaaaagtttgtttgtaatcatgtactaaatcaatttcatattttgctactagattttcgaatataaaccaaacttgacaaaaaaaaaaaaaaaa

SEQ ID NO: 1310 - DNA, 2287 bp, Brassica napus
  Clone ID: BRANA-23APR03-CLUSTER123_1
ttttttcagattccgaatcggaaaatggattctacctccgccgcacgccgccgcataaacgctatccactcccatctcgtcacgtcttcccgctcttcccctctcctcctcagctccaatcccaccgcgggcgagttctatctcgataatggctatagcgtcgtgcttccggagaagctgagcactggcaagtggcacgtctacagatctgctcgatctccgttcaagctcgttagtaggttcccggatcatcctgacatcgccactctccatgacaactttgagcatgctgttcatgactttcgggattacaagtacttaggaactcgcgttcgtgtcgacggaactgttggagactacaaatggatgacatatggagaagttggtacagcaagaactgctctaggttctggtttagttcatcatggcatcaccacgggatcttctgttggaatttactttatcaaccgcccagagtggctcattgtcgatcaagcttgtgcttcttattcgtatgtgtctgttcctttgtatgatactcttggtcctgatgctgtaaagtttatcgtcaatcatgcaaatgtgcaagccatattctgtgtggctgagacgttaaactccttacttagcggcttgtctgagatgccaagcgtacgcctggtggtggttgttggagggttgaatgaatctttgccttcgcttcccccatccgcaggagttaaagttgtatcatattcggtgttactgaaccagggccgtagtaaccctcagccgttttgtccaccaaaacccgatgatgttgcaaccttatgctatacaagcggaacaactgggaccccaaagggagtcgtattgactcatgcaaacttgattgcaaatgttgctggatccagttttagtgtgaaatttttctcttcagatatttacatttcatatcttccactggcacacatttacgaacgagcaaatcagatcctagcagtgtacttcggagttgccgttggtttctaccaaggggacaatatgaaactactggatgatctggctgctctgagacctactgtattcagcagcgtcccccgattatacaatagaatatatgatggtattactaatgcagtaaaaacctcgggtgggctgaaagagaggctcttcaatgctgcatataatgcaaagaaacaggctctcttgaatggaaaaagtgcgtctcccatatgggacaggttggtatttaataagataaaagacagacttggaggacgagttcgttttatgacgtctggggcttcacctttgtctcctgaagtgttggagtttttgaagatatgctttggaggaagggtatcagaaggatatggaatgactgaaacatcttgtgttataagtggaatggacgagggtgataacctcactggacatgttggctctcctaatccagcttgtgaagtaaagcttatggatgtcccggaaatgaactatacatcagcggatgaaccacatcctcgtggtgagatatgtgttagaggtcccatcatctttagaggctattacaaggatgaagttcaaacgagagaggtgattgatgaagatggatggcttcacactggagatataggtctttggttgccgggaggacgtctaaaaattatcgacaggaagaagaacatcttcaaattggctcaaggggagtatatagctccagagaaaattgaaaacgtctatgccaaatgcagatttgtgggccaatgcttcatatatggtgatagctttaattcatcattggtggctgttgtatcggttgatccagatgtgcttaaaagctgggctgcttcagaaggcataaagggagaactgagagagttgtgcaataacccgagagtgaaagcagcagtattatcagacatggacgctgttgggagagaatctcagttgagaggctttgagtttgcaaaagctgtaacattggtgctggagccattcacgctagaaaatggcttgttgacaccaacattcaagattaagagaccacaagcaaggaatacttcgcagaagcaataacaaacatgtacaaggagcttgctgcttctgatcccacggctaataaagctttgtgattcgtgtgtaattcgagtgattaataaaaaagtcctaaaattgtaattcttttttatttttatttttgcttcatgtttcattgaatgttcgttaaggtaataaaggtgctacagtatagatactaaaaagtttgccttgtgtgataagaaagtcaaaaaaaaaaaaaaaaaaa

SEQ ID NO: 1311 - DNA, 1103 bp, Brassica napus
  unsure (1)..(1103): unsure at all n locations
  Clone ID: BRANA-23APR03-CLUSTER1252_4
catttgattgtctcaaaacagagtaagagcttgaaactttggggatacaaagatggcgtctatgggtgtttcggaaatgcttggtacgccacttaacttcnaggcagtgtcaagatcgtctgctccatcggcatcgagcccgggtacgtttaagacagttgctctgttctccaagaaaaagccagctcctgccaaggccaaaaccgtctctgttgctaacgatgaactcgccaagtggtatggtcctgacaggagaattttcctgccggatggtnntttggacagatcagagatcccagagtacttaaacggtgaagttgctggagagtaagacacttcttcatgtctcttactttggctttggtatttaaggttttattgatatgaattgcagctatggctatgacccatttggacttggaaagaagcctgagaactttgctaaataccaagcctngagctgatccatgcgagatgggctatgttgggagcagctggtttcatcatccctgaagctttaaacaaatacggagctaactgtggtcctgaagccgtctggttcaagactggtgctctgcttcttgatggaaacacattgaactactttggcaagaacatcccaatcaaccttgttctcgccgtagttgctgaggttgttctcctcggtggagccgagtactacagaatcaccaacggattggattttgaggacaagctacaccccggaggtccatttgatcctttaggacttgctaaggaccccgaacaaggagctctcctcaaggttaaagagatcaagaacgggagattagccatgtttgcgatgctcggtttcttcatccaagcttatgttactggagaaggtcctgttgagaacctttcaaagcatctcagtgatccttttggaaacaatttgcttaccgtcatagctggaaccgctgagagagctcctacactttaagccatttctagtttattaaagagctttgtagactttgtttgatgacaatttctattgacactgtgaaaacaaacttccatcttcatcttcttgatatactacaatggttttatcaaaaaaaaaaaaaaaaaagggcggccgc

SEQ ID NO: 1312 - DNA, 3173 bp, Brassica napus
  Clone ID: BRANA-23APR03-CLUSTER126_1
ttccaacattataagatatctgacggatcttaaggccaaaatgtcttgggatgacggaacgcacgcgaaggtgaatagagtccagcttacgtttgatgacgtcatcagatctatcgaggtggaatacgagggcaccaacgttcagccccagcgtcgtggcaccgttggcaccaactctgacgaatttacactgagctcagacgagttcataacgcgtgtggctggttactaccgaacgactttctccggagacgttataacggcgttattgtttaggacgaacaagaagacctatgggccttatggaaacctaacacgaaacttcttttctgctgacgcaccgagaaacaaccaaatcgctggatttctaggaaatagtggaagtgcactcaactccatcaacgttcattttgctcccattcctccccctggtagcattaaaccaaaacctgttggccccggaacaggcgacgctggaagcggtcaacctgctagcccaggaaccggtgatgcgggaggtggtccaaaacctggtggtcccggaaccggtgaaaacggagccggcactaaacctagtggtcccggaaccggtgaaaacggagccggcactaaacctaatgaccttggaaccggggcagatggagaaggtactaaacctggtggctctggaaccggcgaagacggagccggtacaaaacctggtggccttgagacaggagaagacggagccggtactaaacctggtggccacggaaccggcgaagacggagctggtactaaacctgttggctctggaactggtaacgatggaggcggtcctagacctgttatccctggaaagatgggaccccttggtggtgacaagggaaatgaattcgacgatgttggttttgatggtgtgaagaaaataactgtgggagcagatgaattcagtgtaacttatatcaagatcgaatacataaaggacggaaaagttgaaatacgtgaacacgggactaatcgcgggcaactaaaagagttttcggtggattatccaaatgataacatcgtggccgttggtggaagctacgatcatattttcacatatgatacaacgcttatcacatcgctatacttcacaacctccaggggttttacctctccattattcggtgagaagacaggaacagatttcgagttccaaggtgaaaataaaggaaagcttctcgggttccatggacgtgctgggcatgctattgatgccatcggagcttacttccacactggttcacaaggtggccagggagctggttcacaaggtggccagggagctggttcacaaggtggccagggaggtgaccccggaaaaggtggtcctagacctgttgtccccggaaagatgggacccttaggtggtgccaagggaaatgaattcgatgatgttggttttgatggtgtgaagaaagtaactgtgggagcagatgaattcagtgtaacttatatcaagatcgaatacataaaggacggaaaagttgaaatacgtgaacacgggacaaatcgcgggcaactaaaagagttttcggtggattatccaaatgataacatcgtggccgttggtggaagctacgatcatattttcacatatgatacaacgcttatcaaatcgctatacttcacaacctccagggggtttacctctccattattcggtgagaagacaggaacagatttcgagttccaaggtgaaaatagaggaaagcttctcgggttccatggacgtgctggctatgctattgatgccattggagcttacttccacaccggttcacaaggcggtgagggaggtgaccccagcaaaggtggtcctaaacctgtagtacccgtaaagatgggacccctaggtggtgacaggggaaacgaattcaacgatgttggtttcgatggtgtgaagagagtagctgtggcagctgatgaattcagtgtaacctacatcaagatcgaatacgtaaaggatggaaaagttgaaatccgtgagcacgggacaagtcgagggcaagtaaaagagttttcggtggattatccaaatgataacttcacggcagttggtggaagctacgatcatatattcacatatgatacaacacttatcacatcattatacctcacaacctcaagaggatttacctctcctttattcggtgagatgaagggaacagaattcgagttcaaaggtgaaaatggagaaaagcttattggattccatggacgtgctggtcatgctattgatgctattggggcctacttcgacactggttctaaaccgggcggcgactcaaacagtggaaaaggaactgacagcggttctagtactaaagacagtggaaaaggaactgacagcggttctagtactaaagacagtggaaaaggaactgacagcggttctagtactcaagacagtggaaaaggatctgacagcggttctagtactcaaagactggaggcacaaggaggcaagggaggcaatcaatgggatgacggaggcgattacgacggtgtgacaaagatacatgttgcagttggtcgagggattgagcaaatcagcttcgagtatgtcaagaacggacagacaaaggaaggacccgcccgtggtgtgaggggaaggagatctaccattggaacgtttgagataagtcatcccaacgagtatcttatttccgtgaagggttggtcagattcatccaacaaaattgcgggaattcaattcaaaaccaacacaaagacttcaaagtattatggatttgaaaaacttcctggagaagaaagtacagacattttacttgaagtgaaagacaagaagatcgtcggttttcatggcttcgcggactctcacgtcaatgctcttggagcttatatcgctccagcagccaactgaaaactttgttgggtttgtttcttgctttccgtgtgaataaagttacatcagagtcatacttgtggatttgtcacttcgagcagggccggcttaggcataggggcaaggtccacaatttacttgagccggccctgacttcgaggtggcatgggctatgttttttgtttgtgtctcagtgtaacttttgtgtttcagtgtgatgtttgtgtagtcacttgtagggtttgtttcttgattttcttataaataaaggatgtgtctg

SEQ ID NO: 1313 - DNA, 902 bp, Brassica napus
  Clone ID: BRANA-23APR03-CLUSTER12703_1
acaccatttgctgagaaagaagacggtgaaagatgtcgagcggaggatacggagacccgtcgcagaagattgactacgtcttcaagctagtcctgatcggagactccggagtcgggaaatcgcagatactctctcgttacgcgagaaacgagttcagcttggactccaaagccaccatcggcgtcgagttccaaactcgaacactcgtgatggaccataagagcgtcaaggctcagatctgggacaccgcgggccaagaacggtatagagcggtgacgagtgcttactacagaggagcggttggggcgatgcttgtttacgacgtgacgcggcgtcagacgttcgatcacatcccgcggtggctggaggagctgagaggacacgcggacaagaacattgtgataatactcgtcgggaacaagtccgatctcgaggatcagcgtgcgatctcgacggaaaatgctaaaaagttcgcggagacggaagggcttttttttttggggacttcggctttgaacccggtcaacgtggagacggctttttcgcctgttttgactgagatttttaatattgtgaacaaaaagaatcttgttgctggggaagggaatggcgatccggggtctcttgctggtaaaaaaattgacattgttccggggcctgctcaggtggttccgaccaaaagtggcatgtgctgtaactcgtagaaaccgaattgaatttgccagtgtttacttttgtattgttacttcccgtaatggcctttttgttcggggtttttattacaagtgtttgattgagttttgagtttggttttgaaacacccctcgagtcaaaaaaaaaaaaaaaaaaaaaaaaaaaaaaaccccaaaaaaaaaaaaaaaaaaaaaaaaaagggcggccgc

SEQ ID NO: 1314 - DNA, 1102 bp, Brassica napus
  unsure (1)..(1102): unsure at all n locations
  Clone ID: BRANA-23APR03-CLUSTER1289_1
ttttttttttttttttgtgtaaacgggtcgatttanattagtaaaccagagactgtaacatttgtttaactagtttattcgtacagtgatactgatgtaacctagagaactccaaaagcttctttgatagcgtgtataacacgggaagaaacttcatctccaaacattctaggaaactgtaaatccaaatcttcctctatgctcttctttctgaagcttttatctcttctttccaacaaaaacttctcttcttctcccaccactctctcctctccttcctcctccttcgcgcaacgctcaagccaaacctcaagaacttgcttagcagttggactcacatgctccctcaagatctcctccagcctctccccttcgtccgcgtcgattttaagcatcgaagctgtgggagagaaagcagagcggacaaagagagacggcgagacgtagggtttgatctcggggagcttgaggagtgactggcgatganaatcaagancagtgtcttggtaataggtctggagatagtcagggtgacgaactaagtctttgcgatgagggaggtcgaggatgagaacgagcgacgtgggactgctctgtatgagttcgaccacgaagtttggagcttctgttgaggagtttaggaatgcagagatgcttgttatgttgagagacactcctgtcggaatcttgacgtgtatccaacttcctataacaaaatcaatcggagatgatttctcgccggatctgatgtgaagagaagcttcggcagaaccgttagggttcttgaagttccgtacatccgttgggaggctacagggaaggagttgcgagtggaggcgatcctccaacgtcgacatgagatcagccattagctccctgcgcgagggcgagacgtaaggaaactccatgaatttctgacggaggaggagatcgttttgatccatggactggaattgagcttggactgtgagtactctctttgagaatcgtgacggttttgatcgtatcgaaggtaacggcgagagaaacggagaagaagagtagaggggagtgttgcaaaatatcatcgccatcttttattatatgtggctgtgagtaaaat

SEQ ID NO: 1315 - DNA, 552 bp, Brassica napus
  Clone ID: BRANA-23APR03-CLUSTER12998_1
atccagtttcatcaccaatggcgtcggggtggggaataacggggaacaaagggagatgttacgatttctggatggatttcagcgagtgtatgtctcattgcagagagcccaaggattgctctcttcttcgtgaagactacctcgaatgtcttcaccattccaaagagttccaacgaagaaacaggatatacaaagaggaacaacgtaaactaagagcagcttcaaagaaaggccaagataccggcggtgatgccactcatactagtaatcactagtcgtgaagccaagtttgcatcttccgtaaccaggaagaagaataatcaaagtttcgtgcagattctctgtatgtgttgtgtgtcaaactccttttgattgttttcactttgcttctgcaaatgaatatactgttttttttttccttctcaatttgactgagtatatcctttggctgttcatcaaacagacttctttcatggtaataatttactcttacagttaatcttaattaacataatacattcaccatcaaaaaaaaaaaaaaagggcggccgc

SEQ ID NO: 1316 - DNA, 1168 bp, Brassica napus
  unsure (1)..(1168): unsure at all n locations
  Clone ID: BRANA-23APR03-CLUSTER1308_1
ttccccgtatccttcttgaaatcgatcatgccttgtaagacagcgatctcgtcgtcctcggtccacagtctctgaaaagcagcaggcttcttcgagtcttcgccgatcttcgctcgctttgagttcgcttccttcgaagtcccttcgctgggccgcttccttctctatttggttgccctttttttttttttttttttattgatgtttataatttagagaacaagatgcgatttaacatttcgtttcaggcaagcaagactttaacgatccgttaaaacaaaaaagtaaacaagaaatccagaaccaaaccaaaccggagaaacattcatacggaagcaagtctaaaccgaaaacagagcaccacttcatcttcgattaccatccaccgcctccacttcctcctccgtagccaccgtcaccacctccgtagccacctccatcacgtctgccaccaccaccaccgtatcctccacctccacctccgtaaccgccgcctccacggccgccacctccagatccgtaacctccacctccacgtctgtcaccgtatccaccgccgcctccaccgtaaccaccacctccacggccaccgtatccacctccaccacggcctcctccaccgccgcttcctctagactgagcctcgttgacggtgatggtacgtccgtcgagctcctttccgttcatctcatcgatagcatccctcatggacttctcatccttgaaggtcacgaatccgaatcccctcgatctcccagtctcacgatcgttaatgatctttgaatcgataacttcgccgaactgtgagaacgtcctctctagctcagcatctccggtggcccatgctaggcccccgacgaagcaccggtactctacttctgcagacatttttttgttttaaaacggagaaaaataatgagagagagaaagagacttgtgattttggttcggaggttctgggtaatcgtctcgtgcgactgcctgccgcccggcggatccacttccgccgagcggccgcccccgccgcggggcccctccctcgtgtaaggacctttgaatcgataacttcgccgaactgtganaacgtcctcncnagctcagcatctccggtggaccatgctaggtcgcgacgaaacaccggtactcaacttcagacatttttttttct

SEQ ID NO: 1317 - DNA, 2039 bp, Brassica napus
  Clone ID: BRANA-23APR03-CLUSTER130_1
cctgctccccagtttcttatccgtggtgcttctccgcctcttcgcttcacttctcttgaaaagatggcatcaaccttcactgcaacgtcttccattggctccatggttgctccaaatgcccacaaaacggataagaagcttatgaacaagttgtcttcaagctctttcgggaggaggcagaacgtgttccccaagctcagaagatccagtcctgcagttgtatgtgcagccaaggagttgcatttcaacaaagacgggactaccatcaggaagcttcaagctggtgtcaacaagcttgcagacctagttggtgtgacacttggacctaaagggcgaaacgttgttcttgagagcaagtatggatcaccaagaattgtcaatgatggtgtgactgttgcaagggaggttgaattggaagaccctgttgagaacattggtgccaaacttgttaggcaagcagctgccaagaccaatgatctggccggtgatggtaccacaacatctgtggttcttgcacaaggttttattgctgagggtgtcaaggtggtggctgctggtgcaaaccctgtattgatcactagaggcattgagaagacagcaaaggctttggtagccgagctcaagaaaatgtctaaggaggttgaagacagtgagcttgcagatgtggcagccgttagtgccggtaacaatgcagaaattggaagcatgattgctgaagcaatgagcagagtgggcaggaagggtgtggtgacacttgaggagggtaaaagtgcagagaacgctctctacgtggtggaaggaatgcaatttgatcgaggttatgtctccccttactttgtgacagacagcgagaaaatgtcagttgagttcgacaattgcaagttgcttcttgttgacaagaaaattaccaatgcaagggatcttgttggtgttctggaggatgcaattagaggaggatacccaattttaataattgcggaagacattgagcaggaggctttagcgacccttgttgttaacaagcttagaggcacactgaagattgcagctctcaaagctccaggatttggagagcgcaagagccaataccttgatgatattgccatcctcactggagcgactgtgattcgtgaggaagttggtctttcacttgacaaagctggaaaagaggttcttggacatgcagcaaaagttgtcctcactaaggagacttcgaccattgtgggtgatgggagcacacaggacgcagtgcaaaagcgtgttacacaaattaagaaccttattgagcaagcagagcaagactatgagaaggaaaaactgaatgagagaattgcaaagctctctggtggagttgctgtgattcaggtcggagcacaaactgagacagaactcaaagagaagaaactgagagttgaagatgctcttaatgctacaaaggctgctgttgaggaaggaattgtcgttggtggtggttgtactctgcttcgccttgcttccaaggtggatgccattaaagccgcccttgacaatgatgaagaaaaggttggagccgacatcgtgaaaagagcactgagttaccctctgaaactgattgccaagaatgcaggagtcaatggaagcgtagttagcgagaaggtgctttctaacgataatgtgaagttcggttacaatgctgcaaccggcaagtacgaggatctaatggctgcaggaatcatcgatccaactaaggttgtgagatgttgcttggaacatgcagcttcggttgcaaagacattcttgatgtctgactgtgtggttgttgagatcaaggagcctgagccagttccgtaggcaaccaatggacaactcaggttatggatactgaggagatgggggaatgaagtaactctgtcggaaattgattccttttagcttttgtaatagatgagcaagttgtaatgatttcgaacaaaagaatgtgctgtgtactgaaattttgaaccaatcgtatgaataaatcataattccttagtaaaaaaaaaaaaaaaaagggcggccgc

SEQ ID NO: 1318 - DNA, 1760 bp, Brassica napus
  Clone ID: BRANA-23APR03-CLUSTER133_4
acactagtaagagaaaatggctcggctctcatctcttctctctttttccttagcacttttgatctttctccatggctctacagctcaacagtttccaaacgagtgtcagctagaccagctcaatgcactggagccgtcacacgtacttaaggctgaggctggtcgcatcgaggtgtgggaccaccacgctcctcagctacgttgctctggtgtctcctttgtacgttacatcatcgagtctaagggtctctacttgccctctttctttagcaccgcgaagctctccttcgtggctaaaggagaaggtcttatggggagagtggtcctgtgcgccgagacattccaggactcatcagtgtttcaaccaagcggtggtagccccttcggagaaggtcagggccaaggacaacaaggtcagggccaaggccaccaaggtcaaggccaaggacaacagggccaacaaggtcagcaaggacaacagagtcaaggccagggcttccgtgatatgcaccagaaagtggagcacataaggactggggacaccatcgctacacatcccggtgtagcccaatggttctacaacgacggaaaccaaccacttgtcatcgtttccgtcctcgatttagccagccaccagaatcagctcgaccgcaacccaaggccattttacttagccggaaacaacccacaaggccaagtatggatagaaggacgcgagcaacagccacaaaagaacatccttaatggcttcacaccagaggttcttgctaaagctttcaagatcgatgttaggacagcgcaacaacttcagaaccagcaagacaaccgtggaaacattatccgagtccaaggcccattcagtgtcattaggccgcctttgaggagtcagagaccgcaggaggaagttaacggtttagaagagaccatatgcagcgcgaggtgcaccgataacctcgatgacccatctaatgctgacgtatacaagccacagctcggttacatcagcactctgaacagctatgatctccccatccttcgcttccttcgtctctcagccctccgtggatctatccgtcaaaacgcgatggtgcttccacagtggaacgcaaacgcaaacgcggttctctacgtgacagacggggaagcccatgtgcaggtggttaacgacaacggtgacagagtgttcgacggacaagtctctcaaggacagctactttccataccacaaggtttctccgtggtgaaacgcgcaacaagcgaacagttccggtggatcgagttcaagacaaacgcaaacgcacagatcaacacacttgctggacgaacctcggtcttgagaggtttaccattagaggtcatatccaatgggtaccaaatctcactcgaagaagcaagaagggttaagttcaacacgatcgagaccactttgacgcacagcagtggcccagctagctacggagggccaaggaaggctgatgcttaagagcttacccagtgaacctctactgtaaaaggaagttaaatagtaataaaaaaaagagtaataataatgtacgcaaatgtgactggttttgtagaggttttagaatgttactccttttattactatggaacttcggtttacagtagagggtcactgggtaaggaagttaaatagtaataaaaagagtaataataatgtacgcaaatgtgactggttttgtagaggttttagaatgttactccttttctgaataaaaaaaaaaaaaaagggcggccgc

SEQ ID NO: 1319 - DNA, 1686 bp, Brassica napus
  Clone ID: BRANA-23APR03-CLUSTER134_5
ccttgcgagacagccgtcgcaacgttcggggttctcctcgtcctcaacggctgtctcgcaaggcagtcgctaggggttcctcctcagctagggaacgcgtgtaacctcgataacttagacgttctccagcctaccgaaactatcaagagcgaggctggtcgggtcgagtactgggatcacaacaatcctcagatccgatgtgctggtgtctctgtctctcgtgttataatcgaacaaggcggtctctaccttcctaccttcttcagctcccccaaaatttcaatcgttgttcaaggaatgggtattagcggaagagtggtccctggatgcgcggaaaccttcatggactcgcagcctatgcaaggacaacaacaaggtcaaccatggcagggacaacaaggacaacagggtcagcagggacaacaaggtcaacagggtcagcagggacaacaaggtcaacagggtcagcagggtcaacagggacagcagggtcagcagcagcaagggttccgtgacatgcaccagaaggtcgaacatgttcgacatggagacatcattgccattactgcaggctcttcccattggatctacaacaccggtgaccagccacttgtcattatctgccttctcgacattgccaactaccaaaaccaactcgaccgcaacccaagaacgttccgtctggccggaaacaacccacagggcggttcccagcagcagcagcaacaacaacagaacatgttgagcgggttcgaccctcaggtcctagcccaggcattgaaaatcgacgttaggttggctcaggagcttcagaaccaacaagacagcagaggaaacatcgttcgtgttaagggacctttccaggttgtgaggccgcctcttagacagccatacgagagtgagcagtggagacacccccgtggcccaccacaaagcccacaagacaacggcttggaggagactatctgcagcatgaggacccacgagaacattgatgacccagcccgtgctgacgtgtataagcccaacctcggccgtgtgactagcgctaacagctacactttacccatcttgcagtatatcagactcagcgccacccgtggcattctccagggtaatgcgatggtgcttccgaaatacaacatgaacgcgaacgagatcttgtactgcactcaaggacaagcaaggattcaagtggtgaacgacaacggacagaacgtgctggaccagcaggtgcagaagggacagctcgtggtcatcccacaaggattcgcctatgttgtccagtcccaccaaaacaacttcgaatggatttctttcaagacaaacgctaacgcgatggtcagcactttggccggtagaacctcggccttgagggcattgccactagaggtcataaccaacgctttccaaatttctctcgaggaagctagaaggatcaagttcaacacgcttgagaccactttgactcgtgcgcgcggtggacaaccccagttgatcgaggagatagtcgaggcttaagttaaaacgtttacttttactaataaagtagtgacatggttactattgtaatggtcagtttgtaatcatgtccactctaagtttttaacgtatgtgtaaaatatgtgtctaaagaacacgccggcacgtctcttgtatgtaacccttctaataaatacccccccc

SEQ ID NO: 1320 - DNA, 1616 bp, Brassica napus
  unsure (1)..(1616): unsure at all n locations
  Clone ID: BRANA-23APR03-CLUSTER1361_2
atagtttcaaaatctcaaaaaagaataaaaacaaaacacatctaaaatccaccgacgcgatccgatctcatcataatcatggttgacccggcgaacaccgtcggactcccggtgaacccgacgccgctgctgaaagacgagctcgacatcgtcattcccaccatccgaaacctcgacttcctcgagatgtggaggccttttctccagccgtaccatctcatcatcgtccaggacggagatccaacgaagaagattcacgttcccgaaggctacgactacgagctgtacaacagggacgacattaacagaatcctcggaccgaaagcttcgtgcatctcgttcaaggactcggcttgtaggtgctttgggtacatggtgtctaagaagaagtatatcttcaccattgatgatgattgcttcgttgctaaggacccatcagggaaagcagtgaacgcacttgagcaacacatcaagaaccttctctgtccatcgactcctttgttcttcaacaccttgtacgatccttaccgtgaaggcgctgacttcgtccgtggataccctttcagtcttcgtgaaggtgtaaccactgctgtttcccatggtctctggctcaacatccctgattacgatgcccccacccaactcgtcaagcctaaggagaggaacactaggtatgtggatgctgtcatgaccatcccaaagggaacgcttttccctatgtgcggtatgaacttggctttcgaccgcgatttgattggaccattccactgctgtgtcccacggtctctggttcaacatccctgattacgacgccccaactcaactcgtcaagcctaaggaaaggaacacacggtatgtggatgcagtcatgaccanccccaaagggaacacttttcccaatgtgtggcatgaacttggcctttgaccgtgatctcattggccctgctatgtactttggtctcatgggtgatggtcagcctattggtcgttacgacgatatgtgggctggttggtgtgtcaaggtgatctgtgaccatttgggattgggagtgaagacgggtcttccctacatctaccacagcaaggcaagcaacccgtttgtgaacctgaagaaggaatacaagggaatcttctggcaggaggacatcattcctttcttccagagcgcaaagctctccaaagaagctgtgacggttcaacaatgctacattgaactgtccaagatggtgaaggagaagcttagcgccattgatccttactttgacaagcttgctgatgctatggtcacctggattgaagcttgggatgagcttaacccggcccccaaagcttgagcatcagattaaaaaaaaaaattccccgcagttttggttattagcttaacctatatcatctatcttctttccttccccgttttgttttttttttctgactttccggtgattattcagttcgttttaaagttgccagagtttatttaaatagtgatggtgtgtagttctatttaagaccgatacaatctatactctgagctttttgtttcaataataaaatcatatatatattcctcgagtcaaaaaaaaaaaaaaaaaaaaaaaaaaaaaaagggcggccgc

SEQ ID NO: 1321 - DNA, 854 bp, Brassica napus
  Clone ID: BRANA-23APR03-CLUSTER1445_1
gcttttttttttttttttttcataataaaaacatgacatcatattatttatccatgtctatatgttcagtgatgaagaaaagatacagcagaagaagcagatagctattaaagaaagagccagttacagagagaatgagaatgcgaaacagagggagagagagagagagatcatacagactgacaatctcattgcaagaacttgtcaatgctagacgtgagtgtggatttgggcactgcacctatgattgcgtccttcttctcgccatcgacaaagatcatgatcgttgggatgcttctaacattgtacttgcttggggttgaaggagagtcgtcggtgtttagtttgtagaacttgaccttcccggtgtactgttgtgctagctcattcacgagcgggtcaatcattttgcaaggtccacaccatggtgcccagaagtcgacaagtacagggccgtccgccttgagaactagagaatcccacgtcgagtcgttcactattgaaactatgtcagtagtggtttcctgagcttcgcagacgacgacgacgcctcttcgtaatcgaggaaccctaggttgaatcgaggtcaacgaggacggcgactgagaaagacggattctcaatcctcctgattccggcgacacggcgaagagccggcgagctgagagtgaggaggatgctgcggctttcgtctctgaacggagagagagcggagggagagaggtacaggtgaaagcagcagccatggctaagagagagagatcctcaagaagagaaagagtaaaataaaataatatctagataacgaaactgtggaagagagagtgtggtggcagaaactgaaacagattttt

SEQ ID NO: 1322 - DNA, 770 bp, Brassica napus
  Clone ID: BRANA-23APR03-CLUSTER1465_1
ttttttttttttttttggatgaagaatgctaagtagtattcgctagtcacagagtcaaaaagagcacaatcattgtagtattggtttggccatgtctcaaatagatcgggaatacaacaggaaggcttgcgacctgatgcgtctacaaataagttatgttatttccaaaagatggtaaaaaggacagagaccatttgaacagtcttaagtgatgtcgaactttggaggaaagctaacagaatcagaggtgaagcagcatagaggttttgttggtatacgtcttcgaaactgaaaccaaacgtggtaagccttaggtggttccacttttcatgctctaccgcgcacgagaaaccaaacattgctttcatgtcaaatgcctcttgaagagttcagaaaagtagcgtgtaccgttgtaagctacgaaccacatcaagactaccaccaaaccattgaagaggtatcgttcccaccaatcaagcatgtagagcccgaacgtgacattgtaaaggtagattttgcgttgaacccagttcatatctgatcccacttccaaacaaccaacaagacagagattacaaatctggattcaatgatctgacaattccttatccaagtttcaaaatttaccacgcaaatcccactagaaaacgtgaatacagattttttaaaaaaaaagaaaacccccgagagattcgagatctacgagatggtatcttatctaacctcagagtctcaagtatcgaagagaagaatcaaaattagacggaggc

SEQ ID NO: 1323 - DNA, 1025 bp, Brassica napus
  unsure (1)..(1025): unsure at all n locations
  Clone ID: BRANA-23APR03-CLUSTER1480_5
atttatctttctacgacatggcgacgcaaatcagcaagaagagaaaggtccatccttttatctctttcggtgcatcgaattttgaactgattccttgagtttgtaatagtttgtagcggacggtgtgttctacgcggaattgaatgaggttctgactagggagctagcggaggatgggtactcaggtgtggaggttagggttactccaatgaggactgagattatcatcagagccacccgcactcaaaatgttctaggtgagaaggggaggaggatcagggagctgacatctcttgttcagaagagattcagattccctcaagacagtgttgagctttacgctgagaaggttgccaacagaggtctctgtgccattgctcaggctgagtctctccgttacaagctcctcggtggtctcgccgttcgcagggncttgctatggtgtcttgagattcgtcatggagagtggggctaagggatgtgaggtgatcgtgagtggaaagctccgtgcagcacgtgccaagtccatgaaattcaaggacggttacatggtttcctctggtcaacctaccaaggagtacatcgactctgctgtcagacatgttctcctcagacagggtgtgctcggaatcaaggtgaaggtcatgcttgactgggaccctaagggagtaacgggaccaaagacaccattgcctgatgttgtcatcatccattctcccaaggaagaagaagtaaactctgcacctgctcaggttgatgctccggctgcttttgtacccgaagctcccctcacagccgtagattaccctgagatgatccctgtcgcctagaaaggagtaacttttttttactgctattccatgtgattttgttcttttttttttgttcttggaattagacacctttccaaatcttatttctaaaactatctcaagtttccagtgtgtaatggcttttggatccaaaagtttatttctctttttaattttaaaaaaaaaaaaaaaaaaaaaaaaaagggcggccgc

SEQ ID NO: 1324 - DNA, 1107 bp, Brassica napus
  Clone ID: BRANA-23APR03-CLUSTER149_1
aaattatacaaaaagagttcgagctcttgattacttaattaaaaacaaattttacttctcttttttttatggtcttttgtcatgatctgaaatacggtctttgttgataaatcatatatgccgattttgatttttaagccacctgagagataaattaaacatttatcaaaccaacgaaacatagatctttgtagttacttatccagtttattttttaaaaaattataaagagatttcaacaatgacctcattttctaccttttctgaaatgttgggctccgagtatgagtctccggttacgttaggcggagagtattgtccgaagctggccgcgagctgtccgaagaaaccagccggtcgtaagaagtttcgggagacgcgtcacccagtttatagaggagttcgtctgagaaactcaggtaaatgggtgtgtgaagtgagggagccaaacaagaaatccaggatttggctcggtactttcttaaccgccgagatcgcagctcgtgctcacgacgtcgccgccatagccctccgcggcaaatcagcttgtctcaattttgctgactcggcttggcggctccgtatcccggagacaacatgccccaaggagattcagaaggcggctgctgaagccgccttggcttttcaggctgagataaataatacgacgacggatcatggcctggacatggaggagacgatcgtggaggctattttcacggaggaaaacaacgatgtgttttatatggacgaggagtccatgttagagatgccggccttgttggctagtatggcggaaggaatgcttttgccgccgccgtccgtacatttcggacataactatgactttgacggagatgctgacgtgtccctttggagttattagtgcaaaggttttttttcaattttttcgtataatacttcttttggattttcggattctgcctttttatgggaatctttttttttttggtaatgtggaagctgagtgtgaatgtttaaacaattgtgttatcaaatgctagtatttttttgtgcagcataatcatcttattggctctcctctgcaagaaagaaatttcaaaaaaaaaaaaaaagggcggaaaa

SEQ ID NO: 1325 - DNA, 1204 bp, Brassica napus
  Clone ID: BRANA-23APR03-CLUSTER149_2
tgctgcatgaattcggcacgaggagagaaataaatatcttatcaaaccagacagaacagagatcttgttactcgattaccgctcgagtacttactatactacactcagccttatccagtttttcaaaagaagttttcaacgatgaactcagtctctactttttctgaacttcttggctccgagaacgagtctccggtaggtggtgattactgtcccatgttggcggcgagctgtccgaagaagccggcgggtaggaagaagtttcgggagacacgccaccccatttaccgaggagttcgccttagaaagtcaggtaagtgggtgtgtgaagtgagggaaccaaacaagaaatctaggatttggctcggaactttcaaaacagctgagatcgcagctcgtgctcacgacgtcgccgccttagctctccgtggaagaggcgcctgcctcaacttcgccgactcggcttggcggctccgtatcccggagacaacctgcgccaaggatatccagaaggctgctgctgaagccgcattggcttttgaggccgagaagagtgataccacgacgaatgatcatggcatgaacatggcttctcaggccgaggttaatgacacgacggatcatggcctggacatggaggagacgatggtggaggctgtttttacggaggaacagagagaagggttttacatggcggaggagacgacggttgtgggtgttgttccggaggaacagatgagcaaagggttttacatggacgaggagtggatgttcgggatgccgaccttgttggctgatatggcggcagggatgctcttaccgctgccgtccgtacaatggggacataatgatgacttcgaaggagttgctgacataaacctctggagttattagtactcgtatttttcttaaaattatttttggaatgataatattttattgaattcggattctacctattttttttaatggatatcctttttttctggtagtgtgagaaacgattgtgaatgtttccacaaaagtgttggcaatgttgtcaaatgctgggtattttgtgcagcatagtcatcttggtttccttatatgcagcaactaaattttagtttttaagtaaaaacagaagaggaaagagaatgaatgttattaaataaagaaagaaaaatctaaaggtgggtttagtatgaaaaaaaaaaaaaaaaaa

SEQ ID NO: 1326 - DNA, 1029 bp, Brassica napus
  Clone ID: BRANA-23APR03-CLUSTER1513_1
tgtttttcttgttccccggcggttccccgtcttcgtgttggtcctgggtttcccgacatcttgagcatttattcacttcaattattagcgggagccactaaccgaagctatcaaaacaaaacaaaaacaaaccaagcaaaaccgatttaaaccgatctcaaatcgaataaatccgggttattaattctggaaagtccagtcccagatctcatgacgctcgacaccacggcccattgagccagcaaaaccggcgtacatgttctcgagcagcacattagagagatcgtatttcgcttcaatcaaaggccggttcggtttcttcaaatgcgcgagcccgatcgtaaccgagatcacttttaaattgttgttatactcgatccaagccgcgtacttatctccactgctcaccttcaaatccttgaacaaccaaccgtttcttgtcatgacccaataaccggatttaaccgaagtccccagagtcgaccgaattaatgtcgattccgacatggttatcgttgatgtctttaaaagacttgtcctgaaacacatcgaactcaacagcaaagaggtggttacttggattaccgttactggttcggttcacgagacttaggaagcctaaaccggaaccggcatgttggttacttgggacgacgaggaaggcgaaaccgtgaccaggagtagggtttgtgttgtgtggagtgatggagaaagtgaaagaggtcttgaaagggtaaacagaagaagcgttgttgggaggcttgaaggtgattgggttgatgagaatggctcgaccatgagagaaaggagttttgtctttggtcaatgagagagaaccggaccgggtcgtgccgtcggtgtcgtgaccatactctgcgtctccatgaaatgagaagagatcggtgccgttaccgaagtggttgaatttgaatctgtaagcagaagtgggttgagaggtgaagatagctatgaagagagtgatgaagcagagtgtttgcatggtcatctttgttctccatcgacgcctac

SEQ ID NO: 1327 - DNA, 576 bp, Brassica napus
  Clone ID: BRANA-23APR03-CLUSTER15262_2
atcttatcacttggatctttccagaaaaattcgattctgagagatagagagagaatggagttcacggcagagcagcttagccagtacaacgggaccgactcatcgaagccgatctacgtggcgatcaagggccgagtattcgacgtcaccaccggcaaatccttctacggcgcaggaggcgattacgcgatgttcgcgggaaaagacgcgagcagagccctggggaagatgagcaagaacgaagaagacgtctctccttcccttgaaggtctcaccgagaaagagatgaccactcttagtgattgggagaagaagtttgaagccaagtatcccgtcgttggccgcgttatctcctaagctcaatcatatccttccgatctctggtttgtaactatgatgtgcggatctgtgtgtgcgtttgtgttttcgtgtttgatctgagatgtaataaattggtgttccttactctttaatccttgtgttactcaggatagatctgcgtggtatcagattaaaattgatgactgattgactgaaaaaaaaaaaaagaaaaaaaaaaaaaaaaaagggcggccg

SEQ ID NO: 1328 - DNA, 821 bp, Brassica napus
  Clone ID: BRANA-23APR03-CLUSTER1537_1
gcttttttttttttttttttgaaaacaataacatccattagaataaaaatcagaatgctagacaaacttgaataaaaaacataacacacacaaaaaacttagaacaaacgaaagaggagcttaattagttcctccaagcacacccttaagcttcttaacttctgcatcgctgaggaacgtagtggcttcaacgagttctgaaggcaagtcatttgcaaacaaagcaaacggtagaatctggagccccggagaggagcttccaaaggcaacataggccaaagcaggacctttcccagagttaagctgaaaatgaagaagcccttgaggaaacaccatagaatcacctctctggagagtcttcaagtaaactttgttagcagaggaaataaacccagcgcagatggttccttgtatgactacaagaacctcagacgcaccaggatgagtgtgaagagggatgacaccaccaccggctaagtcaagacgagccattgagactccaagaccattgatgcctgcgaaagcaggggcaaaggctggagtcactgcggctttaatgatgttcgaagtgtttccagctttggcgagaccggagaatgcgaagtcattctcggtgacttggtcagggttcttgcaagagtatcctgatgggctttgaggaccctttggatcagctacacaaaagtcttgaacagaggcaaaagaggtggatgaaactagggagaggatgaagaaaatgtggattatcatcttcattttattatagattatttagtgaagagtcttgaagttattttgaggagagaaagataggggcgtct

SEQ ID NO: 1329 - DNA, 951 bp, Brassica napus
  Clone ID: BRANA-23APR03-CLUSTER1538_1
acacttgtttctctcagtctggtctgcctttttaattctttcttgcccctttctcaaattgagatttgatttaattggtctctcagtacagctttccttgttgtcatcttacaaaaaaggatcaaaatcaaaatggagactccattatcatcaagaagagtcactggatctcaggctatctttcctaccaacaactctgattcgttgagaagaacagaggactcaagcttctctcaaaggaagaacatcaacgcacaagaagacagatcggcactcatggacataaccaacgactcaccgatcgtgggtctagcgatgcagactcctccttcagggttcgtgtgtaagagacagaacagcagaatcatcaagagcacgcctggttctggtgaagctcttctgagaggacaagtcaaaacccttttggaaaaggtcgaagaaggaacagagctcacacattcaataaagcctctccctttcatccatctcgtcacttccccgatgagacttctcgccccaactccagcaaacactcccctgtttccaaacttttcagatgataaagtgcagattaagatcgcatctcccgttgtcgccggacacttgagaacatctcaagtaagctatgttaatcggactttgaagaaaagtgagatatttgaagagaaggaagaaatgagtatgagcataagtcgttctttgctttttgatttcacggataagccagcactatgggatgaagaagaagaggtggagatgactcgagctgaatttgcagggaaacatagtagatttgtgtacaacagtgaagatgatgagattgtagaggccaaaaaagtttgctactgaagaagaagagtcccctaatcaatctccacctaatttcccccaatattgtattgggctgctttgtatttttggtcatgaaagagtgatctaaacaaaacacag

SEQ ID NO: 1330 - DNA, 766 bp, Brassica napus
  Clone ID: BRANA-23APR03-CLUSTER1550_1
gcttttttttttttttttttagctgaacaagtttcaataaagtttatttataaacttcttttacaaagaagcaaaacaaacaacatgaagcttgcttcacaagtctagtactaaaagcttttgtagtgcccttggtactgatactcttcaccatacatggtctcacgctgctcatatcttcttgatttatcagatcggcttaagatcttctggaaagcatcaggtccattctctgcaatgtacttctcagcagctgttaacacatcatctggctttctgaagatatccatcttctttggcacataccaaatgttaatgctctgtgggttaacaaacacaggtctcacaaaatgttcgtagacataagcagcgccgctgaagtaaggaatcacaagccagcaagtcaagatcagcttggcgtatgaccatatcggtacccattcgatgagtttggcgaatgtgagctcgaagagtgtaagtaaggagtaaaggacccagtaagtgagccattgtttgtcatcagcgtgagattgagtttcaattgctctgactgaggcatgtagtggataaacgagactaacaacaggcccagcaagaacatcgaagttcctcaaaagaaccttgaggaaacttccagctccagatcccattctctcaagtttgattttggctctgaatctgattcttactccactacaaacacccggcgcacagtagatcaagatgaagagagagagagagagagagaatgagtgtataattgtgt

SEQ ID NO: 1331 - DNA, 1039 bp, Brassica napus
  Clone ID: BRANA-23APR03-CLUSTER1577_1
atgcaatggaggtcactgcgaacgaacatctattttatgtactttatcttcctcaccttgtgcgaaaaatctcagagctcagctgcaatggaggcgactgcgaatgaaccagctacgaaaagctccaaatcctctccgagagtaacgataccgaacttcttcgtgtcgctctcctcggcatttacgcaaacaccttccgcgcgtacgaacaagcccagttcgcaacttctagcaccagcttcagactccgtcaagttgattcaagacttccatcgttctctactctccgcgaccgagaaattcgcaggtttcttccattcgctcgccgctaagaaccctctgtttcaggaagcggttcgcttgtcctccgggtttcgcggtgtttgcgacgatattcgtttgaggaacactacaagggttaggtttgccatgtcggatcacgggtttgcagctgttctgcctggagattcagttgcaggaacggtggttgctaacgggttgataaacttcctcaacatctacaacaccgtacttgttgtccgtctagtactcacctggttccccactgccccccctgccattgttaaccccctcagcactctatgtgatccatacttgaacatattccggggagtcataccgcctcttggaggattagatttgtctcccattttggccttccttgttctcaacgccttcaccagcagtgctatggcgcttccttgcgagctccccccagctgaaggagtgacttctccatcatcttgtgagacaaagtggatgagaaggaaaaggttgagtagcaaccagaacccaaccccgagctctgcttaaaccttattaaaaaaaaaaaaccctcctcttttttacgcttcatcatgtgacatatacttttcgagtaatttcattcatctgcatctctggattctgagttttattttgtgtaaattttctttaaaaaatgaataaaaagagttgttcctaaaaaaaaaaaaaaaaaaaaaaaaaaaaaaaaaaaaaaaaaaaaaagggcggccgc

SEQ ID NO: 1332 - DNA, 1180 bp, Brassica napus
  Clone ID: BRANA-23APR03-CLUSTER15864_1
ataacgatcagtgagagaaaaaaaaaatggcgatgacgacgatggagatcagggaagaggactggaaggtttgctgcggaagctctgatttcgcgaagctgatggtgaaagcttctccctttaactctttagatgcagcgatcgagtccgcaagagacatctggttcaaccaagtcaacgtcgcggcttggcttgaagccttcgctgctcatcctcagattggcaagtctccttctccttctagcaactccgatttcgctcgccgcagcgtgacggagcagtccagggccttcgccacaacctctgcttctgccttggaggagcttgcagagtggaatgtactgtacaggcaaaagtttggttttatcttcattatttgcgcctccggcaggactcacgccgagatgctcgccgagttaaagggaaggtatgcaaacagaccgatagtggagctcgagattgctgctaaggagcagatgaaaataactgagctccggatggcaaagctcttctccgagaaggctaaagttgtttcacaaactgagtccacaaaacctcaagaagctcccaagagaagcaggccacccatcaccactcacgtcttagacgtctcacgtggtgctccagctgtaggggttgaagtgcacttggaggtgtggaatggtactacaagtccttcctttggtcatggaggtcatggggactggtccatggtgggaacttcagctactgataaagatgggcgtagcgggccactgatggatttggtcgaggctttgaagccagggacgtatagaataagcttcaacactggaaagtattgcccaggaggcttcttcccctatgtttccattgcatttgaggtcacagagtctcagaaatgggagcatttccacgtcccgctgttactttccccattttctttcaccacataccgtgggagctaaagctaaagctgctgctgctgcagtctttaatacatttggtggtactgttatctattaaaatcgctattaaataaaaatctgtatgtgtattttatttgggtttgtgaacttgtggactcaatgcactagtgcagcgtttgcacctccaagcacttgcattctctccccaaaaaaaaaaaaaaaaaaaaaaaaaaaaaaaaaaaaaaaaaaaaaaaaaaaaaaagggcggccgc

SEQ ID NO: 1333 - DNA, 995 bp, Brassica napus
  Clone ID: BRANA-23APR03-CLUSTER1599_2
aaaactctcccactcaactctctcctcaccttgtctcttgctcatactctagagttcttcagctcccccactccgatccattcttcttctctaatctcaggtaaaagatgcaagctgcgattcgttcgtttgtgtccggtggaaacgttgtgaaagcctctctgctgcagcatctctgtgtgatcaacccagcgattcagccttcttctgtgttttgcacgcgctccgagtcgactcagacttctcgtatggaggagcatgggttcgagagcacgaccatctctgacgtcatgaaggccaaaggcaaaagtgctgatgggtcttggctttggtgtaccactgatgacactgtttacgacgctgttaaatccatgactcaacacaatgttggtgccttggtggttgtgaagcctggtgagcggcaatctcttgctggtatcattacagagacgcgtgggctgaggaagatcatagtgcaaggcagatcatccaaatcaacaaaagtaggggacattatgactgaagagaataagcttatcaccgtgacaccagagaccaaggtcctggtcgctatgcagctgatgactgataacaggatcaggcatattccagtgatcaaagacaagggcatgataggaatggtgtccattggagatgtggtccgtgcagtggtgactgagcatcgtgaggagcttaaccgcctaaacgcgtttattcagggaggttactagacgctactagccttgcgtgtgggtggtctggtggttggatgaatctccgaaagctttaagatggatgtatatatatggagtcttggttggttgttgtctgatgtttgtttgtttgttgtttttaatctgctgtttcaattgcttaacttgtcaagactaagctcttgtgctttcccttttttatgctactctctgcaagataataaaaccaaagactcccatctctttttggaaaaaaaaaaaaaaaaaaaaaagggcggccgc

SEQ ID NO: 1334 - DNA, 850 bp, Brassica napus
  Clone ID: BRANA-23APR03-CLUSTER16086_1
cagaagaatcttattaccctacaagactcgttgagttcactctctgtctctgtcgcttgagcttgatcgacgctattacatccgccgttcacacttccgaccaccaagacatgagtcataacccggaggttctttgggctcagcgttctgataaggtttacctaaccgtcgccttacctgatgcaaaggacatttcagtcaaatgtgagcctcagggtctattcactttctctgctcttggcgcccaaggcaagctctttgagttcggcttggagctatatgggaaagttgtgccagagtataggaagaacgttgggctaaggaacatcatattttcgattcagaaagaagagagaagctggtggccacgaatcttgaaatcagaagagaagcctgcaccttacattaaagtggactggaacaaatggtgtgatgaggatgaggaagtcaactctgagacagcctcagatgatgagagtgcatttgttgatgaagattgtgaaagcagcgatgatgatggattgctctatcttccggatctggaaaaggcaagaaacaactagctaaccatcaacaaccaacaaccagccaactctgtttttgaagctgaagaaaaaaggcaaaaggattaagaagtgaagcatagtggttttggatgatttgttttgttttgtactcttcagtaaaccaaacacttgttagttcctgtagtttactcaggtttacctctgatttacgtttttaagggtagacatctttaggctgaatgttgtgacactttatcgaatgcttatggctaatagctttttaaaatatacttttatcaaaaaaaaaaaaaaagggcggccgc

SEQ ID NO: 1335 - DNA, 772 bp, Brassica napus
  Clone ID: BRANA-23APR03-CLUSTER16169_1
aggattttggtatgggggaggagaagaaataggagttgagagagagatggaggaggagttgcttgcgggcgtgccgtgctcttcccgcgccgtcgagtcagttatccgagtttccacggcgggtggattatatggcttttgcgccggacctcataatgctcgcaaactgggtttaagcggcgtttctcaggcttcctatgtggcaaaatccattggcaaaatcgggtttcaatgcggtatagtgagtggtatctttactctgattaactgtggccttcagcgatatcgaggcaagagtgattgggtgaatgctttggtcggaggagctgtggctggagcagctgttgctcttcgcactagaaactggtctcacgttcttaccaccgccggtctcgtctctatttttagtgttttggctaattccaccaggactgatctcaaacaacaacaacaacactaaggtctcggataagtccattcatcaagaccacttgtgtcctggaactggaacgtgacagatgatcataccaaactctctgattcacagacaaatttagttacctgaaccaagtagatggtcggtcttctgtagaccacaatttttttggtcttaccatcctctgtaataatctttgctaagaaaagaaagtgaaactcaaagagactctgtccgaaccaaaaacattatttgaatcagtgggtgactaaaacttgtgggaaaatgtataatgttttttgcaaaaaaaaaaaaaaaaaaaaaaagggcggccgc

SEQ ID NO: 1336 - DNA, 797 bp, Brassica napus
  Clone ID: BRANA-23APR03-CLUSTER1628_1
ggcaaagaagtgagatccaaggagacacaatcaatcatgagctcatcggcctaagagtgcaacgcggtcagacagaacagcttgagaaaggttgatgtcgaaaagctcgcaacgaataggcatctcaatctcatagaaaggattcttcaagacgtagtcggtgtagagttcataaatgtatctaagaaggctctccatgtgaggagttccaggttcacataccacaaagaactttgttcctgggagagactggaagcaatggagatcaaaggtatcggcttggagaagctcgatgccagaacagccattaacaggtgaaagctgctgagaaatggcgtgcattgagtgccataaactggctaccctcaagctatcattcgtgtccatccttccctttgttccacagtccttgtaaaagatcaaaccaccagatttgttgattatgtaaagactgtagatcgctgccatgtctgccgaaagatccacaaatctcagcgagacgatcaagaacagcggaataatacaacaggtcggagaacttcttcggaagccagaccaaagcaaaatggttcttgaatcaagacaaatcacaaacccctagtgatctaaaaacgtcgtatttcagtctttccctcgaataaaattgatgaatccagcgaaattgaacatcaattagatcgtcacttgtaaaagatcaaaccaccagatttgttgattatgtaaagactgtagatcgctgccatgtctgccgaaagatccacaaatctcagcgagacgatcaagaacagcggaataat

SEQ ID NO: 1337 - DNA, 839 bp, Brassica napus
  Clone ID: BRANA-23APR03-CLUSTER16306_1
cgaccagatcaaaagcaaacacaacgagaagtagaacctaaaccttcctagttcaagcagaagtaaaacaataacgagactggatttacacattatcggtgagattcagacatggctcctgtcggtcctcgttccggtgatgccatcttctccagcatcgatcgcgtgaacgcagagctgttcacgttgacgtatggtgcaatcgtgcgccagttgcttactgacctcgaagatgtcgacgaagtcaacaaacagcttgatcaaatgggatacaacattggaatcagacttatcgatgagtttcttgccaaatctggcgtttccagatgcgttgatttcaaggagactgctgaaatgattgccaaggtgggtttcaagatgtttttgggggtcactgcatcagtgtcaagctgggacgcggatgggacttgctgcagtataatcttggaagacaatccacttgttgatttcgtggagcttcccgatacttgccaaggcctttactactgcaacgtcctaagtggagtcattagaggcgctttggaaatggtgtcaatgaagacagaagtgacatggacgcgtgatgctcttcgaggggatgatgcttatgaattgcaggtgaagctactgaagcaagtcgctgaggagtatccgtacaaggatgatgaataaatggtcactcactcctatgtctagtctctttctctatggctcttttttctcttccagaaacacaaactttaagctttgaaactaaacactgttttatgtttggcacaaactgattaatccatttcttagctgttttataaatcaatgtgagaagagttgagcgtaaa

SEQ ID NO: 1338 - DNA, 1386 bp, Brassica napus
  Clone ID: BRANA-23APR03-CLUSTER16408_1
aaatcctgcaaaaaaagcaaaaaaactacccccttcctcttctttcactcgcttcttctcttcttcgccgagcagccatggatgccaaagaagcctcccccaccgatttgaagcaaccgagtgaagcggctgataacgccgccgccgccgcttccatggagacagagaacggggaccagaccaaggagcctgactgtgtctcctctttgattcccgggtggttctccgagatgagtcccatgtggccaggagaggcacactggttaaaggcttgagaaggttttgtttcaagggtattttgattaccaggatttctttgttttacgtgtctgctccaccatggtacgagtttttggtaattgtatggagtattccaactcaagtagtcagacgaatagcgcactatcaagggaaatgatccctcatcttcctttgtgctctttcccttaccctatatgacggtactggtcattcgaggaggaagagtggagggcgtcagtgaggggagttgggcagatggccacctcagctcccttttgtgctcgataccctaacccaaagaaggtgctggtcattggaggaggagatggaggtgtagcaattggattcgaggatcctcgcgtgaacctcgtcattggcgatggtgttgctttcttgaagaatgctgctgaaggatcatatgatgcagtcagtccggactcctcagatccaattggtcctgcaaaggagctgtttgagaaaccttttttccaatccgtggctagagcgcttcgccctggtggagttgtgtgcactcaggctgaaagcttgtggcttcacatggacatcatcgaagacattgtttccaattgtcgtgagatcttcaaaggctctgtgaactacgcgtggaccagtgttccaacatacccgagtggggttattggattcatgctatgttcaactgagggacctgacgttgacttcaaacaccctgtgaaccccattgatgacagcaaatcaagtggaccgttgaagttttataacgctgagattcattcagctgccttctgtttgccttctttcgccaagaaggtcattgagtcaaaaaccaattgaaaagggggaaagaagtagtctggagggtggttgcgtttatcagaataaaaacttttttttttaacaatttttagaatgttatgtttgtttcaagcatgtgtacctgtgacactaatgcaagagtatgtcttatcttagcataatggcattgcacatcacatattagcaaagccctatcaacaagttccttcctttgctttttcattgaaacagagaattttataagctttctgcctcaattatttaaaactccgaatttttggtcaaaaaaaaaaaaaaaagggcggccgc

SEQ ID NO: 1339 - DNA, 1068 bp, Brassica napus
  Clone ID: BRANA-23APR03-CLUSTER1643_1
ctctgctgttggttttgtctcttgttcagttgtactaagatattttctgcgtacggaaacattatctgcttccgacgttatcatatgaggtactaaggtacaatctcatcttcaccctccataacaagacttcgaaatccggtttcccatttaatcttaaattttcacttattttactgttcttcaattctagatatttttcgatagcaaatgaagtactatgtacaatttatcttcacgcaacaaaacaaaaaacttcaagacggtgtcgttttcgtctccgattcaataacaaacccgatcaaagatcatcagccttcgacatggacgataaccgactaggcctaggctgataagcatacctccttttcacctgatgcgaaaaaggccttatcagcgtcgtcaacgctcttctcacccactcgccttcaaccccaccgatcctcaccagataattcgtcatcgccgatctcctcatattcaaactgttcgtcggatacgccgccgccgtcgcggcgcattgcccgtggggattcgcgacgttcttgtgtaaactgcaccggaacgatccggggtgagtcgtcggcgagcacatgcatctcctcctcgaatcggggatcttgttgccgccggagggcttggatagggcaaacgaacctggtttcggtcgagtgaatgtagtgttgtcgatcgaggacggggacgaggagtggtttaggggggaggatgcgcggaggttaatgcgggtaggggaggcggatctgggggggttggagttggtaatgttagttgatgctgaaggtacgggaggagacggaagaggatgaggaggaagcgaagactggtgaagagagagagcgtggcgcagaagcagagggtcgggttctagaggatgaaacggccttttttttattgagagactttaattggaagaagatgtttttgtttttagaagaaggagatgaaagagtaatttgttttcttggagaagagggggaaggtgggtcgttaggatttttttaggctttttttgctctttaggggttcccggaggacagttggttcggc

SEQ ID NO: 1340 - DNA, 741 bp, Brassica napus
  Clone ID: BRANA-23APR03-CLUSTER16633_1
ataagacggagttcgtcaatcagacaaaccgacgtacgaatctccgatgaacggattcgcttcactggccccttccggggcccgctctcccagccggcttcgcctacgtggtcggctttcgccacctggttccaccaccgtactccgtcctccatcctcgtccggtggcatgggcctgccgctttacgccgcttgcgaggccctcgtgcatggacatcgggatgagcgacctgaatcgcctacttactgggctgcttttcgggcctgctgccgggtcgttctgtcctcgggcagtctcctctctcgggttcagctcttgtatcatgtgaagtttgcgttcctcgtctggcttcaacttcccaccgtagatggagcgaaacaaatatataacaaccaccttcgccctttcctaacacgacaccaagttagactggatggactcgtgaatggagtatatgagcaaatggtcaaggtcattaggtcacaccaaggagagatacgttttgtgcgatcaatgattatcagaatcttgggatcagtcaatgaagttgcatcaccaagccaacgacaaggagaaatctcaaacactagccctgaaccagaatctgaatccgatcatgaagactaatagaacaacaaatgtattcatagctttgcagcttttaaacacttatgtcaaacgattgtaatggtcacgtaaatctcgaattacttttagagtggtaaaacaaataagtgttg

SEQ ID NO: 1341 - DNA, 717 bp, Brassica napus
  Clone ID: BRANA-23APR03-CLUSTER1663_1
ttttttttttttttttcgggcaaattcaaatttatcttctcataaataattcgataggcatttttgtgaaaatgaaattctatcaacaacaagaataactgggttactggaaattttatcttcctcttgaaagagctttctcagcagtctccatctcttcaagaatcctcgccttcctcttcgccggtatcggagccgtcggtccaaagctcacgtaatgtcccgacactgcgttcaacgccgcgtacatgtccctgaacgacgctttccccagcagcgctttctctttcctgtacttcgcaacccacgagttcgacacttctctcagctccgccaccgcatccgccacattcggatctgtcctctccatcgagagcgtcgtccgaactttggagatcaccgccgacgtatctttcacgtactcttcgtcttcggcggcagaagccggcgacggagctagaaacgggagagattgcgttagaagaagcgtcgatgcggcggataaggagagcaaatctcggcggaggaggttgtggcgacgtggaggagggagaggaggagatacggaggcggtgatgatcggtttatgcggtggaagaggagtgggcttgagaagagtggctgtcgctgatgctgaagccattgtcggaactcggggaaaggtgttagagtgaagaagagttttgtgtgttttgttaactcagaaaatgttttagg

SEQ ID NO: 1342 - DNA, 1019 bp, Brassica napus
  Clone ID: BRANA-23APR03-CLUSTER1665_1
gcttttttttttttttttttaatggaaattgtgttatgaggatgaatgccaatgaccaacttgaaacattcaaaacaaaaagtgaaagagaagcaaaatgtttttcttgtttgtgtttgagcaaaaagcaatttttaatgtcagcttgagagtctctctgcacatataacaaaagtccaaacccaaatgctgcactaataaaacaccatcattggcaacctaatcggtcaaggaatcttctgacgctgatttcttccaaacgctcgtcagaagtgtttagccggtacatgcaaagaagttgtgggtcttgggactcttgattagcgccggggagctctccttagcggctagcgggcaacaagctagagagtgaaggcactccttggtttctcagctcctcttgtgttctcttcatttcctctggatctatgttttccatcaacttgggcattaagaacactacaacaaccatgaatcccaccataagacccattggactcttcaaaattgccattacattgaaaggctcacgcaactcatagtattggtctgcccgcagtggctccaaaaccagctcagtaagactcctcctggtttctgttagcgttgcttgaactttgccatggtgccgagcgctaacatcaactcgcactggagagaagaagaagcccaacgcataaacttcaatcagatgagtaccagctgtcactttgtggaatgtaaagtatccatcaggcctgaggaaagtaatattctgtccaccattgagtacaactttgatatttgagaatttcgctgcgtgaccaatagcagtgcttgctgggatccttacacgacccgtgatcgtgtaactatcctccgacccagatgagattggcagagtggaggtaaataagaatagagaaatctgaaagacgagcaaagcgacaagggaagtggatctgagaatcggcgccatggtcgtcgtcgaaagccaaaagacgagtttctaaatcattcttcctaaatccttcttcgat

SEQ ID NO: 1343 - DNA, 762 bp, Brassica napus
  Clone ID: BRANA-23APR03-CLUSTER1677_1
ttttttttttttttttaaaaccaagaaagcaatattcaattaaaatgcaaaacccatactcagaagcagggaatcgtttaaaacaagcaagttcttcaaccacattacaattaagtttcaaaaggaagatcacagattcaatatcataatcatctgcctgaactttccaaatccatttattcccaataacgcaaaaaacaacaaatagagagcgactcagagacccctactacaccttacgggatgtcccaaggcttagcttcagggacagccacaaccataccttgaagctcctgcgtcaacacaacctgacacccgagacgcgagtgcttgttcagcacacgtgatctcgagttacgcttcagcacgtactcctcgtcgtaggtacggggcgggagcttctcgagccactcctcagcgatctggacctcgcactcggccgagcaagcgtcgatatcatccaacctatgcgacagcggatcgatcaggccggtgtgggtgagcgcgcggaggagagtctggccggagaggccgatgatgtccttcttgtctccgtcggcatcgatcgcggagagcttgacgattcggtcggagactttcttcgatcctgatgatccggtggatgtggcggaggtgcggacggttagggatccggtgagtggagagaggcggcggatttgagaggagagtttcaggagattcgtcgccatcgtcgttcctcgtttctcaatctcgtcgctgaagaacttttttgtgtttatt

SEQ ID NO: 1344 - DNA, 770 bp, Brassica napus
  unsure (1)..(770): unsure at all n locations
  Clone ID: BRANA-23APR03-CLUSTER1679_1
nnnnnnnnnnggnggnnngnnnngnngctttttttttttttttgtgagataaaattaanactatatcaatgttgtataaactgactgattcttacagagatgataatgatgcaaccacacattaaacagaagaagacgacaatattgaattgaagagtaaagtttctatgagactcgagcaagttccacggctcttttgagtgctcctaagagacttctcatgatcctttcttctcccggaggtgccttatctttcttcctcccattacgcgtcgctcggaacactggtcctgagcctgaaccactctctgtgctctggtataccaaacagtctatgtaaaccggaacatctgttttgccttcatcctccatcactatgaatcctaacctcgctcctccacttattctatccaccttgagaggaacaggaagaggtatgttggctccttggcaaagactgttcgcccactgaaaaaggagagtttcgaatcttgggagatcggtatccataggaagcttcatggtacccagtgaaaccccatcgtcctccacaggcaaagcattcgctactacaaatgtcctcttcatttgcctgcgtgcggcgttcttggtgctcgctgcgccatttgtcgtaggaacgagaagccggagagggttggagggacggagaaggaacttagctggagatcggacgctcacagtagacgggaagaagagagccgctgctgccgcgtaagacattttggtggtgacgagaggatgtgagcgat

SEQ ID NO: 1345 - DNA, 1015 bp, Brassica napus
  Clone ID: BRANA-23APR03-CLUSTER16898_1
atatttctacacagccacacactctaacaaactagcaaaagaagagacgtcactatctttctttcaagcatggcttccatctcttttttatacacagccacacactctaacaaactagcaaaagaagagacgtcactatctttctttcaggcatggcttccaccgctctctccagcgcaatcgtgaacacctccttcctccgccgccaacagacaccaatcagcctcagatccctccctctggccaacacacaatccctcttcggcctcaaatcctccaccgcacgcggcggccgcgtcacatgcatggctacctacaaggtcaagttcatcacaccggaaggtgagcaagaagtggagtgcgaagacgacgtctacgtcctcgacgctgcggatgaagcaggtatcgatttgccttactcgtgccgtgcgggatcttgctcaagctgcgcagggaaagtcgtctctggctccgttgaccagacggaccagagcttcttagacgatgaccagatgaacgaggggtatgtcctcacatgtgtggcttacccaacttctgatgtcgtcatcgaaacccacaaagaagaagccattgtttaaatttctaaacctatctttaagcatcatcgatggaatataataaaacgagaagaagcgtgatgtacaagtcatctttccctctcttcgttactttgctaatttggcttaaccttttgtataagatcactttcgtacatcatattccaaattcctatgaaaatgaaaaataagaaaagttgctgatggcgtatatatttttaattattgtaacctaataaatagccaagctcaaatgggttagtgagaacctcagtctagttacaaaatctggtaagcaaagaaataaacaaatggggtggtggcgcagttggctagcgcgtaggtctcatagctactgagtgatcctgaggtcgagagttcgagcctctctcaccccatatatatatatatttttttttgggctctttccacttctg

SEQ ID NO: 1346 - DNA, 804 bp, Brassica napus
  unsure (1)..(804): unsure at all n locations
  Clone ID: BRANA-23APR03-CLUSTER1716_2
aacaatggctacggctgcgtcttcccttacaatcgcgtcgtccttctccgaacaccgcgactcggattcnttcattgaagtgctcgaacctcccgtataaggccaattcacggagcaagagactcgtcgtaagctcggtttcatcgcccaaagttgagctccgtacaggccccgatgatctcatttcatccctcctctctaaggttgcgaacagcgatggaggcgtgacacttacaccggagcaacacaaggaagtggcgcaagtggctggggagcttcagaagtattgtgtgagcgggcctgttaagcgtccgctcattttcggagattgggacgtggtgtactgttctagaccgacctctcctggtggaggctacagaagcgtgataggccgcctcttcttcagaacaaaagagatgatccaaggcattgattctcctgataccgtcaggaacagagtttccttcactgctcttggttttcttgacggagacgtctctttgacagggaagctgaacgtgttggacagtgagtgggttcaggtgatattcgagcctccggaactcaaggttggttctctggagtttaaatatgggtttgaaagcgaagtgaagcttcggatcacatacgttgatgagaaacttaggttgggaataggctctagaggatcactgttcgtctttaggaggcgtcaatagtaatacattatatgaacttccatgtctcttctctccctgtttttttagttctgtgtcgatcaatgcaaattcactacagaaaaaaaaaaaaaaaaagggcggccgc

SEQ ID NO: 1347 - DNA, 558 bp, Brassica napus
  Clone ID: BRANA-23APR03-CLUSTER17598_1
atattagtttgtttctggattcttcgctcagcgcggcgtgctctcgtcttgtcttcgatctatccgcaggaaacaatggaagcgattaggaatctgaagataaaaacatcaacttgcaaaaggatcgtgaaagagcttcactcctatgagaaagaagtcgagagggaagctgccaagactgctgacatgaaggacaaaggtgctgacccttacgacctcaaacagcaggagaatgtgttgggggagtcaaggatgatgattcctgattgccacaaacgtctcgagtctgctttagctgacctcaagtccactttggcgggattggaagagacaacaggtccagaagttgaagatgcaaagaagactgtcgcggatgtggagatgcagtttcccactgaagatgcctgatttttatccatcctgtgagtcttgtttggtgtgtgttctaagaatggttaaatgctgagtttgacgattattaattgtaagactctcggttttctttcagtgctacaagtgttttcgtttgctaaaaaaaaaaaaaaaaagggcggccgc

SEQ ID NO: 1348 - DNA, 3384 bp, Brassica napus
  Clone ID: BRANA-23APR03-CLUSTER175_4
aaaggagaaagattaactatgattttattcagtaaagcgttacatgcctgtgtcaacgatcgcttctatacgacggtcgttgttgtaaactaggcgtccttaaaaactcaaaaacaaaacagctgccttaaagcgtagaacttcttttgtacattattttttatgacaaaccgtacaaaaccgaacattcaaacgctgttacatcactaactcatgcttcaagcctcgaccctaggcataccgtagcccataggaccactgctttgagtcaatgtggtctcaagagtgctgaacttaacacttctagcttcttggggtgagatctgatacccgttggatataacttcaagtggtaaacctctcatgactgaggtgcgtcccgcgagtgtgttgatctgtgcgttgtcgttgctcttgaactcgatccactgaaactgttggcttgtggcacgtttcacgaccgcgaagccttgtggcacgacaagtaactgtcccttggagatctcttggtcgaacactctttgtccgttgtcgttcaccatctgtatatgagccttcccctttgtcacgtagagcgccgcgtttgcgttcacgttccattgtggtagcaccatagcgttgttatggatggagccacgaagagcgctaaggcggaggaatctgaggatagggagattgtagctgttgagtgtgctaatgtatccgagcgatggcttgtagacatcagcacttgacgggtcatcaaggttttcagtgcatcgcattgtgcacaaagtctcctccaaaccattaccttcttcctgtggttgctgaccgccttggccttgtctcaagggtggtctaatgacgccgaattgaccttggaccttgacgatgttgccacggttgacttgctggttttgaagtttttgagctgtctcgacgctgattttaaaggcttgagccaagatctgaggtgcgaagccattgaagatgttgttttgtttctgttgctgtcggccttgtagccattgctgtccttgtgggttgtttccggctaacaaaaacggtctgaggttgcggtcaagctggttcaggttatttgcgatgtcagcggctgcaacaagaatgagaggctcatttccattgttgtagaaccattgagctacaccaggtggtgtcgctatggtgtcacccgaccgtaggtgctctactttctggtgcatgtcacggaaaccctggccttgaccctgaccctgtccctgaccttgttcctggccctgtccttgtccaaatacaggagagtccatgaatgtctcggcgcatccaggagtcacttttcccattagagcatgtccgtgaacgacgaacgtgagtttgccggcgttcaagaaagtgggcaagtaaagaccctgaggctcaatgacgaaacgctcaaaggcgaagccagagcaacggagctgaggtgcatggtggtcccagacctcaatgcgaccaccctcactcttgatgatctgactcggctcgagtgcattgagttggtcgagctggcactcgttgggccactgctgagcagtgaagccatggaagagggtcaagaatgtgaaaaagtaagagagaagagaggttggacccatcttttttttttactttaattcggacgcgtgggcggacgcgtgggcggacgcgtgggcggacgcgtgggcggacgcgtgggatgggtccaacctctcttatctccttctttttcacattcttggcccttttccatggcttcactgctcagcagtggcccaacgagtgccagctcgaccaactcaatgcactcgagccgagtcagatcatcaagagtgagggtggtcgcattgaggtctgggaccaccatgcacctcagctccgttgctctggcttcgcctttgagcgtttcgtcattgagcctcagggtctttacttgcccactttcttgaacgccggcaaactcacgttcgtcgttcacggacatggtctaatgggaaaagtgactcctggatgcgccgagacattcatggactctcctgtatttggacaaggacagagccaggaacaaggtcaggagggtcagggtcaaggccagggtttccgtgacatgcaccagaaagtagagcacctacggtgcggtgacaccatagcgacaccacctggtgtagctcaatggttctacaacaatggaaatgagcctctcattcttgttgcagccgctgacatcgcaaataacctgaaccagcttgaccgcaacctcagaccctttttgatagccggaaacaacccacaaggacagcaatggctacaaggccgacagcaacaaaaacaaaacaacatcttcaatggcttcgcacctcagatcttggctcaagcctttaaaatcagcgtcgagacagctcaaaagctccaaaaccagcaagtcaaccgtggcaacatcgtcaaggtccaaggtcaattcggcgtcattagaccacccttgagacaaggccaaggcggtcagcaaccacaggaagaaggtaatggtttggaggagacattgtgcacaatgagatgcaccgaaaaccttgatgacccgtcaagtgctgatgtctacaagccatcgctcggatacattagcacactcaacagctacaacctccctatcctcagattcctccgccttagcgctcttcgtggctccatccataacaacgctatggtgctgccgcaatggaacgtgaacgcaaacgcggcactctacgtgacaaaggggaaggctcatatacagatggtgaacgacaacggacaaagagtgtttgaccaagagatctcccagggacagttacttgtcgtgccacaaggcttcgcggtcgtgaaacgtgccacaagccaacagttccagtggatcgagttcaagagcaacgacaacgcacagatcaacacactcgcgggacgcacctcagtcatgagaggtttaccacttgaggttatatccaacgggtatcagatctcaccccaagaagctagaagtgttaagttcagcactcttgagaccacattgactcaaagcagtggtcctatgggctacggtatgcctagagtcgaggcttgaagcatgagttagtgatgtaacagcgtttgaatgttcggttttgtacggtttgtcataaaaaataatgtacaaaagaagttctacgctttaaggcagctgttttgtttttgagtttttaaggacgcctagtttacaacaacgaccgtcgtatagaagcgatcgttgacacaggcatgtaacgctttactgaataaaatcatagttaatctttctcctttaaaaaaaaaaaaaaaaaaaaaaaaaaaaaaaaaaaaaaaaaaaaaaaaaaaaaaaaaaaaaaaaaaaaaaaaaaa

SEQ ID NO: 1349 - DNA, 1201 bp, Brassica napus
  Clone ID: BRANA-23APR03-CLUSTER1773_1
ttttttttttttttttacatgaaaactattgtaaacccatacatcaatacaaattgcacttgttctatgtaaatcacgtcgaataacaagaaacaaaaaccgggggttgaatcccagttaagtattcgaaccacataatcataaaaattccatttatgaagtgtttagttccgggaactgctggcattgaggttctggaagagctcgggaagatgagcgttggtgagtttggttctcttgttgatctcctgcttcttcttcttctgcttgggtttattcgatacaccttggatctgcgcagcagctctcctctgcgcagtgttcatcaccggcttcaaaccaatcttctgcagctccttctccacgtcaagaaggtcgctgggaatgtctatgtcctggaacagagacttgaactcgtcatcaacctcaatctgccctttgaagtcgtttgggtacgcaatgtcctcttgtgaatcagcgtttgacaggaaccatatgtgttttgaagctttcagagcctgtagatcatccatgacattggggtaagcgtctttgagatcaacagccgcaatgccagcaggatatttctttatcagcgagagaagctggttcttgtctttgacatcatgcttagccttgtaagagaacctccttccgtcataataaactttgggattgttcctgagactatcaaagacagctttattggaaagcatatcaacataacacctttcgttaatctgctccggtgtgaaggcttgtcttgtctcaaagagaagctcaatgacacgcttgatttgagcaccgacagggcctttcctgatgctgttgataaactgaagacgctcggtgtcgttggagaatttgacaggaggagtaggcttgaggctaggggcagcagggacagaggagggcctggaaggacccgaaggtgctcgggaagcattgatgctggagagtgtagattggcatctttcttgctgtttcttgaatctgtctagctgtccctttagatccattacccctttggaggagagaagaatcaaagaaggattagaaaacggaaccagagagaggatgatatgatagggggagctttggtctctcgaatttgagagagagaacgagggtggtctctcctctctttcttgatttttatttaccccatcagacgttttcgtttttcttataacacaataat

SEQ ID NO: 1350 - DNA, 962 bp, Brassica napus
  Clone ID: BRANA-23APR03-CLUSTER17902_2
aattaatcagtttcgtgtgtttcaaagaagaagaagaacagatcgagacggagatctcgaaagagatttatcatctcaaaatcgttcgagttgagtaggtttatttcaggtaaaattatcaaaaatgggttactggaattccaaggttgttccaaggttcaagaagatattcgagaagagtagtgttaagaaagctgccgctgctgaagcttgcaagacctttgatgagtctaaggaagcaatcaacaaggaaattgaggagaaaagtcgaccactcctcccgaaggtcgtggagacctatgaggccacgtctgctgaagtcaaggctttggtgagagaccctaaggaggctggtttgaagaaaaactcagcggctgtgctgaagtatctcgaggctcttgtcggcatagaattccccggatcaacggctgtgaaagaagctgcctctagcttcggagctggctatgtctccggaccagtcacgttcatattcgagaaggtatgtgtgttccttccagaggaggttaagacacgggaagtacctgtggaggaagtgaaggccgaagaaccggccaaaactgaagaaccagtcaaaaccgaggagccagccaaaactgaagaaccggtcaaaaccgaagaaacaagtggcgagaaggagaaggagattgttgaagagactaagaaagaagagatcgttgcaacctcggtcgttgaggagaagaaacctgaagtagaaaaggaggaggagaagaagcctgtggtcgaagaagtgaaaaaggaagaagctgctccagctccagcggtggttgaaactccggttacggcaccagaaacaacgacaccagcgccagtggctgagccaccaaagccttgattcgtttcaagatggtatgattgctttctcttgtatgaaaacatctttgtacgtaacaagaagaaaaaaaaaaaaaaagggcggccgc

SEQ ID NO: 1351 - DNA, 1103 bp, Brassica napus
  Clone ID: BRANA-23APR03-CLUSTER1798_1
cggtggccgcggcttaagcgaatccatctttatttggacttcttcatgcgggtacatcagagtcacactagttttaaatcatctacttacaatgtattactcatatccataagatctcacaaacagcacaggctcttgctctatatcactttaagctctctcagccattcggtgtggggcgggcagggttcaggtttcccttctgcattcgctttctctgagagcgaataaaaccaaccattcctccatttaaattctttaacagcggccgggcaatgagctacagctcgagaataagcgcacagtctctccaccatatcctcttcaaaggtcagtcctttctctgcagatgcagcagctgcaagttcttggatcagtcttgacacttcatctctgtactcgttctccaccgtgcccacacttgctcctgggggacgagctccaacaagcccgaaggcgcaaatccatatgagtttctccaacatctgcttctgaaacgattctttgtcaagaaccttgcaagagaggccaccagattgcaaccttgcagctacagcagaagcccattttccataagcagcagttaaaccttcagggttagtgtcagtctttccatcaacgggaggctcaccaagctttgacacagcgaaataagccaacacttggtctgtatcacccaaacctttgctctcaaaccaaggctccatcattccattttggaagaacaccaaatctttccatctagactgaggagtagcttcaagaacagcatcaagatcatcattcctcgtacaaaccaaaatgggtccttcgaaatcaaccggaaccgcttctcctctcttcaccaacacgtcatcgccactacccatctcctgcaacgctcttccgactcttcctccgcctacgatcacagcaggagccacctttttagcggtggaagcagaggaggcggcatagccactggcacgacgagtttaagagattcagagcgacgggggagagagaggcgagtgggaatggaggaggaggagagcaaacagagtggtgctggcgttagccattggcgatgataatgagcttttctgacgacaaatgttgtcggc

SEQ ID NO: 1352 - DNA, 633 bp, Brassica napus
  Clone ID: BRANA-23APR03-CLUSTER18130_1
attcataaagaaaagaagaggagggagacgcaatctttttgttcttttatggttttggaatcgatctgtaatctcattctgactttgatccaatcgcttcttatctagaaacccgacccgaaaagccatgagagtccatccaattcttaacaacaacacattgatccaccaccaccaccatcatcaccataacccgacccgagaacccggaaagaatctccgtcgcttacctcacatcttcaaccgcgttctcgagcttccgctaaggtccgaagcagacgtctccgtggaagagaaacccgattgcttcagattcgtggcggagacggacggtcttcgcggcggcggaggggagatgacggcgtatatggtggagatccatccgggtattaccaagatcgtcgttaggacaaatgggttgtctttgggtttgtcgttggatgagttggagcttgatgtctggcgttttaggcttccggagacgacgaggcctgagcttgttaccgtggcttgtgttgatggggctttggttgttacggttcctaagatggtttcagaggaagatgatgatggttttggacaaggtgtgggaactgggaggctagttcttgttttgtaaaatcgagccatgtc

SEQ ID NO: 1353 - DNA, 779 bp, Brassica napus
  Clone ID: BRANA-23APR03-CLUSTER18168_1
agaacgccaaagcgagccaccatcttctctatctcgccgggcggattattacagaagagagatggatcagatactgaacaaggtgggctcttattggttaggacaaaaggcaaacaaagagttcaattccgtcggtgacgactttaattcattgtctagcagtattgaaggaggtaccaagtggttggtcaacaaactcaaaggaaaaatgcagaagccattacctgagctgctaaaggaatttggtttaccggttgggatctttccacaggacgccacaaactacgagttcaacgaagagacgggcaagttgactgtcttcatccctgagacctgcgaggttgggtacagggattcatcggtcctgcggttttcgacaacggtgacgggttacctggagaaagggaagctagctgaagtggaaggcttgaaaacaaagttgatgatttgggtgaaagttacttgtatctcagcagacccatcaaaggtgtatttcacggcagggatgaagaaaagcaggagcagagatgcttatgaggttatacggtgtggtgttagtgttgataaattctaacttatggtaccaattaataataaaacgaatgttaccaagttagtttttgtatgtatgcttttagcactttgtgttaaacaacacctgatgaagcaaaccttttacttattaatgtgtaagaatgttggtacttgaattgtgttgcagtaagcagagatcaagcacaaatattttactttaaaaaaaaaaaaaaaagggcggccgc

SEQ ID NO: 1354 - DNA, 1299 bp, Brassica napus
  Clone ID: BRANA-23APR03-CLUSTER1817_1
atctcaagtgccaatcaaccacaacagcttatttttcctcccccttctccattttctattgatatcctccctcccagtacctctccctcccatcacaaattatctcagctcatcatttctttttctgggattctcgctgcggagcgaagcttctgggtatcaattagaatttcgttaatggagaaagggatctttttgttgctgttggtgattctgtttgggaatttaatgttcaccggcgtatccgttagggttccgatttgtgctatgaggtctgttaaagattacgccttagggtttcgagagcagacctgtccattttatggtgatgaattagccgagcgtcctcatttcgttgccgtcactgagggtgatgagcgttggttgcaaacagctttggatatgattcataagaacaagtgtgactatgtggctttgctcttctatgcatcatggtgtcctttctcaaggtcttttactccgagttttgatctcatctcttctctctactcatcaattcctcactttgcaattaaggaatcggccgttaagccaagtactctctctaagtatggagttcatgggtttcctactctcttacttatgaattcaactatgcgggcacgataccgagggaccagaatgcttgattctcttgttgctttctacagagatgttactggcattgaaacgctggataagacttctctcgagaagagcttattggttcctcatctcgggaacgaaaacaacactgagccagagaactgccctttcacatgggccagatcgcctgagaatatgcttcgacaagaaacctatctaactcttgctactgtattcgtactgttgagattgctctatttcgttttccctgcactggttgtgtttgccaagtttacttggccacggattgctcaaaacatgggattagaaagcctgcaagaacatacggtcgggtttctgagccgactatgcatgtatcttagagagccttgcaagaggagcaatctgcagggaggagccatgaacgctagagcatgggcctccaagtctttggcaaccgtctcaattggggactcgagctcatcaaacagagcaagttcagcttctcattgacttgaaactttgtaatcacctaaatgtttgggcatatgctacagctctttcctgtataatcagcagttcctctggagaggggctaattcatagctaaatattttgtagcaaatattatataagtcagttcctgatttttctgccaaaaaaaaaaaaaaaaaaaaaaaaaagggcggccgc

SEQ ID NO: 1355 - DNA, 1288 bp, Brassica napus
  Clone ID: BRANA-23APR03-CLUSTER1827_1
atttttttgtattgtacccagtgtgactccaaaaaaacacttcccaggttttctttttcctgatcggggctttaagagagaaagggatagagagtttgcccgcaccctagctctccaaattccctttcttgtccccgtcgtcttcgtttctgcctttgattgtgctccttgttttcactattcctccaaacactggatagcgagtttcgattgagcgtattccgaggattcctagctggttaagctggtgctgcttactcaccctgttcccaaattcgttgttgaggttccttctcctcctactgcttcaggtgtttcaagcctgcgacataggaaaaacacaagctcgcaaggtcgcggaaattaagttttgaagttccatacttctacctcgcatgcttcggttcttccgcttggttaactcttcagctggaaggaaacgtaaggtccaggggagggtgttatcaaggagaggactcttacaacctatgctcctccacaacgccagattcagatcttggacgcgatgtacccgcaatgaagactttcccatcatttcagggagatgcgtgtttcaggcagatgcggtctggtgacccgtccgctgttaagggaccaaagggaaggttcaagtatcagccaggtcagtttagggcatttggaatgcttgctggaggctcaggcatcactcccatgttccaagtagcaagagcgattcttgaaaacccaacagacaagacaaaggttcacctcatttacgccaatgtcacatacgatgacattctcttaagggaagaattggagagtctaactgccaattatccagaccaatttaaaatctactatgttttgaaccagcccccagagacatgggatggtggtgttggatttgtatcaaaggatatgatccaggctcattgccctgcacctgcatccgatattcaggtcttgagatgtggaccaccaccaatgaacaaggccatggctgcaaaccttgaagctcttggttactctccagagatgcaattccagttctgattggtccctaaaagatggaactatttaaaaaactcatttctctgatcaaataatttttgttactgagactggtgtcttaatttgagttagacttgtatttcagttgtgttatcccattgggagttccggtttattgattaacgatttggttaggcatattgtttacatgtaccggtttggtttgatatcatataaagacttgtcacttgatagtgacatccgcaaaaaaaaaaaaaaagggcggccgcta

SEQ ID NO: 1356 - DNA, 525 bp, Brassica napus
  Clone ID: BRANA-23APR03-CLUSTER18439_1
atatcttgcaagagattttccatcctcaatacctttaatcttcgcacttctcttccctctctctactctctattacttcacaatcccttcgaacatatatgcaatcaaacatatttatacgcaataatatttaatggggaggcagccatgctgtgacaagttagaggtgaagaaagggccatggacaacggaggaagacaagaagctcataaacttcatactcaccaacggccattgttgctggcgtgctttgccaaagctggccggtctccgccgctgtgggaaaagctgccgcctccggtggaccaactacctccggcctgacttgaagagaggccttctctctcacgatgaggaacaacttgtcatcgatcttcatgctcatctcggcaacaagtaaacctaaatactaattatatgctagttccacataattcttacgcgaagctttacaggtatcttacattgaagcttaaaacttctcaaaatacgtctagtgttttacgttaactaaaagtaagcacc

SEQ ID NO: 1357 - DNA, 978 bp, Brassica napus
  Clone ID: BRANA-23APR03-CLUSTER1878_1
gtctgtttggtagttgactaagcccttggggctgcggtctggtgggccccctcgaagccattgcctttctgtggggccgcggcagcgccggcgccggggccggcagcacttgccccgtcaaccaagactctgtattgtccggtggctcccacggtctcaaactcctgggcctgcttcaccatggccatctcagcagtagatggaggccccggcacgtgtccggcgatgcctagatctctgcctcgctgcccgccctcgtttgcgtgtcgctgtcgaccgcgaccggctccagacaggggctgggacgccccgccaccttctcccctctgtccctgggcgctttccgcagccccggctttcgcgctcgccgccactcgcctcctcgccgcggcgttgatttcgttcatggcgcgtttaacctgttggtcaggctcgatgtcgatgataagggtttgaaggatctcataaccataagcagtcatggctttgtctagctcttcttccacggatttggctatttcattcttctgctcgaagacatcgtccaagttcagcttgggtacacatgctctgatcacatcgaagacataggctttgatttgggaagtaggattgctaagtctgtagaaagcatcacttgccttgtcaaccaagactctgtattgaatggatgcaaccactgtcacaaacacattgtcctttgttttggtttcgcattgaacgtcgagctgctggagacgaagggtgagatgaccggcgacataatcacctatgacccagggcacaaactggagacctgggttaagaactttttgaaatttgccaaatctctccttgatggccacatctgattgcttcaccagcacgcagcacaaaaggttccccattacctcctagtcttaggataagatcaagaatgaatgaattgtatatatatgtctctgtcttttccctctgtattgctctgtaaaatagttt

SEQ ID NO: 1358 - DNA, 768 bp, Brassica napus
  Clone ID: BRANA-23APR03-CLUSTER188_15
gaagagttaagagaaggaagaagaagtagtcatggcttactctatgctctcctccgccgctgttgttacctccccggctcaagccaccatggtcgctccattcaccggcttgaagtcttcctctgcattcccagtcacccgcaaggccaacaacgacattacctccatcgttagcaacggaggaagagttaactcgatgcaggtgtggccaccagttggaaagaagaagtttgagaccctctcttaccttcctgaccttaccgaagttgaattgggtaaggaagtcgactaccttctccgcaacaagtggattccttgtgttgaattcgagttggagcacggatttgtgtaccgtgagcacggaagcacccccggatactacgatggccgttactggacaatgtggaagcttcccttgttcggatgcactgactctgctcaagtgttgaaggaagtccaagagtgcaaaacggagtaccctaacgccttcatcaggatcatcggattcgacaacaaccgtcaagtccagtgcatcagtttcatcgcctacaagccaccaagcttcaccggtgcttaatttgctatgacattcacataataatctctgctcatttcatttccaattgtctgtttcttttccctttggttttctctttctcagacattctatatcggattgtcaatgtgtgattgtgaacatgtaatctctatattgcttcttcaaaaaaaaaaaaaaaaaaaaaaaaaaaaaaaaaaaagggcggccgc

SEQ ID NO: 1359 - DNA, 929 bp, Brassica napus
  unsure (1)..(929): unsure at all n locations
  Clone ID: BRANA-23APR03-CLUSTER188_24
aagagttaagagaaggaagaagaagtagtcatggcttactctatgctctcctccgccgctgttgttacctccccggctcaagccaccatggtcgctccattcaccggcttgaagtcttcctctgcattcccagtcacccgcaaggccaacaacgacattacctccatcgttagcaacggaggaagagttagctgcatgcaggtaaatgtcactagagagtttacagttaggcttgtcttttattacacgcaactggtagattcgaacagaatcctattcaaaagnacntttagaaacctaggatcgttaaaaggtctaaacagtatgtacaaaagtgaactaatatttcattaactggaaatacgattcgtaggtgtggccaccagttggaaagaagaagtttgagaccctctcttaccttcctgaccttaccgaagttgaattgggtaaggaagttgactaccttctccgcaacaagtggattccttgtgttgaattcgagttggagcatggatttgtgtaccgtgagcacggaagcacacccggatactatgatggacgttactggacaatgtggaagcttcccttgttcggatgcactgactctgctcaagtgttgaaggaagtccaagaatgcaaaacggagtaccctaacgctttcatcaggatcatcggatttgacaacaaccgtcaggttcagtgcatcagtttcatcgcctacaaaccaccaagcttcaccggtgcttaatttgctatgacattcacataataatctctgctcatttcatttcgaattgtctgtttcttttccctttggttttctgtttctcagacattctatatcggattgtcaaatgtgtgattgtgaacatgtaatctctatattgcttcttcgtcttggttaaaaaaaaaaaaaaaagggcggccgc

SEQ ID NO: 1360 - DNA, 996 bp, Brassica napus
  Clone ID: BRANA-23APR03-CLUSTER188_26
aactcacactcaactcttcaatccttctagttaagacttggataagaaatggccacgtcagcaatccagcaatcctccttcgctggccaaacggccctcaaaccctccaacgatctcctccgcaaggtcggtgtctccggcggcggccgcgtgaccatgcgccgcacagtcaagtccactcctcaaagcatctggtacggaccagaccgtcccaagtacttgggaccgttctccgagaacacaccatcctacctaaccggagaataccccggagactacggctgggacacagccgggctttccgctgacccggagacattcgctaagaaccgtgagctcgaagtaatccacagcagatgggcaatgctgggagctctaggctgcacattccccgagattctctccaagaacggagtcaaattcggagaagccgtgtggttcaaggcaggatcccagatcttctcagaaggaggtctcgattacctcggaaaccctaacttgatccacgcgcaaagcatcttagccatatgggcttgtcaagttgtgctcatgggtctcatcgaagggtacagaatcggaggtggtcctctcggagaaggtcttgacccgctttaccctggaggtgcgttcgaccctttgaatctggcggaggacccagaggccttcgctgagttgaaggtgaaggagctcaagaacgggcgtcttgccatgttctcgatgtttggattctttgttcaagccattgttactggtaaaggtcccatcgagaacttgtttgatcatttggcggatcctgtggctaacaacgcctggtcttacgctaccaactttgtccccggaaagtaatttaattattgtatggatttgcttccccgttttatctactttgtaaaacccattaatgtattgttcgtgtttatgtacttagtgactggttcggttcttttcattgaatggttagttatttggcaaaaaaaaaaaaaaaagggcggccgc

SEQ ID NO: 1361 - DNA, 1000 bp, Brassica napus
  Clone ID: BRANA-23APR03-CLUSTER188_28
aagagaaggaagaagaagtagtcatggcttactctatgctctcctccgccgctgttgttacctccccggctcaagccaccatggttgctccattcaccggcttgaagtcttcctctgcattcccagtcacccgcaaggccaacaacgacattacttccatcgttagcaacggaggaagagttagctgcatggaaggtaaatgtcactagagagtctagagctaggcttgtcttttattacacgcaactggtagattcgaacagaatcctattcaaaagtacatttagatacctagaatcgttaaacagtatatacaaaagtgaactaatattcattaattggaaataccgattttgtaggtgtggccaccagttggaaagaagaagtttgagaccctctcttaccttcctgaccttaccgaagttgaattgggtaaggaagtcgactaccttctccgcaacaagtggattccttgtgttgaattcgagttggagcacggatttgtgtaccgtgagcacggaagcacccccggatactacgatggccgttactggacaatgtggaagcttcccttgttcggatgcactgactctgctcaagtgttgaaggaagtccaagagtgcaaaacggagtaccctaacgccttcatcaggatcatcggattcgacaacaaccgtcaagtccagtgcatcagtttcatcgcctacaagccaccaagcttcaccggtgcttaatttgctatgacattcacataataatctctgctcatttcatttccaattgtctgtttcttttccctttggttttctctttctcagacattctatatcggattgtcaaatgtgtgattgtgaacatgtaatctctatattgcttcttcgtcttggttactttccgatggctaaaaaaaaaaaaaaaaaaaaaaaaaaaaaaaaaaaaaaaaaaaaaaaaaaaaaaaaaaaaaaaaaaaaaaaaaaaaaaaaaggggcggccgttttaa

SEQ ID NO: 1362 - DNA, 1014 bp, Brassica napus
  Clone ID: BRANA-23APR03-CLUSTER188_31
ctcacactctctcttcaatccttctagttaagaagacttggataagaaatggccacgtcagcaatccagcaatcctccttcgctggccaaacggccctcaagccctccaacgatctcctccgcaaggtcggtgtctccggcggcggccgcgtcaccatgcgccgcaccgtcaagtccactcctcagagcatctggtacggaccagaccgtcccaagtatttgggaccgttctccgagaacacaccatcctacctaactggagaataccccggagactacggctgggacaccgccgggctctccgctgacccagagacattcgctaagaaccgtgagctcgaagtaatccacagcagatgggcaatgctgggagctctaggctgcacattccccgagattctctccaagaacggagtcaaattcggagaagccgtgtggttcaaggcaggatcccagatcttctcagaaggaggcctcgattacctcggaaaccctaacttgatccacgcgcaaagcatcctagccatctgggcttgtcaagttgttctcatgggcttcatcgaagggtacagaatcggaggtggtcctctcggagaaggtcttgacccgctttaccccggaggtgcgttcgacccgttgaatctggcggaggacccagaggccttcgctgagttgaaggttaaggagctcaagaacggacgtcttgccatgttctcgatgtttggattctttgttcaagccattgttactggtaaaggtcccatcgagaacttgtttgatcacttggcagatcctgtggctaacaacgcctggtcttacgctaccaactttgtccctggaaagtgattaattatcgtatggatttgcttcaccgtcttatctactttgtaaaacccattaatgtattgttcgtgtttatgtacttagtgactggctcttttcattgaatgggtatcaaacaataagtaaaaggatcagctagccaaaaaaaaaaaaaaaaaaaagggcggccgc

SEQ ID NO: 1363 - DNA, 839 bp, Brassica napus
  Clone ID: BRANA-23APR03-CLUSTER188_48
agggccttttcctcttgcggttctcgttatatatagataaccaaagcgatagacaaacaagtaagttaagagaaaagaagaagaagaagaagtagtaatggcttcctctatgctttcctgccgctgctgtggttacctccccggctcaagccaccatggtcgctccattcaccggcttgaagtcatccgctgcattcccagtcacccgccaaagcaaacaacgacattacttccattgcaagcaacgggaggaagagttagctggcatgaaggtgtggccaccagttggaaagaagaagtttgagaccctctcttaccttcctgacccttaccggaagttgaatgggggtaaggaagtcgactaccttctccgcaacaagtggattcctttgtgttgaattcgagttgggaggcaccgggttttgtttacccgtggagcacggaaagcacccccggaatactaacgatgggccgttactgggacaatgtgggaagcttcccttgttccggatgcactggactctgctcaaagtggttgaaggaagtccaagaatggcaaaacggagtacccctaacgctttcatcaggatcatcggattcgacaacaaccgccaagtccagtgcatcagtttcatcgcgtacaagccaccaagcttcaccggtgcttaatttgctatgacattcacataataatctctgcccatttcatttccaattgtctgtttcttttccctttggttttctctttctcagacattctatatcggattgtcaaatgtgtcattgtgaacatgtaatctttacattgcttcaaaaaaaaaaaaaaaaagggcggccgc

SEQ ID NO: 1364 - DNA, 663 bp, Brassica napus
  Clone ID: BRANA-23APR03-CLUSTER1894_1
tagcatggtttcagcaacagagagtaacatcccgtggagacagcgtgatggaggcagcccccatcacgggacagtgggggtggcgctttcggccagaggtggcagctgcagcggccgcttcagcggcttcttccccttgaagcttcttgagagaaggaggtggtctcacaacaatgctcttcttccactgcctgtcaagtttcctcgacaacctcttccctatcccttcttctatctccctctctcttctcaccgtcaatatcctcgctacttgtttcttcatacggcgaaactcgcttgacttgaactcgttcctagccgatttctggagacggagcataaagagctctcctttaaggtcaatcacctcctcgttaagctcctccgtcgtcttcgctctgatttctttcaactccacctctcttttagacatcatcaccgccagaggtttaccattacaagatatcgccgccgccgcgggcacgcgagcagagacatggtgctggattctgacaccgtggaacgaagaagaggttgaattcgctggaccagttcctcggaggaaagtcacccgcgaggcaatagagagactgagcattgtggctatggcggaagaagatgagttttgaggataacgaaagagacacttctgaggataacgaa

SEQ ID NO: 1365 - DNA, 666 bp, Brassica napus
  Clone ID: BRANA-23APR03-CLUSTER1898_12
aagaaggattacatttcccttcaaggaagatcagatccagcagcaggaccagcaccatacccaccggctccacggccaaacccaggcctagatccagctccagatcccctgaaagaaggctggtaatcagcaggagctccactcttgtcaccaaactctccacctgatctttgtcctccacggtatccatctctgtcaccagacctcctctctccatcagaacgaggtgggccacggggacagtcacccatgggtcgaccaagaggcttctgttgcttcttcaaagtggcgggaacgatctcagaagggagattgaggtaagtcctcagaaagtcaatgccttcgttagtgagaaaccagtagtaatgcatccatgcaaacgtctcacgcacgtactccttagacttgaagctctgcatcaatttgattacttgcagattcgggactccttcgaccaaaggatgctgcgctaaattgaaatcctttttcgcaaacaaaactccctcttggaagaggtacttggagattgcgcggcggttctcctctgacataatcatgattgcgatgagattggtagaggagacgacggagaaggtgtctgcgtgttgtgtatgtgacggcgttctcaccttctactctcgcgcaaccctaatttcttccattttt

SEQ ID NO: 1366 - DNA, 1384 bp, Brassica napus
  Clone ID: BRANA-23APR03-CLUSTER1899_1
ttcaatggcgtctctgcaactctgcgacggttatcttctctccaagccctctgtatctcctcgtttccgtctccctcaacgaatatctcaccgcctcatacctaaagcctccgcttctcctcctccaccaccatcttcatcttcttcgttgtctctcactcggcgggatcttctctaccaatctgcggcggtatcactctccctttcctccatcgtcggaccagctaaagctgatgaacagttatccgaatgggaacgagtcttcctcccaatcgatcccggcgtcgttcttctcgacattgctttcgtccccgacgagcctagccgcgggtttctactgggaacgaggcagactctgttagagaccaaagacggcggaaacacttgggctccacgatcaatcccttcagctgaagaagaggatttcaattacagattcaattcaatcagcttcaaggcaaagaaggatggatcattggcaagcctgcgatcttgctgtacactgctgatgctggagagaattgggatagaattccccttagctctcagcttcctggtgatatggtgtttatagaggcgactggagagaagagtgcagagatggttaccgatgaaggtgctatctatgttacttccaacaagggatataactggaaagctgctattcaggaaaccgtttcagctactttgaacaggacagtctcgagtggaatcagtggtgctagttactacacgggaaccttcagtgctgttaatcgttcaccagatggaagatatgttgctgtttcgagccgtggtaacttctttttgacatgggagcctgggcagccttactggcaaccacacaatagagcagttgcaagaagaattcagaacatgggatggagagctgatggtggtctttggcttcttgttcgaggtggaggactttatcttagcaaaggcactgggatttcggaggagtttgatgaagttccagtacagagccgtggctttggtattctagatgttggttatcgctcagaggaagaagcatgggcagcaggaggtagtgggattctactgagaacaagaaacggaggaaagtcatggaaccgtgacaaagctgctgataatatcgccgctaatctatacgcggtcaaatttgtggatgataagaaaggatttgtgcttggaaacgatggagtgttgcttcgatatgtcggatgaagaaaaggtgaattgagagagattcgttttgtttttgtttgtttcggtgcttctctgtaaagcttgtgctgtgttttgatactactctgcattacaaagtacctgtatacattccaaccaagcatgagatatagataaagttctttttttaaaaaaaaaaaaaaagggcggccgc

SEQ ID NO: 1367 - DNA, 1359 bp, Brassica napus
  Clone ID: BRANA-23APR03-CLUSTER18_1
aactctagcgtcacttgattttgacgattttgactccaaattttccctcagtcctataaaaaaaaacaatttttattagttgtaagcagaaaattgcagattgtgttcaatggcttcttcagtgactctaggttcatgcccatgggttcttcaccatcatccttcaacccaatccaaaacacccagatctagatctccttctctcatcacccttaaacccatcaccctcaccccaaaacgcaccgtttcgtctgcttcccacaccatctcctcttccctcgtcaccaaagaagacaacaacctcaaatccaccacctcctcctccttcgacttcatgtcgtacatcctccgcaaagccgactccgtcaacagagccctggactccgccgtccccctccgggagccgctcaagatccacgaggcgatgcgctactccctcctcgccggcggcaaacgcgtcaggcccgtcctctgcatcgccgcctgcgagctcgtcggcggcgaagagtctttagccatgccggcggcctgcgccgtcgagatgatccacaccatgtcgctgatccacgacgacttgccgtgcatggacaacgacgacctccgccgcgggaagccgacgaaccacaaggtttacggcgaggacgtggcggtcctggccggagacgcgcttctctccttcgccttcgagcatttggcgtcggcgacgagctccgaagtttctccggcgagagtggtccgagccgtcggagagttggcgaaagctataggaaccgaagggctggtggcgggacaggtggcggatataagcagcgaaggattagagttaaacgacgtcggattggatcatttagagtttattcatttgcataaaacggcggcgttgcttgaggcttcagccgttttgggcgggatcgtcggtggagggagcgacgaggagatcgagaggctgaggaagttcgcgaggtgtatcggtctgttgtttcaggtggttgatgatatcctggacgtgaccaagtcgtctcaggagctggggaaaaccgccgggaaagatttgatcgctgataagctgacgtatccgaagctcatgggattggagaaatcgagagagttcgctgagaagttgaatagagaggcgcgtgatcagcttttggggtttgattccgacaaggttgctcctttgttggctttggctaattacattgccaatagacagaactgaaactgtgtgttccttttttttaagttcttgtcggaattattctctctgctcgtgtttcagatcgaattgtagaaatattggtatgattgctatgttatagatttaatattaagagaaaaaaaaaaaaaaagggcggccgc

SEQ ID NO: 1368 - DNA, 834 bp, Brassica napus
  unsure (1)..(834): unsure at all n locations
  Clone ID: BRANA-23APR03-CLUSTER1912_3
tttgcagtctccacgccatttccacanagccacaacacaaatcctctcaagcacacaaaaatggcctcaacagctctctcaagcgccatcgtcggaacgnccttcctccgccgccaaacaactcccatcagcctccgttccctcccctcagccaacactcaatccctcttcggtctcaaatcaggcaccgcacgcggcggacgcgtcaccgccatggctacatacaaggtcaagttcatcactccagaaggtgagcaagaggttgagtgcgacgacgacgtctacgtcctcgacgctgcggaggaagccgggatcgacttgccttactcttgccgtgctggttcgtgctcaagctgtgccggcaaagttgtgtctggatttgttgaccaagtctgaccagagtttcctcgatgatgaccagattgctgaagggtttgttctcacttgtgcggcttatcctacctctgatgttaccattgagacccacagagaagatgacattgtttaaaacaaaagctcgataacatgcttttgatggtttcataatcattgtctttacattttgggttgagtttgttgctacttagtaaaatctattgttgtctgttgtaatttttctggttttggccccccttttggtaagatcaatggataacagtgtaaactatgatcatgcaaattttggcaaacttttttttttttttttggcatcgattctggcaaactttcgatgggaatccaaacattatctttaaacatttgaaaatatagtttctttgaaaaaaaaaaaaaaaaaaaaaaaaaaaaaaaaaaaaaaaaaaaagggcggccgcc

SEQ ID NO: 1369 - DNA, 871 bp, Brassica napus
  Clone ID: BRANA-23APR03-CLUSTER1984_1
agtcgtcgtcttctgtgtaagaactatcttatcatagttttccagattcaacttaatagcattttcaagctttaattcttcagatgcgtcggacattgattctaaacttgctaccaatgtagaccgtaacttcgactctgacgttgccgctgacactgactctcccgagacgttggctattgctgctccagccgtttggattgtccggtctcccggcgattctgctgtctggttccgtcaagggttctatcttggggtatggttcaggattgtccaagaatatgggctttgatggttcatttgcaaaggctttaaagtctccattgaatttgcatgttttgtttggaagacttatgctggtttttcgggagcagaaaaatttgcgttgtttggctgctgaaacaacttatagggaaagttgatgccattatgcacttggatgttggtgggtgcttcaccggtcttgctcttagtttccctggtgctccacaggctcttcttacagagttgcctcacttttggggctttctcttttatccttgagggactaaacaaaagccaaacagccttggctcactctgtctccttaagacaccaaaccggaaactttggagatcatcaacaacgtcctttacaactctccctggctctcccaatccatgaagaaatcaaaggattattttctttctgcaagtccttaactaaacccaagaagatctaatttcgccatgattatccttttcttgttccttatgttctctctgtagattcttaatgattccctgcttttgctgtactttgtgagagaatattttatgaaagatcttttgatataaattttgcaccgtttgctctaaaaaaaaaaaaaaaa

SEQ ID NO: 1370 - DNA, 848 bp, Brassica napus
  Clone ID: BRANA-23APR03-CLUSTER19976_2
aaccaaactcacaaacaagaacaagaagaacaaggattctgctttggatatattacacagagacatatagagagagaggtgtcttgatcttgaaaaaaaatggcttacgagaaagtcaatgagcttaaccttaaggacacagagcttcgtcttggattacccggaacggagcaagataaggaagaacaagaggtttcttgcgttagaagcaacaagcgtcaactacagagcgataacgaggaagaatctacacttcctacgaaaactcaaatcgttggttggcctccggtgagatcttaccgtaaaaacaacaacagtgtgagctatgtgaaagtgagtatggatggagctccataccttaggaaaatagatctcaagacatacaaaaactatccagagcttctcaaggagttagagaacatgttcaagttcacaataggtgaatacagcgaaagagaaggatacagaggatctggagttgtaccaacgtacgaggataaagatggagactggatgttggttggtgatgttccatgggatatgttctcttcttcttgtaagagactcagaatcatgaaaggatccgatgctcttgctttagactctgccttatgatgatgaagaagaaccctttttgatttgattcggcgtttgagtagttgaccacaccaaaaaacaaaacatttcagggttttgttcaatgagataaacccatctccaagtgattttctttttcctttttgtttgatttgttgttagatttgaaggagtttgatgtaaagatacatgaaattttatgtataatacggacatatacacaataaaaaaaaaaaaaaaagggcggccgc

SEQ ID NO: 1371 - DNA, 949 bp, Brassica napus
  Clone ID: BRANA-23APR03-CLUSTER20011_1
aaaaagaccaaaaatcttgtgttttttttaagttttagtctctctttctctctttctctttctctctctctccgtctgtagcgctacaacctcaacgccagcctcgagcgccacgagcagggtccgaagggttctctggattctttgccggcttctaaaactgctgtaactcttgcttgtcttcctggtgtccatttggcccagttggccaagttgctgagctaggagctaacgcgtctggcacggctggcacgcctggagcgctatacaagttagtaaacggtttcgcgggttgcgcatcgtttttctcgtgtggcaagcgtggagcgcaaagagatcactacagtagcgattgtggagactgcctaaaacatttcttctgcgagctctgtgctctgacccaacaataccgtgaactcaagaaccgcggtttcaatatggatcttggatgggcggggaacgtacagaggcagcagaaccaaggcgccgcgatgggtgctcctgtctttcaaggtggcatgaaccgttaagactaattctttaatgtaatttattcggttttataataaacgaggtttagtcctctgtgtgtttctgtaatatgctcgtgaattatgaactgaaagtgattatatatttgtgtaatattcggtcaaagatatgacatttggacaagtcaactttcatcatattatatacacatacgtatttgacttggtttggtcgagactgtaaatgtggactgactcgtctactgttgtcaaaaataaatcgtctacttcgaatattccaatcctctgtatattatttgtgaaacattacaacatctttttgtagtcacatgtcatcaataggatgattcttagaattattagagaaatatgttggttcatctaattatataataaactttttattaaactaaaaaaaaaaaaaaaagggcggccgc

SEQ ID NO: 1372 - DNA, 610 bp, Brassica napus
  Clone ID: BRANA-23APR03-CLUSTER20201_1
atcatcgtcccctcccccccttcgccgccttcggtgtcctccgtgtcccccgtttcttcggtggctcccgcgctgctctccctgctctgccaggtcgggaacggaggtggcggtggccgagttcgccgacttcgttgatcaagttaagctcaccggtggtagacaagtcactggaactcttaagggctacgatcagttgctcaaccttgttcttgatggggctctagagtctgtgcgagatcatgatgatcctttgaagaccactgaccagacaagacgcctcggtttaattgtttgccgtggaactgcagtgatgctcgtctcaccaacagatggaactgaagaaatcgctaaccctttcaatcaaccagaagctctctaaagagtttcttccaaaaacattatccccccttcttcctctctctctatgcatctgagtatctaccataacgtgttatgcatctgagtatctatttatatacttattttggatcatcataggctcttcttcgtgtctttgttataacttttccgaccaaatttgatttcagttgctgtaataaaaaatcaagtaacttttccgacaaaaaaaaaaaaaaagggcggccgc

SEQ ID NO: 1373 - DNA, 742 bp, Brassica napus
  Clone ID: BRANA-23APR03-CLUSTER2064_1
ttttttttttttttttatcacatgatcaaatccttgatttgataaaaaaaagatccaacacaagcacaccagaaaccaaaagcataataaataaaaaaaagttctaacttcttttgaaaaggataagcatagcatagtgttaaggttcgacttgaacaaaaaacaacttaataaacctcttcagtacttcaaaaaggcttaagcttgacggtttctttgcttggcaccggacttggcgactctaaggcctttgctgatcacgctgagcctagcaagtgcagccttcttcaaatcaggcctgtagtagttgtccacaacctggttggcaacagctttggccatcctggggaactccttcttgaggacagacttgttaacagagagcttaggcttgttctgcttcttggtcttggtggtttccaagtacaacaccttggtctttgtctgctggctgaatggtcactgtcttcttgtttgccaaaccagagtgcttgtaggagttgaggttgcagaggttgttgctctccttgctgaactgaaccttggcattgcctcttccgaactgtttgaccaagaaacagttgtttcttttcacgatctcccagaccagctgtcctggaactgttgccatttccatctcctttcacggtgaagaagtaggcgacggcggcaagaagagagagggagaatagtgagcgcgatttaatggtgattatgccgaagcttttatggtggcgccgga

SEQ ID NO: 1374 - DNA, 544 bp, Brassica napus
  Clone ID: BRANA-23APR03-CLUSTER20855_1
aggccaacagagagaccacaagaagaatagaaacttgatctttgctaatcatcctcgggcagttaaagaaaaccagagaaaagaaacatgaggataattgtctccatattgtttgttgcgtcacttcttctaatcacttcatctcttgcttcggctactatctcaggtggtggtggcgccgcggctcttgcgccggaaatcaaagtgggaccagaattagataagtggtgtggagggaagtgtgaagtgagatgcaaagatgcagggatgaatgatagatgtttgaagtattgtggaatatgttgcaaagagtgcaagtgtgttccgtcaggaacttatgggaacaagcatgagtgtccttgctaccgtgacaagctcagcagcaaaaagactcccaagtgtccttgattctcccgtgacaagttctgcagctatgttcgatccaaccaaattttaaataaataaaaagaaagatccggtgaacttaatagaaaaggatcttttgcttatgagtttttctcttctttttaaggtgttaattgag

SEQ ID NO: 1375 - DNA, 1263 bp, Brassica napus
  Clone ID: BRANA-23APR03-CLUSTER2092_1
ctctttctccccctcacatcttttctttcttatctctacataatttatgtgtgttttttttttttgttcttttttttttaaaactcctctttttttttttttacaacatatcaaaaatacaaaactttcttttctttgtttcttccccaccgaataataaaaaaaaaaattcaaaacctttgtagaatggaccttatatgactcccgttctctgcgaaatcttgctctctgggctcacggttaaatctgctctctgccgcagaacccatctcgttcaatctttcctccttcgtttcctctactgaggttatacaacgttttactgaatgttgaaaactcccaaactaaatcctattatttaaaaaaatatactttactttatgtccaattttaaaccaactctaagaaaaaaaatcaatctcattaaatctgtcctttttttttattttctttgtataaatttctttgtttgaacagcttacaacccacaaatctaatccttaaactaaaattaatttacatcatatattaattattttcagacaattaaaaaacccacaaaccatttggcttttttcttttttgttcattgtaagtttcctttcctagaaccttttcgtcgagcagagtataaatagccgacatctatcgacgaactaacggctcagatcaatcagctttcgagcgacaaccgtcagatcttgacgagtctcaccgtcactactcagctttacacgaagatccaagcggagaactccatcttgaccgctcagatgacggagctgagcaccagactcgagtctttgaacgagatcgtcgatctcgtgacgaccaccaacggtggtgtcgatcagatcgacggctgtggattcgatgatcgtacggttgggattaattgcgacggttattacgatgatatgatgagcggcgttaatccttggggtggttcggtttactctaaccaacccatcatggctaatgatatgatgaatatgtattaaattaaaattaattataaaagctagtactattgccccctttttgtttcattttttaagtttagcttttgtgtttgggttgttgtggagatgtaattatcgtatgcatcttgattggttggaaggataaataaacttatatattgggggcatatatataagctatcctttgtcatgtattggtgtgtgcttttttgtttaattaataatataaattataaattttataattgataaaaaaaaaaaaaaaaaaaagggcggccgc

SEQ ID NO: 1376 - DNA, 763 bp, Brassica napus
  Clone ID: BRANA-23APR03-CLUSTER2105_1
acaaagtatagtcagtcatctctcccactcaaaacacaatctccttttgtcattgtctctgttacccatggcgactcttcctctccctataaccactacaatctctctccctaaaccctgcatatccaactccttctccttcccgtttcggaacgtgagtctctcgacaagaactcgccggatgtatctcaccggaggagtcgtttctcggtcgtataaagtggtggtggagcaggacggaaagacgacggaactggaggttgaaccggacgagactattttatcgaaggctcttgaatcggggatggacgtgccgtacgactgcaatctcggcgtgtgtatgacttgtccggcgaaactcgtgaccggaacggtggatcagagcgacgggatgctaagcgaagatgtggtggaacgtggctacgcgcttctatgcgcgtcttatccaacttctgattgtcacattaagatgatccctgaggaagagctcttgtctctacagctcgcaacagctaacgactaaacaatggtcgttagtgcacggtgtggttttgtaattagtgcacggtgtggttttgtaatgaatcttgtcacttgattttcaaacattcagaagggttaatgatatagtcgtgcagactatgaaagtgctttgatataatgtgtcttggcatgtaacgctattaatcattgtgtgtgaaattaatatacatgtcctaataatcaaaaaaaaaaaaaaaaaaaaaaaaaaaagggcggccgc

SEQ ID NO: 1377 - DNA, 1077 bp, Brassica napus
  Clone ID: BRANA-23APR03-CLUSTER21081_1
attcatcgtcgctcaaaacacagaggagagagagaaaaatggagattgggtttctgggcttgggtatcatgggaaaggccatggcaatgaatctgttgaaacatggattcaaagttaccgtctggaacaggacactctccaagtgtgatgaacttgtggagcatggagcttcaatgggtgagactccagctcaagtaatcaagaaatgcaaatacactatcgctatgctctctgacccttgtgctgctctctcggttgttttcgatgataaagatggtgttttagagcaaatctgtgaaggaaaagggtatatcgatatgtcaacagttgatgcagagacttccttaaagatcaaccaggcaatcactgggaaaggcggtcggtttgttgaaggtcctgtttcaggtagcaagaagccggcagaagatggccagctcatcatacttgctgctggtgacaagtcccttttcgatgaaacggtcccagcttttgacgtattggggaagaagtctttttacttgggacaagtcgggaacggagctaagatgaaacttgtagtcaacatggtcatgggaagcatgatgaacgcgttttctgaggggcttgtattagctgacaagagtggacttagctctgacactcttcttgatattctggatcttggtgcaatgacaaacccgatgttcaaagggaaaggaccttcgatgaataagagtagttacccacctgcgttcccgttgaaacatcagcagaaggacatgaggctagctcttgctcttggcgatgaaaacgctgtctccatgcctgtagctgcagctgcaaatgaggcttttaagaaggcgagaagcatgggacttggagatctggacttctctgctgtgattgaggctgtgaaattctccagggaatagtagttaaactattggaaaaaaaacctgaaatgattgttgtcttcccaaagacagagtattactctactcatgatttggccaagaacacattttaatccttcaccaaataagacgtcttttaaaacgcagtccgtaaaaaaaaaaaaaaaaaaaaaagggcggccgc

SEQ ID NO: 1378 - DNA, 1306 bp, Brassica napus
  Clone ID: BRANA-23APR03-CLUSTER21179_1
aaatatcaaatcacatctctacattaatcttatcatcattatccaaaagaatgccttccatggcagaagagccgctcctcaccccaaccccagacagatactaaataaaccacatctacaatcaacctcttcccctcaaaatcatcaacaaacaagcctcctattgccgaagagccgctgctaaccccacccccagcacacattctgcatgttctcactacaactacccgcagctcttggagaagtacaacaaagccgaagcctccttctgggacggcgaggaagtcgacctcctccaagacacccgccacttggaaaacaaccttaaccacggagagcgccacttcatcaaacaagtcctcgccttcttcgccgcctccgacggaatcgtccccgagaatctcgccaccccgttcatgtccgacgtgcaggtctccgaggcgcgcgccttctacgggttccagatcgcgatcgagaatatccactcggagatgtacagcctcttgttagatacgtacatcaaggacaacaaggagagggaccatctcttccgcgcgattgaaaccatcccttgcgtcgtgaagaaggcccaatgggccatgaagtggatcgacggatctcagactttcgccgagaggatcgtggcgttcgcttgcgtggaagggatcttcttctccggtagcttctgctcgatcttctggctcaagaagcgagggctcatgccggggcttaccttctccaacgagctgatctcgcgagacgaaggccttcactgcgacttcgcgtgcctgatctataccctcttgaggacgaagctatcggaggagcgcgtgaagtcgatcgtgtgcgacgcggtggagatcgaaagggagtttgtgtgcgacgcgcttccttgcgcgttggtggggatgaaccgggacttgatgagtcagtatattgagttcgtggcggataggcttttgggtgcgcttgggtacgggaaggtgtacggtgtggcgaatccgtttgattggatggagttgatctcgcttcagggtaaaacgaattttttcgagaaaagggttggtgattaccagaaggcttccgtcatgtctagcgttaacggaaacggcgcttttgataaccatgtgttctcgctcgacgaggatttttagatttgatataatttaattgttgttacggtttgatccttgtaatattccgtgtatgttcgtatttttaattaatggaatactataagctttatctcaaaaaaaaaaaaaaaaaaaaaaaaaaaaaaaaaaaaaaaaaaaaaaagggcggccgc

SEQ ID NO: 1379 - DNA, 1148 bp, Brassica napus
  unsure (1)..(1148): unsure at all n locations
  Clone ID: BRANA-23APR03-CLUSTER2123_1
ataatgtcatagcttaaatgaaacaaatgcaggctaacttattaaattgttgagactgtttcttctctgtgggaacttctgtttctttctatagagcaaataaggcatataacaaagagatggagatgtatttggtttgaagaccagtagtaataatactaataatgttatctaatgtaatggcttgaggtggaagacttgacaagctggtttgtatgaaaccttggaagctgccttttcgaatttcttgcttcctgcttcgttttcctctaaattcgtctgtgagaaaaaacggttccaccacgacgagctacgcattttagccggtcgtccgactttcgacaagtctgtaactttcccctttggcttaccaggattacctgcgaagagaacgacaccatccgaagcaacccgtgcaagttcaggaacggttttgttcaaatacttgggtgagaggtaatccagagcatctgagacgatcacaagagaaaatgactttgaccggtaaggaagagggaacttgatgtcagccacacgtacaaggcctttacgcaaaagacttttgcagttggagtctgcatcctctacatcatatggttcaacaccccatgcttcagtctcttcttccttcaacagagtagagaccactgagcatgtttcaggacccacgtgcaagactttccgcatgctatctccgtaagcgtttttgagaataggaatggctctttgaacttctgatgtgcatgaatagtcacctgtgatcttgctgacttctctgatacttttaaacaaacctggaccgctgaaagcataaccaatgagaaggcatgctcccacgagaacaaggcaaatagaaagcagaggagaggaacgtgatttagagtgcaaagctcctacaaatggaaagcttccactatcccctccacgcctcgtggaacctacttgccttcttgacatgactaagatccctctaagcttctcttagaccttgatttcgaattaaacgatgtttggatccaaagatctcagatccgagaaaatttcgtgtgtgaaagcttttcttctttaagagctctttagctactagcggagagcttcgcagtgttaatgtcatactgttattgtcaagtagcatnacgtcatataat

SEQ ID NO: 1380 - DNA, 936 bp, Brassica napus
  unsure (1)..(936): unsure at all n locations
  Clone ID: BRANA-23APR03-CLUSTER2128_2
caanaagtttaaatttataaaaggtaaatttttatgacgaccattcaaatacattaataatactagtgtcaagtcatgttttgaaaatgtaaatagagatctctcacatacaaaactgtatttgaaacggngtaaacctttganagagttgttggggtttcaagcggtgtaagcgctcttcgcgcccctgtccagcttcttggcatcctcatggatgatgaaaccaatgctgttgttgtaatcaataaactccttccattgtttcccaatgctcacctgagcagcttcgttggaagcatttttggtccaaatggaaatcctctcttgctttcctctaacgttgacaacagctccgcatatctcatctccatggtcaaactgttctccaatcaacgcaagcaaggtgtaaagccagggcttatcagacttctccttcgggaagttcatagtccatttgccaccattagcacaaataggatcctcccacttaggttcgatattgtgtttgaaacagtagaagtcagctccgccagctaacttgctcggacccttcatgttattgaacagactccagaactcctcgacggtggaaaaagtgaacacggatcgcaaggagcttcccaagtcgcctgctttaatttaacagaagggttatcgaaccagaaagtccacgaatgctccaacggatgcgactgcggaaccgcggatttgctcgattcgtctccgtctccttcgccgccggcgatctctccttcctcagcatcgtcgccttcttcatggtatcgatcaatcggacggtctgtggggttagggttcgcttcttccgcaacgacaacaggcttggaagtgtcttctaccgccattgtcaaaacttgcctctttcttcttctctctaagcgatggatgtacttcttcttgcgtagggtttgttaggtt

SEQ ID NO: 1381 - DNA, 3108 bp, Brassica napus
  unsure (1)..(3108): unsure at all n locations
  Clone ID: BRANA-23APR03-CLUSTER212_1
gctgcaggaattcccggatcttttggatttattagccctcctcgattagatatggaacagttgttatcggaagctcaacacaggtggctgaggcctgctgagatttgtgagatccttcggaactatcacaagtttcatattgcaacagagtctcccactcgaccagccagtggttcgctctttctttttgacaggaaggtgcttacatactttaggaaagacggacataactggaggaagaagaaggatgggaaaacgattaaagaagctcatgagaagctcaaggtaggaagcattgatgtgctacattgttactatgcacatggggaaggctacgagaattttcagagacgatgctactggatgctcgaaatagagctgatgcatattgtgttcgtgcactacttggaggttaaggggagccggacaagtatagggatgaaagaaaacaattcaaattctctaagtggcacagcttcagtgaatattgattcagcagcaagccccacgagcagattgtcatcgtattgtgaagatgctgattccggtgatagtcatcaatcaagctctgtcttgcgagcatctcctgaacctcaaactggaaatcgcaatggttggacatcagctcctgggatgcgtattgcttcacaggttcttgggaacagagtcggagaaactgattcccagagatcatttgatgtccaggcttgggatgccgtcgagaatttagtgacaaggtatgatcaaccttgcaacaatttgttggtggaagagcgtacaaacaaatttggaatgttaccagcagagcatctcagaagtcctcttcaaaaccaactaaattggcagattccngctcaggatgatctaccattgccaaaatggcctggttatctggttccacattctggaatgactgatgacactgatctggcgttattcgggcaaagtgcacaagacaattttgagtcattttccagtctccttgacattgaacatctgcaatctgatgggattcctccttcagatatggaaagtgaatatatacctgtaaagaaatccttgttgaggcacgaagatagtttgaaaaaggtcgatagtttttctcggtgggctagtaaagagctaggcgagatggaggatttgcagatgcagtcttcgcgtggagatattgcatgggcctctgttgattgtgaaactgcagcagctgggctctcctttagcccttctctctccgaggaccagcgtttcaccatagttgattattggccaaaatgcgcacagactgacgctgatgttgaggtcttggttattgggacgtttctgcttaatcctcaagaagtaactatatgcagctggtcatgcatgtttggtgaagtggaggttcctgctgagattctagtggacggtgttctttgctgccatgctccaccgcatacagctggccaagtgcccttttacgttacctgttcaaacagatttgcttgcagtgaattacgagaatttgatttcctttctggctctaccaaaaagatcgacgccgctggtatttatggatactctacaaaagaagcatcacttcagatgcggtttgaggagctgcttgctcatagagctttcgttcaagaacaccaaatatttgaagatgttgtggagaaacgaagaaagataagtaagatcatgttgctaaatgaggaaaaagagaatctctttccagggatatatgagagagattcaaccaaacaagaaccaaaagaacgggttctcagaaaacagtttgaggatgaactctatatatggctcatccataaagtgaccgaagagggtaagggaccaaacatactggatgaaggcggacagggtgttctacacttcgttgcagcacttgggtatgattgggctatcaaaccgattttagcagcaggagttaacattaacttccgtgatgcaaatgggtggtccgcccttcactgggctgcgtttagtggcagggaggaaactgtcgctgtgcttgtctctctaggtgctgatgctggggcattgacggatccatctccagagcttccattgggcaaaacagctgctgatctggcttacggaaaggaacacagggggatttcgggttntcttgcagagtcatccttaaccagttaccttgaaaagctaacgatggagtcaaaggaaaacagccctgccaactctggtggaccaaaagctgttcagacagtctatgagagnaccgctgctcctatgagctatggtgacgtaccagaaacgctttccttgaaggattcactcaccgctgtccgtaatgcgacgcaagcagctgatcgtctccatcaagtattcaggatgcaatctttccagcggaaacagctgtctggatttgatgacgatgatggtgacgagattggtatctccaacgagttagcggtttcttttgcagcttctaaagctaagaatccaggacagagtgaagtctttgttcattctgctgttacccacatccagaaaaaataccgtggttggaagaagaggaaagagtttcttttaatccgacaaagagtcgttaagattcaggctcatgtgagaggacatcaggtcaggaaacaatacaaaccaatcgtttggtcagtgggattgctcgagaaaatcattttgcgttggagacgcaaaggtactggactaagagggtttaaacgcaatgcngtccccaaaaccgttgagccagaaccacaatgccctatgattccaaaggagggtgactatgattttctagaaaagggaagaaaacaaacggaggaaaggctccaaaaggctctcacgcgggttaagtcgatggttcaataccctgaagcacgtgatcagtaccgtagactcctcaccgttgtcgaaggcttccgtgaaaacgaggcttcatcaagtttatctgtaaacaacagagaggagccagtcaactgtgaagatgacgatttaattgacattgattctcttttgaacgatgacattttgatgtccacttctcccttgaatgactcgtttgtgtattcattttcattctttcaactttctaactttttgcaccttttctctgtaaatatcataagttga

SEQ ID NO: 1382 - DNA, 869 bp, Brassica napus
  Clone ID: BRANA-23APR03-CLUSTER2176_1
gctttttttttttttttttttgtttttttgtacatctctctattcattaaccatctgtgacacattgttaccttctttaagttaaaaaaaaaaaggctagtaaaaacttatttaccccttagttaaaaaataatgaaagggggaaatagagtaaaaaaaagtaacggaaacctaaagactaaactaccaacactgatccgtctcccatctccgggtcgtcgggtaaacccgactcgtccgacccgtagctccagcgtgcacacgtctccgtcgcgctcccagcgtcgaatcgtagatcgctctcgtcgtcggatccgccagcgtcgcgtaagctttgtggatctccatgaaatctcgcccgtccgactccgacgcgtcgggatggtaaaccttagctaggctccggtacgccgtcttgatctccgtcaaggacgccgtttcgttgactttcagcagttcgtagaggctcgacgctcgccggcgaacggattccgttacggctggctccgcgttgagagtctgcggcgtataagctctaaacgacttagctccggtgggaaaccgcgcgctgccgttgtgggatctggttgacttcggtggatgaaggctagttcccggcgagaagcggagggagttagcggcggaattaactaagattccggacatttatgtaattaatgtaaaattcgaggggaaatttcgaaagaaactgtaaaatttgaagaagcagagagagagactatagatatgagacacattaagaaattaaattataaccagaggggcaaattcgaaagaaattgaatctttttgaaaagaagcaaagcagagaggttcgtgttgaggaagaagatatgaatcacaagtag

SEQ ID NO: 1383 - DNA, 1097 bp, Brassica napus
  Clone ID: BRANA-23APR03-CLUSTER2199_1
ctccttctcttcttcctcgttcctcagatttctactcagaccaatctctgacatttttcttctccaatggcactcctacaacactgttccgtctccgccacctccgcggttcgattgagcttctcatcctccgcaccaccaagggcttctctcagtcttcacccggagaagaagagtcattcccggagaatgatatgcagaactatggtgcaagaggcggcagctcaagggatcccttcggtttacgccagagaaatggagcgtctctccgccaaagaatctctcatcctcgccttcaatgatgctggaggctttgaggctttagttacagggaagatcactgatctacaaaagattgatgtgaacgagaggataacaactcttgagcggcttaacccaactcctagaccaaccacgtctccttaccttgaaggcagatggagttttgagtggtttggatccaacactcctggttcacttgctgctcgtgttattttcgagaggtttccttcttcatttgtgagtctatctagtatggacattgtcattaaagatgctagcacaagagccaccgctaacgttaagctgctaaacatgatagaaaacaaagtcatcctgacgtcgaaactgacagtagaagggcctttaaggatgaaggaagagtatctagagggaatgctagagtcgccaactgttattgaagaagcagtaccggaacagctaagaggtttgttgggtcaagctaccactacgttgcagcagcttcctgaacctgtcaaggatactctagccaatggtctaagaattccacttggtggatcttaccagagattcttcatgatatcttatctagacgacgagattcttattgtaagagatactttgggagtgcctgaagttctaacgagggttgaaacatcgtcttcatcgagcgttatagagaatcttgaatacaacagttaaaaagaacaggtccttgtgttcctctgtttatgtctataaatgtcaaacaaactgaatacaacttactatatatctctccggacacagatatcgtttcattatccattatttaacactttgataaacgaaattaa

SEQ ID NO: 1384 - DNA, 1345 bp, Brassica napus
  unsure (1)..(1345): unsure at all n locations
  Clone ID: BRANA-23APR03-CLUSTER2200_1
cctacatttctcaattattgatatcatcactcaaagaacaattctcagccttattctcttattgcttatccataatgggagaggtccttaagaaggaggcgtacggactggctgtaaaagacgaatctggagttatctcgcctttccgtttctcaagaagggagacaggagaaaatgatgtgaggttaaaagtgttgttctgtggaatttgccacacagatttaagcatggccataaacgagtgggggtttactagttacccccttgtccccgggcatgaaatagtgggcgtggtgactgaagtcggagccaaagtgactaaattcaacgccggagacaaagtgggagttggttatatggtcagctcatgcgggtcatgtgaaacctgcattgatgaccaagagaactactgtccaaaaatgatcctaacgtccggaggcaagtattacgatgacactataacatatgggggttactccgaccatatggtttgtgaagaggacatcatccgtattccagaaaatcttccctttaganctaccgcgccgctactctgcgctggnnccaccgtctattccccgatgaagtatcacgggcttgacaagccgggtatgcacattggtgtggtgggactaggcggtttaggtcatgtagctgtgaaatttgctaaggctatgggtactaaggttacagttattagtacttcggataggaagagagacgaggcgttaactcggcttggtgcggatctgttcttggtgagccgtgacccggaacagatgaaggatgcaatgggtactatggatggtattattgataccgtatctgcttctcatccagttcttccgattcttgatttgcttaaatataagggtaaacttattatggttggtgcacctgataaaccgcttgagcttccggttctgcctctcatctttgggaaaaagatggtggtgggaagtatggtaggagggataaaagagactcaagagatgatggatttggccggaaaacacaacatcacggcagatattgagcttatctctgcggattatgtcaacactgccatggaacggctccagaaggctgacgttagataccgttttgtgattgatgttgccaacaccttgaagcctagtccttaattataaatcttaagaattgaagttccctagaagccttttttttcttgtttggtttgttgtaataagttacgttgtttgtctgtagcactaatattgtgccctataaattgaatcaacttgaatgtaatgtttgctatattaataagctcttgggaagtttacttttaaaaaaaaaaaaaaaaaaaaaagcgcgcccgctt

SEQ ID NO: 1385 - DNA, 710 bp, Brassica napus
  Clone ID: BRANA-23APR03-CLUSTER2217_1
gcttttttttttttttttttaagctaaaactgatcctgatgtcttaattcattatatgaaatgattgatttgtttacaagaaacagcaaccaaaacccacaatatagtatttacaggttcagtacatgaaactggactcgagataacaacaacagctatcatgtgacaaatcacaaatcatctcagaataacacatgcgtttactgccttactggccaagtatatccgctactgatttcttgacaatttgggatagctcctctctgtcgggtttgaacaagagatatcgatatgtaaaccacgttgagaacaagataccaactagttcaaacccagaggagataacaggcaatttgtcgattgccgtgatgatgttaagtgaagcccaaagagccacaatagcagcaaaactcaaaccaataagacctaaacgatcttcagacttatcccaaacattctgaattgaactaatgacgtcgagatcagatgattcagaacttttgccactagctttcaccataagacccatgctatggcttcttctatctcgaataggagaaaatgggagtttctgaactgatgtgaggttaggttttctctgagtgagcagcaatggtggaggcaaacttgcagaaacagacgccatttgagagatttttttctcgttaatctgaggaagaagagaacgtccaagtaattgttatttggat

SEQ ID NO: 1386 - DNA, 1196 bp, Brassica napus
  Clone ID: BRANA-23APR03-CLUSTER223_30
ctcacaccgccgaacttttttacctatagccaaagaggagagttcgagccattatcctgtgagcaacaatggtgaaggcaacaaaggcggagaagaagatcgcgtacgacgcgaagctatgtcagctcatcgacgagttcactcagatcctggtcgtggcagcagacaacgttggatcgactcagctacagaacatcaggaagggtcttcgtggagactcggttgtgctcatggggaagaacactatgatgaagcgttccgttaagattcacgctgagaatactgggaacactgggatccttaatttgatgcccctccttcagggaaatgttggtttgatcttcaccaagggagacctaaaggaagtgagcgaggaagttgccaagtacaaggttggtgctcctgctcgtgtgggtttggttgcgccaattgatgtggttgtccagcctggtaacactggtcttgacccatcccagacatctttcttccaggttcttaacatcccaactaagattaacaagggtacagtcgaaatcatcacccccgtcgagctcatcaaacaaggcgacaaggtgggttcttccgaggccgcccttctagccaagctcggcatcaggccgttttcatacggtcttgtcgtccagtcggtttacgacaacggttcagtcttcagcccagaggttcttaacctcacagaagacgaccttgtccagaagtttgctgctggtatctccatggtcacttccttggctctagccatctctttccccaccctcgctgctgccccgcatatgttcatcaatgcctacaagaacgcattggctatctgtattgccactgagtacactttcccgcaagcagagaaggtcaaggagtacttgaaggatcctagcaagtttgctgttgctgtagcggctgtatctgcggatgcaggcggtggtgcttcggctggagctgccaaggtagaggagaagaaggaagtggttgaggaatcagatgaagaagactatggtggtttcgatatgttcggtgatgaatagattaatatatctatcgagttcacgtttttgtcgttgctatcatttataagtgttgcttcgtttgtagtatgatgttttcaatgttctcgactttggtggccacttcagatttatacatttatctttctagtttgaagaagttttgcttcttgaaat

SEQ ID NO: 1387 - DNA, 1083 bp, Brassica napus
  unsure (1)..(1083): unsure at all n locations
  Clone ID: BRANA-23APR03-CLUSTER22454_1
aaaatttttcgagtattcttccttcttcagcaaatcgaagagcgagcggatagagagggtattgattctgtaagctatggacagagaatggggatcgaaaccaggaggcggaggcgccgcctcggcccagaacgaggccatagatcgccgtgagcgtctccgtcgtcttgctctcgaaaccatagacattgcgaaagatccctatttcatgcgcaatcatctcggaagctatgagtgcaagctatgtctaacgctgcacaacaacgaaggaaactacttggctcatactcaaggtaagaggcatcagaccaacttggctaagagagctgctcgtgaggctcaggaagctcctactcagcctcagccacacaagcgcactgtctctgttcgtagaacagttaaaattggtagaccagggtaccgtgttacaaagcagtacgatcccgagttgaagcaaagatctctcttgttccagattgaatatcctgaaatagaggacaacataaaacccaaacatcgtgtcatgtcttcattcgagcagaaagttcaaccttatgacaagaaatatcaataccttctgtttgcagctgaaccatatgaaaccatagccttcaaggttccaagcacggagatagacaaatcaaccccaaagtttttctctcactgggatccagactcaaagatgtttactttgcaggtgtatttcaagccgaacaagccagacccattcaagcctcagtccactgttgaatcaaatggccttctgcctccaccaccaccgccgcctcaaactcaaccgccaccacctcctccatctggttcactgccaccaccaccacctccgatggctaatggtggtgcgtnctatccaccacctccaccaccaccttctggaggttacatgtgaaagtgaaactaggatgctagaatcaactataaaccgtttgaacacatcactctttatcactgtttgtctcaaagagagtgtactaagatattaaaatctgtgttgacatgggtttttgaagctatatttctgcagatgtattaacgatcttgttatgttttagctctctgttatgt

SEQ ID NO: 1388 - DNA, 734 bp, Brassica napus
  unsure (1)..(734): unsure at all n locations
  Clone ID: BRANA-23APR03-CLUSTER2267_2
gagcgaaatatataacaatggataattgtccaaaacttaaacaaaggacgaacgatgattaatatttatatattgtaaagagttttcactgagacctcattttgttgagttggttcaaagccggctgcaatatattgtaaagaacccaaagcagcgccggtgcaaccacgaacaacaacaactgtcccctgttatctccagctctctccgccgcctccgccgcagctactgcctccggcggcggcgtcaanagccctgacgcggcgagaccatcaccgatgccgccgagacccacgacgactcctttgcttgcgcgcatcttgttgatctggttgagagctggctggaggatgttgaagaggacccacccgatggccgggacgatcgggaggagaagagctaggccgcggttgtcgctgccttccgacacggcggcggcggcgagctgggagatctggtgagcggcgagagcgggttcggagtagctgagggcggagaagacggctccggctagggcggtgcttgtgacggcgagagagacggtgggttttggtggagttgggagggtgatgaagtgttttgaggaggagatgggtttggtttggtttaggggtttaggaggagatgggttcagggacatgcatctggttgatgtcgccatagtcgccgccattgatgatcggagagagggagagacttgaagagtgagtctgtgagatgatttttttgtgtat

SEQ ID NO: 1389 - DNA, 1009 bp, Brassica napus
  Clone ID: BRANA-23APR03-CLUSTER22976_1
atcacaacagagacatatgaaggaggtcttgaagagttcaagggattggttacggtcgcgttttcttgaactggttagtggagagggggagagagcaggtgaggggcatggagaggaggacgggtatgctaaagaagatccataagaaaattactctctccgatactaaggctgatctgatcacggtttcttccaagggcaatcttttcgactatgccacagactcttgcgtggaaagcatacttgaacgctatgaccgctacttgtacaccgaatattaccttgatggtcgagatgtatgataagatgaacatttggttcgcgaacatgattcactcaaggcaaaagttgagctagatgataataagaataagaattgtgttggggaacatgttagaattaatgagtttaaaggagcttcaaagcttggagcatcagctcgatgctgctattaagagcattaggtcaagaaagaaccaagctatgttcgaatccatatcagcgctccagaagagggataaggccttgcaagatcacaataatacgcttctcaaaaagattaaggagagggagaagaaaacgggtcatcaagaaggccaattaaaccattgctccaacaattcttcaattgttcagccccagtactgtttaacctcctccagagatggctttgtggggagagttggggcagagaatggtggtgcatcgtcattgacgcaaccaaactctcttcttccggcttggatgttacctacgacgaatgaatagaattatctatatatgataaaataattaatgcttgatattttcataatatatctcagcatttttatgatcattaattattaatactgatatatgttttagctactctttaaaaaatttatatatatacaatgatggacttacagtgtcaagacatatgtacgatgtcactagattcgatgcgtcttaagaacgaagattgatataaaaaaaaaaaaaaaaaaaaaaaaaaaagggcggccgc

SEQ ID NO: 1390 - DNA, 509 bp, Brassica napus
  unsure (1)..(509): unsure at all n locations
  Clone ID: BRANA-23APR03-CLUSTER23424_2
agtgaatattaacaaacaaaaacctattgatgttagaaatggcagccaaactccacatcccttctttctttagccacaaggccaatgattcgacaacttcatcatcttcctcatattcatcgttgcttgctctgcctcaattcctctgtacaccgtattcatcaggctttacacagttcaagcttcacgccaaattaggtactttatatctctttcaaatcagaattttcctatctagtttttttttattaagagaaagactttctttatccctgatcctgcttaaggtggaggagatggagaagtgaaacctaaagaaaagaagaagttcataaccaaagaggaagaaccagaacagttataagtttttacttacctatcatatccacctctcaatttcctatcacaaaatggccaaattgtgataaacattatatctagaaacaagaaaagtgtaacttaattaanaaagtggcgaattgttgactctntngttgtttattatctga

SEQ ID NO: 1391 - DNA, 3138 bp, Brassica napus
  Clone ID: BRANA-23APR03-CLUSTER239_1
accccagagctctgaggaggttgaggacggcttgtgaaagagcgaagaggactctctcttccaccgctcagactaccattgagattgactctctctttgaagggattgatttctactctgccctcacgcgtgccaggttcgaggagctcaacatggatcttttcaggaagtgtatggagccggttgagaagtgtctgcgtgatgctaagatggacaagagcacggtccacgacgttgtcctcgtcggtggctccacccgtatccctaaagttcaacagcttctccaagacttcttcaatggcaaagagctctgcaagagcattaaccccgacgaggctgtggcttatggagcggctgttcagggtgctattctaagcggcgaagggaatgagaaggtgcaagaccttcttctgctggacgtgactcctctctctctcggtctcgaaaccgccggtggagttatgacgaccttgatccagaggaacactaccatcccgaccaaaaaggaacaggtcttctccacttactctgacaaccagcctggtgttttgatccaagtctacgaaggtgagagagccaggaccaaggacaacaacctcctcgggaagttcgagctctctggcatccctcctgctccacgtggtgttcctcagatcactgtctgcttcgacattgacgcgaatggtatcctcaatgtttctgcggaggacaagaccacggggcagaagaacaagatcaccatcaccaacgacaagggtcgcttgtctaaggacgagatagagaagatggtgcaagaggctgagaagtacaagtctgaggatgaggagcacaagaagaaggttgaagccaagaatgcgcttgagaactacgcttacaacatgtcgaccacgcgtccgcacaaattttcaaaacactaaacccagacgccctctcttccctctgtagatcattcttttctattcttattaatgtcttgtaagggaaagggtacggccatcggtatggatctcggtacgacgtactcttgcgtcggagtgtggcaacacgaccgtgttgagttcatcgctaatgaacagggaaagaggaccgcgcctgtcttacttcgccttcttactgactcccagagggtcatcggtgatgcccctaaaaaacaggtcgccctgaaccccatcaaaaccgtctcttagatgctaagaggtttcggtcgtcgtttcagcgacagctctgtatagagcgagataaagttgtggccattcaagataatcgcccgacctgccgagagaccaatgatctcgtcgtcctccacgagcgaggagaagcagtttgcccttcggaggagatttcctccatggttctcattaagatgcgtgagattgcagaggcttacctcggcgtcaccatcaagaacgcagtcgtcactgtccctgcctacttcaacgactctcagcgtcaggctactaaggacgctggtgtgattgctggtttgaacgttatgcgtatcatcaacgagcccaccgctgctgctattgcttacggtcttgacaagaaggcgaccagcgttggagagaaaaacgtgttgatctttgatcttggtggtggtacttttgatgtctcccttctcactattgaggaaggtatctttgaggttaaggcgactgctggagacactcatcttggtggtgaggacttcgacaacagaatggtgaaccactttgttcaggagtttaagaggaagagcaagaaggacattaccggaaacccaagagctcttaggaggttgaggacggcctgtgagagagcaaagaggactctttcctccactgctcagaccaccatcgagattgactctctctttgagggtattgatttctactctgcgctcacccgtgctaggttcgaggagctcaacatggatctctttaggaagtgtatggagccagtcgagaagtgtctccgtgatgctaagatggacaagagcaccgtccacgatgttgtccttgtcggtggctccacccgtattcccaaggttcagcaattgcttcaggacttcttcaacggcaaagagctttgcaagtctatcaaccccgacgaggccgttgcttacggtgctgccgtccagggagctattctcagcggtgaaggaaacgagaaggtccaagatcttctcttgctcgatgtcacccctctctcactcggtcttgagaccgccggtggtgtcatgaccactttgatcgcaagaaacacaaccataccaaccaagaaggagcaagtgttctcgacctactctgacaaccaaccaggtgtgttgatccaggtgttcgaaggggagagagccagaaccaaggacaacaacctcctcggtaagtttgagctctctggaatccctccggctccacgtggtgtcccccagatcactgtctgcttcgacattgatgccaacggtatcctcaacgtctctgctgaggacaagaccaccggacagaagaacaagatcaccatcaccaccgacaagggtcgtttgtccaaggacgatatcgagaagatggttcaagaggctgagaagtacaagtctgaggatgaggagcacaagaagaaggtggaagccaagaacgctctcgagaactacgcttacaacatgaggaacaccatccaggacgagaagattggtgagaagctaccggctgcagacaagaagaagatcgaggacgctattgagcaggcgattcagtggctggagaacaatcagttgggtgaggctgatgagttcgaggacaagatgaaggagttggagagcatctgcaacccaatcattgccaagatgtaccaaggagctggtggtgaagccgcagggatggacgatgatgctcctcctgcctcaggcggtgctggccctaagatcgaagaggtcgactaatctgttgattattgacgtctctctatttctccttccctgcttgttttcgatttcttaagaacttttgaatgttgggtccgttttgctattattttttgtaacaactttttgaactctggattttctgtccagctatgatgacggataagtaaacgttttggctaaaaaaaaaaaaaaaaaaaaaaaaaaaaaaaaaaaaaaaaaaaaaaaaaaagggcggccgc

SEQ ID NO: 1392 - DNA, 828 bp, Brassica napus
  Clone ID: BRANA-23APR03-CLUSTER24093_1
cattgtgatcccataccttcctctcttcttctcctaataaagaaaattaaaaaaagacaatctcatctctctctgtctgtctctctcattctgcggcttgattcgaagatgggcgttgatctggaatctatctcggaggctacatgctggagctgtaggctcgcttctcagcacaaccattctgtaccctctcgatacctgtaaatcaaagttccaggccgagatcagcgttcgcggtcagcagaaatacagatacttgtcggatgtgttttgggaagcgatttcttcagggaaggttctctctttgtatcaaggccttgggactaagaatctgcagtccttcgtttcctctttcatctacttctatagttacagctatttcaagaggttgccctgtgtaaaagtttggttcccaggcggttgcaccgtcgaaaatttggttccaagtcaattggtacaacggctaacctgctcctcgctgctgctgctggagtttgtacctctgttttgacccaacctctagatacagcttcatcaaggatgcaaacaagcgagtttggcaaagctaagggactgtggaagaccttaaccgaaggtgcttggggaagtgcatttgatggccttgggatctctcttttactcaactccattcctgcaattcactatatactgtttgatcagctcaaacagtacctccttgaaaatgagaaaggcaaaagccaacattgacgcatcccctgtagtgctctctggctttatggcctccctcttaggtgccgtttcaaagagcgctgctactgtcatcacatagccagccatcaggtgcaa

SEQ ID NO: 1393 - DNA, 555 bp, Brassica napus
  unsure (1)..(555): unsure at all n locations
  Clone ID: BRANA-23APR03-CLUSTER244_1
catttcgtcacagcaatggtataaaacttatttnggaggagaacaaagagatgttcgtgtgattgttgcatctctttatcttaaggatgccaaagagaccgttgaaggtatgccagaagtggaagcagttcagttagatgtgtcagatagtgaaagcctccttaagtatgtctctgaggttgatgttgttctaagtttattaccggcaagttgtcatgcttctgtagcaaagacatgcattgagctgaagaagcatcttatcactgctagctatgttgatgatgaaacgtccgggttacatgagaaagctaagcatgctgggattacaattcttggcgaaatgggactggaccctggaatcgatcacatgatggcaatgaaaatgatcaacgaggcacatatcagaaagggtaaagtgaagtctttcacctcttactgtggtggccttccctctcctgctgcagcaaataatccattagcatataaatttagctggaatcctgctggagcaatccgagctggccgtaaccctgccaaatacataagcaacggcga

SEQ ID NO: 1394 - DNA, 918 bp, Brassica napus
  Clone ID: BRANA-23APR03-CLUSTER2466_1
accatctctcttatcttcactgtttcatcttttctttcagattaaactgaatatatgaatatgtgattgttttttcgttatttgtattcttaacccacttgaattattggtctcctgaatagttttcaagttacagttcaactaagaaataaaataagagagataaaagacaaaatgaattttgaggagcaagaagaagaaatggagatgtcgggtgttcacccccctgggggttacgactctatgagcggcgagggagccacctccagcggcggtggcggaggaggaaggagaactagcgttggagagaagacaaagtatagagagtgcttgaagaatcatgccgttaacatcgctggccacgccgttgacggctgctgcgagttcatgccttcaggtgaagatggttcgctcgacgctctcaagtgtgcagcttgtggctgccaccgcaacttccaccgtaaggaaaccgaaatcatgagcggcagggcccacatggttccaacgtactacaaccgtccttctcagctgccgccgccaggatactgacacaggcaaccggctgcctcggcggacgaggaggatacatctaacccgagcagcagcggcggaaccaaggctaagaggtttagaacgaagttcacggcggagcagaaggagaagatgtttgcattcgcggagaggttagggtggcggatgcagaagcacgatgacgtggcggtagagcagttctgcgcggagactggtgttaggagacaagtgctcaaaatctggatgcataacaacaagaactctcttggtaagaaaccctaattattctccgacatatggtttaagcacaagagagatcatcattgcttcttttctttttggtaatgacccttttgtaactagctacttgtatctggacatgctttc

SEQ ID NO: 1395 - DNA, 2494 bp, Brassica napus
  Clone ID: BRANA-23APR03-CLUSTER246_1
caattcggcacgaggatcaaatggcgtcacaaacgaaagggacgacgacgattgaagttggcaccgatggcgtcgccgtcataagtctcatcaatctccccttcaaatcgcttcagttcgacctgctatacagtctccggagtaacggcgaggagtccttgagcaggaactatgttaaagggatagttctgcctcgggctaaggggaagttctctggtggatttgatatatgtggatttggtgaaattcagaaagggacgatgaaagagccaaaggttggatacatatcgattgatatcctcaccgatttgcttgaagctgcaaagaaaccgtctgtagctgctattgatgggcttgccttaggaggaggtttagagctttccatggcttgccatgctaggatatcagctcctggtgcacagttaggtctgcccgagcttcaactcggtgttattcctgggtttggaggaacacagcgtcttccacgtcttgtaggtctcacaaaagcccttgagatgattttgacatctaagccggttaaagcagaggaaggtcatacattgggtcttattgatgctgtcgtgccacctgcggagttactaaacgctgctcgtcgctgggcccttgacattgccgagaggagaaaaccatgggtttctagtgttttaaagactgataagttacctcctcttggagaggcaagggagatactgaaattcgccaaggatcagacgcgcaggcaagcccccaacatgaaacaccccttaatgtgccttgaggctgttgaagttggtattgtttctggttcaagagctggtttagaaaaggaggctcaagtcggctcagaagtgataaacctggatactaccaaaggactgatccatgtcttcttttctcagcgaggaactacaaaggttcctggagttactgatcgtgggttggtgccaaggaagattaataaggtagccataattggaggcgggttaatgggatctggaatagccactgcattgatcctcagtaactattcagtgattctcaaggaggttaatgagaagttcttggaggctggaattggcagggtcaaagctaatcttcagagtcgtgtaaagaaaggaaagatgtcgaaggaaaagtttgagaaaaccatgtctctcctcaagggttctcttgactatgaaagctttagggatgtggacatggtcatcgaggctgtcattgagaatatatctctgaagcagcaaatttttgctgatctcgagaagtactgtcctcaacattgtatccttgctagcaacacatctaccattgatttgaacaaaattggggagcggaccaagtcccaggatcggattatcggagcacatttcttcagtccagcgcatgtcatgccactacttgaaatagttcggaccaatcatacctctgcccaagtaattgttgacctgttagatgttgggaagaagattaggaaaacaccagtcgtggttggaaactgcacggggttcgcagttaataggatgttcttcccatacacacaggcagctatgttccttgttgagcatggaacagatccatatctcatcgacaaagcagtcagcaagtttggaatgccaatgggtcccttcagattgtgcgacctggttggattcggtgtggcgattgcaaccgcaacacaattcattgagaacttccctgaacggacatacaaatcaatgattatcccactcatgcaagaggacaagagagctggtgaagccactcgtaaaggtttctatctttatgatgataggcgcaaggctaaacctgaccctgaaataaagaactatatagacaaggcaaggagcgtatcaggagcaaagcctgacccgaagctggagaaactgtcggagaaggaaattattgaaatgacgttcttcccagtagtgaacgaggcgtgtagagtctttgcggaaggaattgctgtcaaagcagcagaccttgacattgctggcatatttggaatgggttttccaccttacagaggaggaatcatgttctgggctgattccattggatcgaaatacatttactcaaagctagaggagtggtcgaaggcttatggtgaattcttcaagccttgtgctttcttggctgaaaggggatccaaaggagctcctctgagcgctcctttggaacaatccagatcacggttgtaaggtcagcgtttcaacgggaaactttactttgttgctgcatctactgtgtttcttttatgtccacatttacttgccaaaacgttgggatctttggcctcagtgagcttttaaaataaagtctcatctcagacagatgaatctgggagaaagtagaaagtaagttctagtagcaataagatatggttatgttatgcatgatgctttgtcatataaagccgtcagatacatttggtataaagttctatggaataagttctatgaaaaaaaaaaaaaaaaaaaaaaaaaaaaaactcgag

SEQ ID NO: 1396 - DNA, 1343 bp, Brassica napus
  Clone ID: BRANA-23APR03-CLUSTER2497_1
aactcggagaaacctgagcgagtctgactctgagttttcaccgagtcaactcgccatggcaacttcttcactccacacctcaatctctccgcgtagcttcctctctctctcgaaaccttctcggaaaccgcaccgctcccaagtcttccttaggattaacaaacggagaagctgcgtttcgtgcgcgttggtccacgatgagaccgatgtgattccggtgcagagcggggatcgtacggaccacgaggaaggttctctggttgtgatgagcagcgagacggagagagatgtgaacgaaccggtggttgttgggtttggtgctgaacagctttcctttgaagggttcccttcatcttctccaacagctgacttgggagacgagaagagcagagagagcgaagagatggaaaagatgatcgataggagcatcaacgccacgatagttctagctgctggtacttacgccatcaccaaactgctcaccatcgggcatggatggacactgtttgagatattaagatacgctcctcaacataactggcttgcttacgaggaagcgttgaagagaaaccctgttctcgccaaaatggtcataagtggagttgtgtattctgtcggagactggatagctcagtgttacgaaggcaaacctttgtttgagattgacagagcaagaacgttgaggtcaggactagtgggtttcactctccatggctctttgtctcatttctattaccaattctgcgaggaacttttcccttttcaagattggtgggttgttcctgctaaagtcgctttcgatcaaaccgtgtggtctgctatatggaacagtatttacttcacggttcttgggtttcttcgtcttgaatcacctctcagcatcttcaaagaattaaaagctacgttcttgccgatgctaacagcagggtggaagctttggccgtttgctcatttgatcacatacggtttggttcctgtagaacaacgactactatgggttgattgcgtggagcttatttgggtcactatactctcaacttactcaaatgaaaagtcagaagctagaatctcggagtctgtcattgagaacccttcgagttctactacacccattgatccctccaaggaatgagaaagcagcatgcaaaattgggttttatggtcatggtattgtatatatatatacacagagttagcccaatagagagaccggagatttgagattgttacaaaagagatgaatatatatattgaaaatttcaaatgaatggttctctctatgtgtaagaaaattatccactatcttgaatacaccaaaaaaaaaaaaaaaaaagggcggccgc

SEQ ID NO: 1397 - DNA, 1443 bp, Brassica napus
  Clone ID: BRANA-23APR03-CLUSTER2521_1
gtcaccgcatcacccgcccctctctctcgccttacgggttctttcctcagttcctttgattctcattgttctctactatatcgcaatggctacgtctttctccgccaccctccctctccattgatctcaagagaatcgtctcttacttccattttactcattccctttggcaccggattggtctccattgatatatcgaaatggctacgtctttcttcgccacacttcctctccatggatctcaagagaatcgtctcttacttcccccgatccgattggctcctcctccttcttctttcctcggatccacccgttctctcaccattccttcttctcgcagactctaccacgctcacgccgctcgtcgatctcccgtcgttggcgtccaggaagttgtcaaggagaagaaagtcaccaacagcctgtttgataaccaaagaggaaggattagtgttgtatgaagacatgatactcggtagatcattcgaggacatgtgtgctcaaatgtactaccgaggcaagatgttcggttttgtccacttggctcgtgccgttatgggcgagctcttcgggaaggtccccggctgctgcacaggccaaggtgggtccatgcacatgttctctaaagaacacaacatgctcggtgggtttgcctttataggcgaaggcatccctgtcgccactggcgctgctttcacttcgaagtacaagagggaagtattgaagcaggattgcgaggacgtcactgtggcgttcttcggagatgggacttgtaacaacgggcagttctacgagtgtctgaacatggctgcgctttataagttgcctattatctttgtcgttgagaataacttgtgggcgattgggatgtctcatttgagatcgacttctgatcctgagatatggaagaaaggtcctgcgtttgggatgccaggtgttcatgttgatggtatggatgtgctgaaggtgagggaagtggctaaagaggcggtgacaagagctagaagaggtgaaggtccgacattggtggaatgtgagacttataggttcagaggacactccttggctgatcctgatgagctccgtgatgctgctgagaaagccaagtacgcggcaagagacccgatcacagcattgaagaagtatctgatagagaacaagctggcgaatgaaggggaacttaagacgatagagaagaagatagacgatttgatggaggaagcggttgagtttgcagacgcgagcccacagcctggtcggagtcagttgctagagaatgtgtttgctgatcccaaagggtttgggataggacctgatggacgttacagatgcgaggatcccaagtttactgaaggcaccgctcaagtctgaaaagagagagagagagagagagggttatatcatagtgtctttggcttctgtttgatgttgttaagttaaaat

SEQ ID NO: 1398 - DNA, 929 bp, Brassica napus
  unsure (1)..(929): unsure at all n locations
  Clone ID: BRANA-23APR03-CLUSTER2529_1
agcgagaagtttcaaaggagcttctttttttttctgttcctttttgacagatggctagattccttctcctctgtttcctcttcgcggcggcgctgacgtcatcattgacggaagccggcgacgacaacagagtctactctccttgctcagattcaacagtcgcggtaggcgacggattcactttcggcattgccttcgcggcgagagcttctttctttggcaccaatcgttccgttcagtactctccctgcgatcgtcgccgcctctccctcagcggcaactctgagctcgccgtgttcagacctaaagtcgatgagatcacacttctcaccatcaatacctcctcgagctcctccagtttccgcccggattcatcaaagggatacatggtagctttcgctggtgcgaaatacgctgcaagatcagttccaattatggttgctgacaacgatcacgtcgtgacaagcttcacccttgttcttgagtttcagaaaggtaggcttgaaaacctgttgtggaagaaacacggatgctccaaatgttctggaaatgccaaattagtgtgcctcaacaaagaagcatgcgctattaaaagacaaagctgcaagaaccaaggagggcaagtagattgcagcttggggatccagttggcgttgtccggcacggataagcactaccccgcggtgaattcttggttcaaagttgcgaatgtgaagcagtactcgctttatggcctatattctaatctgaagggatcactaagcaaccaattcaataacctcttttgatgagtttttttctcctcatgtgtgttgcttattttgtaattttgtattatcaatcggtcccgtcctcacatgatgtatgatatatatttactttattntattacatggcttgtaactttttcatnaaaaaaaaaaaaaaaa

SEQ ID NO: 1399 - DNA, 1389 bp, Brassica napus
  Clone ID: BRANA-23APR03-CLUSTER2538_1
ccctgagaatcctcctttcaagtgtcttttatatactaatataaaaaaataaaacaagaagaggaagaaacagtttcttcttcttcttctcaatccaatggctcttacgttgccattgatcttcctcttgttatcccatttcttcttccctggggtcgaaccgacgagctttgttatggtgaacaaatgtgaatacacagtctggccgggacttttatccaacgccggggttcctccgcttccgactactggcttcgttctccaaaaaggcgaagagcaaaccatcgatgctccagcttcatggggcggtcgtttctggggaagaacactctgctccaccggcaccgacggtaaattctcctgcgccaccggagactgcggctccgggacactagaatgctccggatccggcgcaaccccaccggcgacgctagctgagttcacactcgacggatcaggaggtctagatttctacgacgtgagcctcgtggacgggtacaacgttcccatgctcgtcgtccctcagggaggatcaggacagaactgcagcagcactggttgtgtcgtggatctgaacggttcgtgtccgacggagctgagggtgacgagcgtcgacggagcgaaacagtcgatgggttgtaaaagcgcgtgcgaagcgtttcggacgccggagtattgctgcagcggcgcgttcgggacgcctgacacgtgtaaaccgtcttcgtactcgttgatgttcaagaacgcgtgtccacgtgcgtacagctacgcttacgatgatcagagcagtaccttcacatgcgctaagtcccctaactacgtcatcaccttctgtccgtctccgaacacaagtcaaaaatcatctcaagatcagagcccagatccgaaaccgacgtcgactcctgccggaggaagtacgacgtggtcgccggctgatacatcgatgatatacgaaggagctttggatcagagcaaagcatcaccttccacgtctcatctttcgttatgtggaatcacagtcacacttgcgctggcattttgtcggatgtggtggctcttttgacctaaccatgtctcccgcggtaaacatttaatcaggacgatgtgggccctcactagaacccttatctcttccccggcccatgtgtctttttccttagaacgacgtcagattgagtcagagttgaaaaaggtagagtaaaaaagtttcttacccgaaattacaacagtattaatcacgggaggattcttaattgtggtgaggaacacgtgcggaaagaaagtgggctgcttgtggaggtcaaaaaagatgggaatgataattgtaaggtctcagaatatttgtttaatttttagtatgattaggattagaatataatgtacactata

SEQ ID NO: 1400 - DNA, 1158 bp, Brassica napus
  Clone ID: BRANA-23APR03-CLUSTER2544_1
atttacatccatctttcgatttcgagtctcacttggttcttctccgctcctgctttctccttacctattcctgcagtttgcttcgtttcaacaacctttgggaacaatgagtgtccgatcttctcggtcaatctatgttggtaagttgcccggggacattagggagtctgagattgaagatctcttttacaagtatggccgcattgttgatattgaattgaaagttccacctcttcttccattttattgctttattgagtttgagcaccctcgggacgccaaagacgccgttgatggccgtgatggctgtaagtttgacggctgcggcttgggggttgaagctttgccatggtcggggcgaggacaggtcttcaggtgaccgtggggggggggatggtggtggtgggggggaggggggggtgggggatgatcccggtttggtgtctcacgacactctgaattccgagttattgtacgtgggctcccatcatctgcttcatggcaagatttgaaggatcatatgcggaaagctggtgatgtgtgctttgctgaggtcactcgagacagtgaaggaacttatggtgttgttgactacaccaattatgatgacatgaagtatgcgataaggaaacttgatgatacagagttcagaaacccctgggctagaggctatatccgggttacgaaatatgaaagctctcagtcaaggagcccaagtagaagcaggagccgtagccgaggccgtggtcgcagccctagccgcagcgttagcagaagcaggagcccaagaaaggatctgagtaaatcaccaagacgatccctttcaagatcggtatcaaaatctaggtcgccttctcctgacaggaagaagagtccccctagggcaatgtctaggtccaggtccaggtctctttcaaaatctcctgccaaggttcgggaaggcagtgagtgagtgattgcgctgcgattcctccagggcaaagaagatcgaacgggagaaatctggagtactatgcaaacttgtaatttgttctctagactactagttctggatacttttatttctctctgctactactactttggtcttaaagctgttatctttaccggttctttgaaatatttttgtttttttttctctttgtgagtttaagacag

SEQ ID NO: 1401 - DNA, 851 bp, Brassica napus
  unsure (1)..(851): unsure at all n locations
  Clone ID: BRANA-23APR03-CLUSTER2596_2
aggttgcacagtgttcgctctctcgaaaaagtgacgataactcagatctatcaacaaatgtcaggctttcacgggactaatgattcatgtccttnggtgaagaacattcttcttctagactctgaagggaagcgtgtggctgtcaagtactactccgatgactggtcaactcatgctgccaagttgagtttcgagaaacttgtcttctccaagacctctaagaccaatgctcgcactgaagctgagatcacactgttggacagtaatgttattgtgtataagttcgcccaagaccttcacttttttgttactggtggcgaagatgagaacgagctcgtcttgtcttctgttcttcaaggctttttcgatgctgttgcacttcttctgaggaacaatgtggaaaagatggaagctcttgagaacttggatctcatctttctctgcctggatgaaatggtcgatcaggggtggttcttgaaacagacccaaacgtcattgcgggaaaagtagcaatgcagagcacagaagctagtggttcactctctgaacagacactaactcaagcactggcaacagctcgggaacatctggcaagaagtctgcttacatgagagtttcctcatatgcataatactgttatgggatttgtctcattacgtgtgaaagtcttttaataattcgaacactttgcttacagcatttctgcatacttaacctgaagtttggggtatttgttacatagctgtgtgttcaatgctggagcttttttgaagactggatattgcagaacaagaattttataaatcttgattcatatcttttattgaaaaaaaaaaaaaaagggcggccgc

SEQ ID NO: 1402 - DNA, 1155 bp, Brassica napus
  Clone ID: BRANA-23APR03-CLUSTER2598_1
agatagatgctgcagtaatatgcgtaaaaaagaaaaagaagaaaaaagctctcgtcttcctcgttggcgttacggtggccggtggttctaccgccgccggtcacccttcagtttgctctctgtagttttagtctctgcttttcttctctgtcttctatgtctatggtttggtctctttgttggtgtctctggagctatctcttattggaaatagatctgtgttttagttgttcttttgctcagctggagcaccggcaagactattacccatgatgtgaagccagagaactcgggattggaagtgttttgtgtggttttaaccggatctgggtcagatctggcggatctgtgataaggttgtagttgaggcttcatcggtggtgaaggggttttcctcccttgtcagatttgattctgtttgcccacgagctctccactcttcgacctgcggagacatccgttttaagtggtctagaatatttgttttccattgttgtgtggaagtttgtctatgctatgttctgctctcaaagggaatcgttggccctcttttggttgtttggtctctatacttgcatttttttcgagttcttgatgtggtagtgaatgcttcctgtctcctgctgccggtttctatatgttttcggtgagttcgggtgggattgactttgtttatctctagatctgttgagattagagtgttggttgtatgacttttattgaggcgttgcttggacgcattaagtgtgtcgcagccgtatccgaaagaggagaactatgcgtggttctctcttgttgggttataaagtctggttctttaggtggaagagatatttctctgtgttcgtagaagttgatgttatcgtttggtgagtcgtgggcaacaacgataaatctcgttcagaaacgtcaagtggtgtcggaaggttgcaagtgcagtgtgctaacttcgtggtgggtttttgatttatccttgttgcagctatagttaagtctgtatttggtattctcctaagttaccccggagtgggttctagttgcctttcttgtgggcttgtgtttctcgggatttctagttcttctgccagcttttgtattcctcttttgaatgaaatttaacaatttgacggaaaaaaaaaaaaaaagggcggccgc

SEQ ID NO: 1403 - DNA, 1484 bp, Brassica napus
  Clone ID: BRANA-23APR03-CLUSTER261_1
caaaaacgcacaaaatggcagcaaccgccgcgacaacgtcatcgtctcatcttcttctctcaagctctcgccacgtggcagcctcatctcagccacaaatccttttccagagatctctgttttccggcgggaaacgatcggcagctggaaaaaaccatcatgctagtggtggagtgaggtgtatggcggttgcagcggatgcttcggcggaggctaagccggcggcagcgaggaagaagagtgggtacgagcttcagacgctgacgggttggttgctgagacaagagcagaaaggagagatagatacagagctgacgatagtgatgtcgagcatagcgatggcttgtaagcagatcgcttcgcttgtacagcgcgccggaatctctaatctgaccggcgttcaaggagccgttaacattcagggagaggatcagaaaaagctcgacgtcgtctctaatgaggtattttcaaactgtttgagatcaagtggaaggacagggatcattgcgtcagaggaagaggacgtccccgtagcagttgaagagagttactccggaaactacattgtcgtctttgatcctctcgacggttcctccaacatcgacgctgcagtctccactggttcaatcttcggtatctacagccccaatgacgagtgtatcgttgacgactccgacgatatctcctctcttggttcagaagaacaaaggtgtatagtaaacgtgtgtcaaccagggaacaacttgctcgcagctggctactgtatgtactcgagctcagtcatcttcgttctcaccttaggcaagggcgttttctccttcacactcgacccaatgtacggcgagttcgtcctcactcaagagaacattgagatccccaaagcagggaaaatctactctttcaacgaagggaactaccagatgtgggacgagaaactgaagaagtacattgatgatcttaaggaccctggtccaagtgggaagccttactctgcaaggtacattggtagtttggtcggagactttcacagaactttgttgtacggtgggatttacgggtaccctcgtgacgccaagagcaaaaacggtaagcttaggcttttgtatgagtgtgcaccgatgagtttcatcgttgaacaagctggaggaaaaggatcagatggccaccaaagagtactagatatccaacccaccgagatacatcagagggttccactttacattggaagcaaagaagaagtagagaagctggagaagtacttggcttgagtcatgtaccaaacataagccttttgatttctgttgtagccatttgtctgactacatggcacatcccaatagatgcataaacgatgaaagttctattttgttatcctgagattttggaggttaaatacaaaactaaaaaaatataaaaaaaaaaaaaaaaagggcggccgccatggcacatcctaaatatgaaatttttattttgttgttgatatc

SEQ ID NO: 1404 - DNA, 799 bp, Brassica napus
  Clone ID: BRANA-23APR03-CLUSTER2640_1
acaacacacaacttcagctttgaggtaaagcgtaaactttaaaagaaaaacagagcagagatgggtttcgtcgcagaggaggtgagagctaaggcagagaagtacaccggagatgtgatatgccgagagaaaacaaaagtcttcctcaaggaaatatctatgcccaatggcttactaccgttgaaggacattgaatgaggttgggtacaacagagagtcaggtgttgtgtggctgaagcagaaacagagcatcacccacaagttcgaaacgatcgataagcttgtctcctacggaaccgaggtccactgccgttgtccagacgggtaagatcaagaagctcactggagtcaaggccaaggagcttctcatctgggtcagtgtcagtgagatctatacagaggagaaagagaagatcacgttcaagtcaccaaccacactgtccaggactttccctgtcccagcttttattgtcccagaggaagtggaacctgccaaggaagaacctgtcaaggagaagagcaggtaagccgccgagtttccggaggctggtccagtcaaggaggcctaatcaagccgagagttagtagtgtttctcactgctcttacgctcatgtattacctaccactagattttgcgttttttactacccttaataagatgtctccaacatcctctcgttatacaaaaaaatacctgtaatatctatgtcctacattaaatcttgttaaaaaaaaaaaaaagcaattatctataaacttcattaaagctggttaaaaaaaaaaaaaaagggcggccgc

SEQ ID NO: 1405 - DNA, 739 bp, Brassica napus
  Clone ID: BRANA-23APR03-CLUSTER26525_1
gaagctacaagtaagcgggaaggcgatcttgtccactgttcgctgtcggagagagatgtcgacttcttcttccttcgtctttgggccttacaagatcgatccgcgtgaagtgttttacgcaactcctctctcgtacgccatggttaatctccgaccccttcttcctggtcatgttcttgtctgcccgagacgccttgtgccgcgctttactgatctcacagctgatgagaccagtgacctttggcttactgctcagaaggttggctctcggattgagaccttccacaatgcaacttctctcacattagccatccaagatggccctcaggcgggacagagtgttcctcatgtgcacattcatgtcttgcctcgtaaaggtggcgactttgagaagaatgatgagatctatgatgcaattgatgagaaggagaaggaacttaagcagaagcttgatcttgacaaagaccgtgttgataggagcatcgaggagatggctaacgaggcttcacagtacaggtctcttttcgattgctagttatgagcaaaagctatccattggcttccaagccttttcaataagaccattgtgacgagcgatcctcaagttgaggttgatgttgatgttagagacttcaattcaaacttgtaatctctttcttatgccaccaaaactgagaatcatcgaaatgttttagttctggttgacatttttattgttattattagaatcaactatttg

SEQ ID NO: 1406 - DNA, 965 bp, Brassica napus
  Clone ID: BRANA-23APR03-CLUSTER2665_1
atcacatcgctgacgagtttttttctctctttctctcgagacttctgcatcaatggcggggatcgttagccctggccctacggctctttatttcaccagtaatctcggcgcaaggaggttgaaagcggcgagctggtcgggaaagagcctccctggtaacgttctccgccggagaaacctgagagttgcggcggaggtgaagttcgtgaacgcagaggaagcaaagaagttgatagcagcggaaggttacaaggttgtggatgtaagagacaagactcagttcgagagagctcatataaagtcttgccaccacatccctctcttcatcttcaacgaagacaacgatcttgggacgatagtgaagaggacagtgcacaacaacttctcagggctcttctttggtttgcctttcacaaagctgaatccagagttcgttaaagccgttagaaatgagttttcacaggatagcaaactattactggtttgccaagaaggtctcagatcggcagctgcagctagtagattggaggaagcgggttacgataacatagcttgtgtaacatcagggctacaatctgtaaaaccagggacatttgaatcggttggttcaaccgagttgcagaatgcaggcaaggcagggcttatcacaattcaaggaaagatctcagctgtcttaggaacagtgctcgtctgtgctttgttgttcataacattcttcccggaccaagcagagaagctgtttcctccaagctgaagacaagaaaacaacaatgattgattcagattttccacctgtttgtatgtagatgcttaaggaacacaaaaatctttaaatatttgaattttgaagtagttacaaacatatggtattgaacaaagttgttatctgcttataacagttgagaaaaaaagtcaacaattaaaaagaagagattgcatgatgttttgcaaaaaaaaaaaaaaaa

SEQ ID NO: 1407 - DNA, 1057 bp, Brassica napus
  unsure (1)..(1057): unsure at all n locations
  Clone ID: BRANA-23APR03-CLUSTER2667_1
gccataaagtctatactcttttgctctctttggtgagtccgaagaatctcttttctttctagctttagtccatggcggggtctttctccttcgttcgtcgcgtgtacctcactctctacaattggatcgtctttgcaggatgggctcaagttctgtactttgcggtaaagacgttgaaggaaactggacatgaacatgtctatgacgctgtggagaagcctctccagcttgctcagaccgccgccgttctcgagattcttcatggattagtaggtttggtcagatctcctgtctctgctactctgccgcagataggttcaaggctgtttctgacttggggcatcctatacagctttccagaggtccagtcacattttcttgttgcgtcgctggtcataagctggtctatcacggagattattcgctactccttctttggtctcaaggaagctctaggctttgcaccttcatggcacttgtggctcagatacagcagctttttagtgctatatccaaccggtatcaccagtgaagtaggtcttatctaccttgcgttaccacacatcaagacgttttcgcttggcacttttagtacagctatcgcaatgtactgttactttgtcttttcgtacgcaacgttacaagtcgttgtatcataggtcccatgcagtacacccatgcacatgaaaaggattgggtagggttaccgagctctctgcacttctcagacggattaatcaacaaagcttttctagagcggacagaccaaagcctcagctcatcaactgtttattttttcttgcctagtttctgtcatgttgttctctttgatacactctttaagtctttcgttttctttaattcctcagggatcgggtaaactttaagcaggttactatatcaagactaatgtaatgactaggttaatcccttcgttagactcacaaccctcgcgttttcttgacgtcctccgcgttcctgcaatcttgaggctggttgctttatgcaatgtntaaattaatacggaatttttcnccaaaaaaaaaaaaaaaaaagc

SEQ ID NO: 1408 - DNA, 1304 bp, Brassica napus
  unsure (1)..(1304): unsure at all n locations
  Clone ID: BRANA-23APR03-CLUSTER2670_1
agtttcaccaacgctagacgaaagcagaagaggataaactcttctcctgtaaaccaaaaaatggctttttcgtcttcttattactcaccattctctgcactcttcgacgtttccaaacccaatccatctctaaaccgcgcggattttcctgtcccttcctcgagattatcaacagccatcagtttcgccacactaacgctggtcgaaagcggaagaggataaactcttctcctgtaaccaaaaaaatggcttcttcgtcttcttattacacaccattatctgcactcttcgacgtttccaaacccaatccatctctaaaccccgcggctttcctcgtcccttccttgaaattctccaccgccatatcgaatttcgcgaatctgagtaatgggttctctctaaaatctccggttaatcctgggtttctcttcaagtcccgaaatttcaatgttcaagctcgagctgctgctgagaagaccgttcacgatttcaccgtaaaggacattgatggtaatgatgtttctttgaacaagtataaggggaaagttatgttgatcgtcaatgtcgcttcaagatgtggtttgacatcatcaaattactcagagctttcacatctgtatgagaaatacaagagccaaggatttgagattctagctttcccctgcaatcagtttggtggccaagagcccggttcaaaccctgagatcaaacagtttgcttgcacccggtttaaagcagagttccctatatttgataaggtcgatgtgaatggaccgagcacagcaccaatctatcagttcttgaaatcaaacgcaggaggattcttgggtgatctcattaaatggaactttgagaagttcttgattgataaaaagggaaaggtcgttgagaggtaccctcccaccacatcccctttccaaatcgagaaggacatcaagaagttgcttgctgcttaataacctctgcgatgagagaccacacagactgattgtaaaatattcagtacttgaaactcggttttgctggttatggtttgtatacattgtaacgatatatattttattacaatgctaagtatgattataagttttcaaagttgatataaaaaaaaaaaaaaaaaaaaaagggcggccgctntctntccacnnccccncccctcctnccccctttcattcnctantnacttccnnctgcccncnnntatnanacccnctcatccctanacntnctttattgccncatgtcntctcnnncanacctaatcnttctntttcnctnnctnatgctcncncctccncnccncc

SEQ ID NO: 1409 - DNA, 1124 bp, Brassica napus
  Clone ID: BRANA-23APR03-CLUSTER2674_1
acccacccccataagttaaagtctcaatcttttctccttctttcgatagtagaaccaacactttgaagctcagaactcgacccacaaaaaaaaacatgcttctacgaagcgcgtcgactccacttctcaactcgttagttcatgtctcgaccccaaaggaatctccaaacgaggccgttgatcaacggcccagatccctcgtactctcttcaccttcctcttgctgttacagcccgatgtctatacactccagcgacgaaaccacgaggagggtgaaaagaacggcgtcagagagcgatctacgccacctgacgacgacgaagcctccgtcgagcaagttcttgaacagtgctgctctgatggaggacgtggaagaaggaatcggcttcgggattatccgcacgtcttcttacgacggtggtttagcgttttggacattagaggaagaaactgagtttagcggcggcggcagcggcggcggtgggattgtccacggcggaggaaagggcggatccgatggtgaagatagcacagacgttcattatcgtaagatgattgaagcaagtcgacccacgcgtccgcccactagcaattccacgcggttcttcacgcgggttcgaaaagattacttgagagcagaggagtattgcgggagggctattctggtgaacccaaacgacgggaatgttctggctatgtacgcggagttggtgtggatgattcataaggattcatctcgtgctgagtcttactttaatcaagccgtatcagctgctcctgatgattgttatgtacaagcttcatatgcacggtttctttgggatgctgacgaggaagaagaaggtggagagggggagaaggaagagaggcacgaagaggaacttgtgactcaagcttctcgaatgagtttcttcaccggtctttctccaattacggccatgtcttaactaaagtgggctcggcgtatagaattagataaactgttatgtgacgtctatgatctatcatctaacccttttgtttaatattaaattctttatttttgcttcgtttatatgtttgcttctctgcttcagttttagaatttgtctcacttgtgggtaataaataaaagttttgctttc

SEQ ID NO: 1410 - DNA, 700 bp, Brassica napus
  unsure (1)..(700): unsure at all n locations
  Clone ID: BRANA-23APR03-CLUSTER2712_1
gagagaactagtctcgagttttttttttttttttttncttcgaaggagcaaatcaaattgcanatgttgtagaaccatttgacacataccaatcaaattgcagatgttaatcggaacgagaacatcaacttcatcattatcgattaaacaaaagatatccaaaaacaaacttcttcagaaagccctaactctctccaagccttcttaatcaaaacaatccaccttccagatctcaagcatcgaagctcaatcggactcaatcggaggaagctccggcgagcctctccatctcgaggcgttccagggccttctgatgagcccaggtctcgatcgagagatcaggcttagcgttgagcccgacgccgaggatgacgatcgtgaggaagctcgtgatgtagcaaggaagctcccaatcctcccatttgcgcgactgccccggcggcggaggagtgcggttcatgaagtagcccttgggccgctcctcgtggcccggcgtggcccagcggctcgggccggcggatgtggatccggacctggagaagatccggtttcgtagcgtcttcgctgcgacggttaaggactgcgtcgacgccatcgatctctgttgtgtgtgggaccgatctgaagtgaaagtgacgaaaatgtcggttgatngtcgtntncaatcncttgtctcngantcncccctcgtcccctgtct

SEQ ID NO: 1411 - DNA, 1035 bp, Brassica napus
  Clone ID: BRANA-23APR03-CLUSTER2727_1
ttacgtcctcccatcaaagaaaactaagccaagtatatttataaataaacaaaaatcacgtcctcacatcaaagaaaactaagccaagtatatttataactaaataaaaaatgcttgacaaacttatcggagagtacgggcatggatacggcaatgggtacggccacaaggatcacagaagcagcggctacggctttgaggagcacaagaagtacgagtctcatatggagtcagaaggaggctactttgaccgtcaagcccgctacgaccaccgcgtgaggcttccggtcaaccacggccgtccacccatggctcacatgcctccctgtgatgaagaagactccgactcagatgtagaggagttctataagagcagccgaagccaccacactactgtgttaccggaccacggaaaaatccaccgccaacaaccacctcatatgaacttcatgcccccacctccgatgtctcaacctcaccacaatatgggtaatggatggcaggggaggcatgaagatgcatacctcggtgggcatgggatgcagcaccacggtgagcacgggatgcagctccgcggtgagcacgggatgcagcacctcggtgagcacgggatgcagcaccacggtgagcacgggatgaagcaccacggtgcgcacggaatgaagcaccaggacaggcttatggctcctcaggtgttaccacatcatgtgtacatgaacccaaacagcggaggcggccaccacaaggccgggtgggggaataagggactctaactgcaaccaactactctaccggttcaaataaaaagtaatgattatgtataataccagttaacgaaactataattaagatgtgtgtgtgaggaacatgtttcagcatcctactaaacctaaacataggccttttagcaaaaaaataaaggaagtgttcttgtttgagaaacttatgattactaaaaggaatgttgttgttgctgcttatgttaaataaaagtgatgcaagtattatgaaaaaaaaaaaaaaaagggcggccgc

SEQ ID NO: 1412 - DNA, 583 bp, Brassica napus
  unsure (1)..(583): unsure at all n locations
  Clone ID: BRANA-23APR03-CLUSTER27607_1
atgaactagagtaggagagacaaaggaagatgagtatcttgtcagggaaagcagctggtcatgatctctttgtctatggcagtctccaagatccccaagtcgttaacgtgctgcttaatcgcgtccctgaccatagctccgccgtactctccggctttcacaggtttaaaatcaagaatcgtctttatccaacaattctaccggacagtaccggaaaagtcaccggaaaggtgctaaagggcataacagatgatgagcgtaagttgctagatgattttgaggatgttgaatatgacagaaaggctgttgaagtggtgcttacggatacttcagagaagctacaagtgggaacatatgtatggaggaacaaagatgatcctgatctttatgccgaatgggactttgaggaatggaaactacatgacagggaagctttcataaccgccacaaagaagtttatggaagagaggaaattacctgaagctaagacgaggatcgacacattcaaaacgttctttaatcagaatgatgctgaggatgggaaacctctgggttcttgatactctctctgngacattgggtt

SEQ ID NO: 1413 - DNA, 1339 bp, Brassica napus
  Clone ID: BRANA-23APR03-CLUSTER27849_1
agtataaagtcgcagcatctcgggatagtcttcctctaactctcactgaagctcctcactcaactcttctctgtgccaaaagagaaaaatggcggtgtctaaagccattgttatacctctcttactcgtcttatgtgctgctgctcttggagctcctgcttatgaaggctttcttcgcaatggtaacttcgaggagtcaccaaagaagaccgacatgaaaaaaacggtcctactcggcaaaaccgccttgcccgaatgggtaaccaccggtttcgtcgagtacatcgccggcggtcctcagccgggaggaatgtacttccccgtagctcacggcgttcacgcagtgaggctcggtaacgaagcaaagatctctcagaagctaaaagtcaagccgggctctctctacgcgctcacgttcggcgcgtcgagaacttgcgcgcaagacgaggtccttcgcgtctctgtgcctcctcagtccggtgacttgccgcttcagacgctctacaacagcttcggcggtgacgtgtacgcttgggccttcgttgccaagacttctgtggttacagtgactttccataatcctggagttcaagaagatccagcttgtggtcctttgttggacgctgttgccattaaagagcttgttcatccaatgtataccaaagggaacttagtgaagaacggtggattcgaagaaggtcctcaccgtctagtgaattcaacacaaggagtcctcctcccacctaaacaagaagatctaacatcaccattaccgggatggatcattgagtcactcaaggcagttaagttcatagactccaagtacttcaatgtcccctttggccaagctgcgatcgagcttgttgctgggagagaaagtgctattgcacaagtcattagaactacaccaggtcaaacctacagcctctcctttgccgttggagatgctaaaaacgactgccatggatccatgatggttgaggcttttgcggccagagatacactcaaagtgccacacacttcagttggtggaggtcactttaagatggcaagtttcaagttcaaggcgattggggcaagaactaggattactttcttcagtggctattaccatagcaagaaaatggatatgggatctctctgtggacctgtcattgatcagattgtggtttctcgtgtcgcttagatctattgtaagctttgtgaccattgcatcatgtgctctaattctcggctttagcctgctcatggacttggttatttgctttgtatgtcttgctccttttgcaattaaataatatttaattaatgataaaaaaaaaaaaaaaagggcggccgc

SEQ ID NO: 1414 - DNA, 1698 bp, Brassica napus
  Clone ID: BRANA-23APR03-CLUSTER28_1
gaggagtctagagtttcgtgcacaacaaatcattcgtttagcaaattggataaagaaaaaaagagaccaaagaattcttatggaaaaagtccttccttgacaattctgttcttctttcacatcttcgaaccttctccttctgcttcatcctgcttgctttgtgacagctctgcatactacagcttctctgtctacggagattattgcgtattagtggcgccatctcggagggcattatgcaggtcttgacggggccatatcgaggatactctatgccagttgatctcgtgtccaccttgagtatagttatctggatagtctagacgaaccttatcccgaagtcaatgatggtgacgttcggtttgatcggaagttgtgttctggacataccggggggtactcagagggcacagcggaagctgcaggagcgtactgcttttatgacgctcgggctttccccgaaagcttccctgcggtcagatcccgttaagaaccagtggaatagacaaggctcttctgggcttcaggctgttgctgacgtagccgccgccaacatggctggattttatgatattggtattggggctggattggagtccatgaccactaatccaatggcatgggaagggtcagtcaacccagcggtgaagaagtttgagcaagcacagaactgtcttctccctatgggtgttacttcagaaaatgtggcacaacgatttggtgtctcaaggcaggagcaagatcaagctgctgttgactcgcacagaaaggcagctgctgctactgctgctggtaagttcaaggatgagatcattccggttaaaaccaagcttgtcgacccaaaggcaggagatgagaaacccattacagtttctgtggatgatgggatccgaccaaccacaacccttgctactcttgggaagctgaagccagtgtttaaaaaggatggaaccacaacagctggaaactccagccaagttagtgatggtgctggagcggttcttctcatgaggaggagtgttgctacgcagaaaggacttcccgttcttggtgtattcaggacatttgctgcagttggtgttgacccagcaatcatgggagttggtccagcagttgccattcctgctgcagttaaggctgctggtttagaactcgatgacattgacttgtttgagatcaacgaggcatttgcatctcagtttgtttattgccgtaacaagttgggactcgacgcagagaaaatcaatgtcaacggaggcgcaatggccataggacatcctttgggtgctacaggagcacgttgcgttgctactttgttgcatgagatgaaacgccgcggaaaagactgtcgatttggggtagtttcaatgtgcattgggacggggatgggtgcagcggctgtgtttgagagaggagatggagttgatgagcttcgcaacgcaaggaaagttgaatcgcatggccttttgtccaaggacgctcgttagaaatattatgatgatgtgtacaatcaccaagaaaaccctcttcacttttttcccagctttcttcagttttattatacttgtttgaataaagcagctcagcgaatgtttgccggagtcttttttatattcttcttgacatggtcatgtgtttagtagtatatttttatttacgcgtgtgattttctaaaaaaaaaaaaaaaagggcggccgc

SEQ ID NO: 1415 - DNA, 605 bp, Brassica napus
  Clone ID: BRANA-23APR03-CLUSTER29207_1
tttttctttttgcttatcttctgcatttaccgtccttttgcttatcttctgcatttaccgacgcgtcatcttctccccagctccccagctccggccaggccgtacagtttaagtaaaaaaaagtgtggtgaaagatgggtcgtgttcgtaccaaaaccgtgaagaaatcatcacgtcaagtgatagagaagtactactcaaggatgacactagacttccacacgaacaagaagatcttggaggaagttgcgatcatcccgtcgaaaagactacggaacaagatcgctggattctccacacacttgatgaaacgtatccaaaagggtccagtccgcgggatctcgctcaagctgcaagaggaggagcgcgaacggagaatggactttgtccccgacgagtcggcgattaaaacggatgacgttgaggtggataaagagacgctagagatgcttgcttcattggggatgtctgatgtttccgggttttctcaagtggaggcacaagcagccgtggtaccgagcaatgcgtttggccgtggtggaagaagattctaaggcatttttttgaatcaacaaatgagttttgttttgttttttggagtgttt

SEQ ID NO: 1416 - DNA, 908 bp, Brassica napus
  Clone ID: BRANA-23APR03-CLUSTER29249_1
aaaagatcgatagtttcatcaatggaatctccttcgttccttgactatctcttcttcttcatcgtacgtccgcttttagctatttcctctgctgtccgattcatcgctctttggtggtttctggcatggaagctggtactgtgccatgttcctctggttcaagagatctttggtttgaggaagaaaacctttaaacctaaacctgaatctcgcggtagaatctccaagttctacaaaagtcagaattctgttcctcaatgaaattgtggatttaacaagagccgatgatccaatactaaacgagcaagaagagaacaattccatgttataatctcaagttaaaagctttagagttctattttcttttgtggaagaatttctgcaatgttatgtgcattctgtatattgatgtgttttaaacccaattccttgatattgtttcaaaatattgttgtcgttgtgagagaacctttaattcaagaatcaggtacaataaaaaaaaaaaaaaaaaaaaaaaaaaaaaaaaaaaaaaaaaaaaaaaaaaaaaaaaaaaaaaaaaaaaaaaaaaaaaaaaaaaaaaaaaaaaaaaaaaaaaaaaaaaaaaaaaaagggggggccctttttaaagaaccaaatttaacttcccgggcatggaaaggtaaaattttttttttggggcccctaaatttaattccctggcccgcgttttaaaaacttgggaatggaaaaaccctggggttccccaaattaattcccttggaaaaaaatccccttttcccaatttgggtaaaaagaaaaaaggcccacccaattcccctttccaaaaatttgccaaccttaaagggaaaagggaacccccctttaacgggccattaaaccccgggggggggggggttacccccaagggg

SEQ ID NO: 1417 - DNA, 2193 bp, Brassica napus
  Clone ID: BRANA-23APR03-CLUSTER293_1
ctttgccgtcgggtcttgcccattcttcggtctgaaagtcagcaggaaaatttgcgaagtcgagtaagagaggtgcggtcaagtcttattcaaaaacttgcaagtattttgcgtatggatttaggtggttatggatagaattatagctcgaatgaagaaatcgtcgggtagaagaggggataaaacgccgacaaggcggttagagcgccgtgacgccttgaagcatattaattatgacgcagcgtcgacttccacttggtcagctgaagatatctccgcttctctggtgacgcgctctctggagttgccagatcgcaccagtttccgaatcttcggaggtggagatgtagagatggatcagatttacaagtcccttggtttgtctggccctgatgatttggctatatcttttgacgcctgggaagcttgcaaaaagcgttcgtcttcagatgttatcaacaggttcaagtctttcgagctcgatcttcacaattttcctgttccgagtttgagtgaagcggctcctagctatggtggcatgggagaaaacaagccttgtcttgagcgaacaccgaccatcactgtaaagtctagagggtatcttgttccaaatcacggtgatgttgcttctggtggtggtgcaggagaagacaagcgtggtcttgtgcgaacaccgaccatcactgtaaagtctagaggttatcttgttccaaatcagagtgatgttggtataaagggagtaaggccaccggtgcttaagcctcctccagccaaacgacctcctattgatcatcagggatcatcttgggatttccttacccatttcgccccagaggatggaattgttaggcggccaagttcctcttctacttccgacaatggagaggaaaccttggaagaggaagtggatactggtgatgaggcatgctcattcagtacgaacgaaggtggtggtgactcctcaagcactgtatccaatacttcgcccatttatgcaaacggtggatctatcatcacgtcgtggcagaagggtggacttctgggacgaggatcgtttggctccgtttttgaaggcatttcaggagatggggacttctttgctgttaaggaagtttcactacttgaacaaggaagtcaggcacaagaatgcatacaacaactcgagggggagattgcactgcttagccagcttcagcatcagaatatcgtgagatatcgtggcactgccaaggatgggtcgaatttgtacatctttcttgagcttgtaacccaggggtctctttcaaagctctaccaaagataccagcttatggactctgtagtctccacgtacactagacaaattcttgatggtttgaagtatctccacgacaaaggttttattcacagggacatcaaatgtgcaaacatactggtggacgccaacggagctgttaaacttgcagattttggattagcaaaggtttcaaaattgaacgacattaagtcctgcaagggaactccattctggatggctccagaggttattaacccgaagcgtactgatgggtatggaagttcagctgatatatggagccttgggtgcacagtgctggaaatgctcactggtcagatcccctactgcgatttagaaaaccccgttcaagccctgtataggatcggaaggggtgtgcttccggacatacctgatacattatcactcgatggccgagatttcataactgaatgtctcaaagtggaccctgaagagcggccaactgcggctgagctgctgaaccatccatttgtgagaaggcccttagcatactcaggctcgggattgggatcagcatctccgcatgtccatagacgaggctaattgcaggcggaagcagaagatttttgaaagatgagaccaaccccatagaaactagaaacgtttggggaaacacgagatatgattcttcaacacacgtacggttcagttgggcagcaagagctaaactgcatggaggagacatatatcctttaggtttgcttctggctcattcgttggttattttttttaagttgtatgttggacgtaatttgggaacttgagatccatgttcttctaggaaaatgattaattagagtgccgatcttggtgttttgagtgtataggttttgtaagttttattaaacttattgatgtaatgcataattggttttgag

SEQ ID NO: 1418 - DNA, 2386 bp, Brassica napus
  Clone ID: BRANA-23APR03-CLUSTER296_1
cggcacgagaggaggagcacttgttcttctcgatctctccttggtgctcgggagagagaaaaagaggaagaagatctctctgtatattatattcgagcgacttcgtctaaccatcagtgagaaaatggatggtgttgccggtttacaagaggcagctggggccagatttagccacgttgagttaatcgggagaggatcctttggtgatgtctacaaagcgtttgattcggaacttaacaaagaagttgccattaaagttattgatctggaagaatcagaagacgagattgaagatatacagaaggaaatttcagtattgtcacaatgccgttgcccatacattaccgaatactatggttcttacctccaccagaccaagttatggatcatcatggaatatatggctggtggctcagttgctgacctgctacaaccagggcatccattggatgaaatttcaattgcttgtattacgcgggatttacttcatgctgttgaatatctccacactgaaggaaagatccacagagatatcaaagccgctaatattttgttgtccgagaatggagatgttaaggttgcggattttggtgtatctgcacaattaacccggacaatttcaaggagaaagacatttgtaggaacaccgttttggatggcaccagaagtgattcaaaattcagaagggtataatgagaaggcagatatatggtctctcggaataacaatgattgagatggcaaaaggagaacctccccttgctgaccttcatcctatgagagtgctttttatcattccccgggaaagccctcctcagttagatgagcatttttctcgtcctttgaaggaatttgtttcattttgcttgaaaaaggctcctgctgagagaccaagtgccaaagaacttctcaaacatagatttataaagagtgctaggaaaagcccgaaacttctggagagaataagggagcggccaaagtaccaagtaaaagaggacgaagatagtccaacatgtgatccgaaatctccggctgaatcatctgggactgttagagtggctagagatgacagaggccatggaacttctggaactagttttcagggaagaacaatcaaaaatgccgggtgggattttagcattgggggttcccagagtgctggaactgttagagctttgaagcctcctcaatccagggaaaggcgccaagaagttacttctgatcagagttttcaaaaatcatcacgagccagtgctagtcagttgtcttccacttctggtgctgcagtccccgaaatctctgaaggaggttttcttaaaagagattcttatcagaatgactgtcaagaagaggatgattcatcactcagtggttctggaactgttgtcataagatctcccagaagctctcaatcatcttcagtatttcgtgatctaagctctgggtctaccagcaggtatacatcttttgatgatgcttctacaagtggaacggttgttgtccgtgggcagaatgatgattctggatcacctcgaacaccaaaatcaagattagggcttcaagaaagaagttcaagtgcctctgaagatagcatagcaaatcttgcagaggcaaaggtagcacttgaagcaggtttcagaaggggcaatgctagggaaagacttggtaatgggaaggttaacaaaagaagggaacaagcaaaagatagttctgatcatttgagaagttcccgcgatgattctgataaacaaaaaccactcataagatcgcaacaagtgagtgatgatgaagatgagtctgaattggcatcattatctgcatcattgtcactattgctcttaccatccctgaaagaggctgttgggggtgacacttcaaaaggatcagttggacacagagtttcgagagccttagtgaagatggaacgagaaaagcctggttcttctgaagcatttatcgccaaactgattgaacagttgggaagttcaaaggaagtgtcagtgaaagaagtgcaagacatggcgatccgtgtgttcggtaagacagtgaacaatgatgcagaaaacaaaagaaagcaagcaagcaaagagtttgcttccaataccaacgttagcccacttggaagattcttattctcaagatggctaggccaaacatcacgtgatcttaacccaagttgagacatggagagaacataagactggtgtttgtgtttgtgtgtcttgacattggttgatgcattgaattttggtacttatgtgtataatttatttgttcagcagaagatgggtgtatttatgaattttaagtaaaatttcccctttctttttttctttttaaaaaaaaaaaaaaaaaaaaaaaaaaaaaaaaaaaaaaaaaaaaaaaaa

SEQ ID NO: 1419 - DNA, 2841 bp, Brassica napus
  Clone ID: BRANA-23APR03-CLUSTER304_1
ccgttgctgtcgggaacaatgtcttagacactcttgggagatcccggcagagtttcggtggtaaggtgcggcaggcaatgaatgtgcccaaggggaaaggtagccggggtgtggtcaaagccatgtttgagaggtttactgagaaagctatcaaggttattatgcttgctcaggaggaagctaggagactaggccacaattttgtgggaaccgaacagattcttctgggtcttattggtgagggtactggaattgctgctaaggttttgaagtccatggggattaacctaaaggatgcacgtgtggaggttgagaagattattggaaggggcagtgggtttgttgctgttgagatcccgtttactcctcgtgctaagcgtgttcttgaactctcactggaagaagctcgccaactcggtcacaattacatcggttccgagcaccttcttcttgggttgcttcgtgaaggtgaaggtgttgctgcccgagtccttgagaatttaggagcagatcctagtaatattcgcactcaggtgatacgcatggtgggtgagaacaatgaggtcactgctaatgttggtggaggaagcggcacgaataagatgccaactcttgaagagtacgggacaaacttgacgaaactggctgaggagggtaaattggacccagttgttggtaggcatccgcaaatagaacgtgtcgtgcagattcttggcaggaggaccaagaacaacccatgtcttattggagaacctggtgttggtaagacagctattgccgaaggactagcgcagcgtattgccagtggagttgttcgtgaaactagtgaagggaagaaggttataacacttgacatgggtcttctggctgctggaacgaaatatcgtggagagtttgaagagagagtgaaaaagcttatggaggaaattaaacagagcgacgagatcatcttgtttatcgatgaagtgcacactttgattggagcaggagcagcagaaggtgcaattgacgcagctaacattttaaaacccgctctcgctagaggtgaattgcagtgcattggagcgacaacattagacgaatacaggaagcacattgagaaagaccctgcattggaaagaagattccagccagtgaaagtacctgagcctactgtggatgaaacgattcagatcctaaagggtctgcgagagcgatatgaaattcatcataagcttcgttacactgacgagtctttagtcgacagcgtcacagttgtcataccagtatatcagtgatcgtttcctacctgacaaggcaattgacttgatcgatgaagctggttctcgggttcgacttcgtcatgcacaggtccctgaggaagctagggagcttgagaaggagcttaggcagataacaaaggagaagaatgaagctgtccgtggccaggactttgagaaggctgggactctacgggatagagaaattgagctcagagctgaggtgtctgctatccaagcgaaaggcaaggaaatgagcaaagcagagagtgagactggtgaggaaggtcctatggtgacagagtcagacatccagcacattgtgtcttcatggactggtatccctgtagagaaggtatcaaccgatgagtctgatcgcctcctcaagatggaagaaacccttcacaaacgtgtcataggccaagatgaagctgtcaaagccataagccgagccattcgccgtgcacgtgttggactcaagaaccctaaccgtccaatagccagtttcatattctttggtcctaccggtgtcgggaaatcagagcttgccaaagctttggcagcttactactttggatgtgaagaagccatgattcgtctagatatgagtgagttcatggagaggcacacagtctcgaaactcataggttcacctcctggatacgtcggttacactgaaccacctcagctaacggaagcagtcagacgccgcccttacacagtcgttctattcgacgagatagagaaagcccacccagatgttttcaacatgatgcttcagatcctcgaagatggtagactaacaaacagcaaaggaagaacagtggacttcaaaaacacgcttctcatcatgacatcaaatgtcggaagcagtgtgattgagaaaggaggaagacgcattggtttcgacctggactacgagaaagacagcagctacaacagaatcaagagccttgtgacccaggagttgaaacagtacttcagaccggagttcctcaacaggcttgacgagatgattctgttcagacagctaacgaagttggaagtgaaggaaattgcagacatattgttacaggagttgtttgagaggctgaagaagaaggaggttgagctccaagtaacagaaaggttcaaagagagagtagtggacgaaggttacaacccgagctatggagcgagaccgttgaggagagccatcatgagacttttggaggatagcatggaggagaagatgctagcgagagagatcaaggaaggagactcagtgattgtggacgttgactctgaaggtaaagtgacagtgctaaatggtggaagtggcactcccacaacatccttggaggagcaggaagattctctccccgttgcttgaaataaaaggggaagtgtgtttcttctctcttcttttgctttccccccttgaacgaattaatggcaagagaagagtctcaatgagatacttgtgggggtttcataatatacattctctatatatggaaccaatggaatgtatagatgacattgtggaggttctatttacaatgctttaaggacttgctttggtaccaaaaaaaaaaaaaaa

SEQ ID NO: 1420 - DNA, 1026 bp, Brassica napus
  Clone ID: BRANA-23APR03-CLUSTER305_1
actcttcttccccaaaaccctagacaatcgattcgaattctaaagctctctgattaatccgaaaagtgttggagctacgtcttgttcaaggctctctcttgaagaaggtgctagaatcgcaacaaggatctcgtcaacgacgcctaactttcgactgctccaccaccggcttctccctccaagccatggactccagccacgtggcgctcgtctccctcctgctcagatccgatggcttcgagcactaccgctgcgaccgtaacctctccatggggatgaacctcggtaacatgtcgaagatgctcaaatgggccggaagtgatgacatcatcacaagccaatgccgatggcgacggcgacaccgtcaccttcaagtttgcgaatcccaaccagaacaaaattgcagattttgagctgaagctgatggatatagagagtgagcatttgggtatacctgatgctgagtatcattcgatcgtgaggattccgtctaatgagttctctaggatttgcaaagatctcagtaccatcggtgacactgttgtgatatctgtgactaaagaaggggttaagttctctactgctggtgacattgggacagctaacattgtgttgagacagaacacaactgttgacaagccggaagatgcaattgtgattgagatgaacgagccagtgtcactctcgtttgcgctgaggtacatgaactccttcacaaaggcaactcctttgtcggacacggtgacgatcagcttatcgtctgagctgccagttgtggtggagtataaggtagctgagatgggttacattcgttactacttggctcctaagattgaagaagatgaagaagacaaggcctagaccccttttgtatccagagcttcttctgttcttactaaaatgtcgaagattcagtcatgatggattatgatggtttttccatttactttccctctagaatcagttgttttgtttgacttgttatgttctaaaatgttatgtttggtaaaaaaaaaaaaaaaaaaa

SEQ ID NO: 1421 - DNA, 941 bp, Brassica napus
  Clone ID: BRANA-23APR03-CLUSTER3063_1
attagaaaacagagacaaaatggctagccgaaaagctctaactaacatccaccggatcagccgcaacacaaagttgccagccgaaaggctcttattaacggccgccggtgcacgcgcacctcctctgttccgagacggagctccttctccgcttcgactctacttcggattcacgacaagtgagttgatctggggtcaagatccctctgccggagaacctcagatccacaaaacaaagagattgatctatacaaggaagagaagaagaggatagcaaccagcagtttgttgggtaggagcaggtaacgagggtttctggagcttgatctggatttgggtaacatgggttgaggagaatgtcaattccatggatgaaaacgctgtcaaaatccctcattcatgtccttgatttggaaaaccctgatctctggaaatggttaacttctcaggaacagcctcccgagatagtgagctcaaatccggtatttctggcgttgcacaagaaagtcatgacgaatctgaacaaacatgcagccccagagacgcgtgcagcagctggacaaccctgggtcaaaggctgggatgatttcaagagaggccgtgacgctcccatctccgggaaccagtaaaatctaaaaaaaaacacactctctcttccttgcaaaagtaacaaactgcaaaaaacacgtttataaaagttatcttataaatataataaagtgccaggccgtgaagaaggccgggggtataaatgtgtctctgtagtgagtgacacgatgagatagataattggaagttcttgatatgttatcaagggatattgtatttttttttgaaattgcggtgttctctcttcagcttatgctgacgaagagttttggacagttctttaatgctacaaaccgcctccgagtacaaaaaaaaaaaaaaagggcggccgc

SEQ ID NO: 1422 - DNA, 1248 bp, Brassica napus
  unsure (1)..(1248): unsure at all n locations
  Clone ID: BRANA-23APR03-CLUSTER3095_4
gatcacnctctacaacatttgtggaataattaacaattaactctacgatcttgaaactattagggttgataccatggggttactagatcatctttgggatgataccgtcgctggtcctctgccagagaacggccttggcaagcttcggaaacaccatactttcagtttccggccaagctccgccaatgattatttggtcgtgatttagatcaatcggaggtgaggtcgtacggcggagattcaccggaagaggcagtgaaagtaacacgcagcatcatgataataaaaccaccaggttaccaaagcggttccgctccggtgtcgccggccggttcaactacacccgtatcccccagtcctttctctggtgagttcttaacttttaccccgctttgcttccattaatcagttggtagggatgacgaaaaaaaataaatcagttggtaggtgatacagttactagtacagtacccttacttaattcgtttaggggtagtttcgtcaattcgttattaaacattgataggatgacatgtaagtgttgtctgcattctcttgtttggttatctttgatattattgtcgtttgatttgtataataatggttgaattaggtacgccgtcttgtcacacacctaacgtattcttttatggctgttcatatccccttaaagtctttatgatctatagctttaaaagatatatatatgtatggttttgagtgaatgtatgagaggttactaacgaaaagtgaatcctttgggatgttaacggagcaaacgcaggaggaaaggaaccctttcggtttaggagaaggtcggcatcggacgcgttcgataaggcagcaggatcagggaatggaccaaggaactctcctcctacttacggcgtgtgatctctaatctcctaaccccaaatctctaaagagagagagagagaagaagaaagaacagagtaggcccccgagacgctttcgttttgacacatcaagtggtccttgcatgcagagttcgtgtttcttcctttggtaggacatagaggttctcttttgtttatgcgtgtatcagtgtattgagtttgtttgcgtgtatgtgattacgtctctgtctatcttctctttttgtatttatatgtcatctcgttttcgtaatgtttctacgcgtctgtacagttttgctgcaatgataatgaaattatgtagagattcctaaaaaaaaaaaaaaaaaaaaaaaaaaaaaagggcggccgc

SEQ ID NO: 1423 - DNA, 772 bp, Brassica napus
  Clone ID: BRANA-23APR03-CLUSTER310_15
aacaataattgacactctctctttctctctatcatcttcatcatctcttcttcttccaactcttggtctgatcctcttacaagaacacagaaatggcgttcgcaggaacaactcagaaatgcatggcctgtgacaaaaccgtgtacctcgtcgacaagttaaccgctgataaccgggtctaccacaaagcttgtttccgttgtcaccattgcaaaggaactctcaagcttagcaattacaactcttttgaaggagttctctattgcagaccacatttcgatcaaaacttcaagagaactggaagtcttgagaaaagctttgaagggacaccaaagattggaaaaccagacaggcctttggagggagagagacctgctgggaccaaagtgtccaacatgtctggtggaactcgagaaaaatgtgttggctgtgacaaaactgtctatccaattgagaaggtgtcggtgaatggaacattgtaccacaggagctgtttcaagtgtacacatggaggctgcacgataagtccttcgaactacatagctcacgaggggaagctttattgcaagcatcatcatattcagcttatcaaggagaaaggaaatttgagccagctcgaaggaggaggagaaaatgccgctaaggacaaagtcgtcgctgcttaaacagttacaattttgaccatcgaagaatcactatagtgtctctctacttctcgatccatgacatatatattggatttgtttcttctcaagtatgtgttccttttgtt

SEQ ID NO: 1424 - DNA, 1480 bp, Brassica napus
  Clone ID: BRANA-23APR03-CLUSTER310_16
agtgtatctcctggccgtttctgcttcaacttctcgaatcgtcttctctgctcttctcaaagtttagtgaaagatggccgatggtgaggacattcagccccttgtttgtgacaatggaactggaatggtgaaggctgggtttgctggtgacgatgctcccagggctgtgttcccgagtattgttggtcgtcctaggcacactggtgtcatggttgggatgggtcaaaaagacgcttacgttggtgatgaagctcagtccaagagaggtattcttaccctaaagtatccgattgagcatggtattgtaagcaactgggatgacatggagaatatctggcatcacactttctacaacgagctccgtgttgcccctgaagagcacccggttcttctcactgaggcgccgcttaaccctaaggctaacagggaaaaaatgactcatatcatgttcgaaactttcaatgtccctgccatgtatgttgctatccaggctgttctttctctctacgctagtgggcgtactactggtattgtgctcgactctggtgatggtgtgtctcacaccgtgccgatctacgaaggttatgctcttcctcacgctatcctccgtctcgatctcgcgggtcgggacctcactgattccctgatgaagattctcaccgagagagggtacatgttcaccaccaccgccgagcgggaaatcgtccgtgacattaaagagaagcttgcttacgtggctctcgactacgagcaagagctggagacggctaagagcagttcttcggtggagaagaactacgagctacctgacggacaagtcatcaccatcggagctgagagattccgttgccctgaagtactcttccagccgtcgctcgtggggatggaagctcctggaatccatgagacaacttacaactccatcatgaagtgtgatgtggatatcaggaaggatctgtatggaaacatcgtcctcagtggtggttcgaccatgttccctggaattgctgaccgtatgagcaaagagatcacggcgctcgcaccaagcagcatgaagatcaaggtggtcgcaccgcctgagaggaagtacagtgtttggattggaggatccatcttggcatccctcagcactttccaacagatgtggatctcgaagggagagtacgatgagtcgggtccatccatcgtccacaggaaatgcttctaagtgtttctgccttctggttcgtggtggtgagtgtggtacgatctatatccatccccttgttgagatggggattgaaactatatgttgttattgtggttgtttctttttattatttttggtctctttagaaccccttttgaatgtctctcgagtctttctatgtactttagtttttacctttgtttcttatttctctttaaggatgcttgtgatgatgctctggtccttaagtaagcaaaaaaaaaaaaagtcattttataaaaaaaaaaaaaa

SEQ ID NO: 1425 - DNA, 1503 bp, Brassica napus
  unsure (1)..(1503): unsure at all n locations
  Clone ID: BRANA-23APR03-CLUSTER310_36
atccttagtgtatctcctggccgtttctgcttcatcttctcgaatcgtcttctcttcttcttctcaaagtttagtgaaagatggccgatggtgaggacattcagccccttgtttgtgacaatggaactggaatggtgaaggctggatttgctggtgatgatgctccaagggctgtgttcccgagtattgttggtcgtcctagacacactggtgtcatggttgggatgggtcagaaagacgcttacgttggtgacgaagctcagtccaagagaggtattcttaccctcaagtatccgattgagcatgggtattgtgagcaactgggatgacatggagaagatctggcatcacactttctacaacgagcttcgtgttgcacctgaagagcacccggttcttctcactgaggcgccgcttaaccctaaggctaacagggagaagatgactcagatcatgttcgagactttcaatgtccctgccatgtatgttgctattcaggctgttctttctctttacgctagtgggcgtactactggtattgtgcttgactctggtgatggtgtgtctcacaccgtgccgatctacgagggttatgctcttcctcacgctatcctccgtctcgatctcgcgggtagggacctcactgattctctgatgaagattctcaccgagagagggtacatgttcaccaccaccgccgagcgggaaattgtccgtgacattaaagagaagcttgcttacgtcgctctcgactacgagcaagagctggagacagctaagagcagttcttcggtggagaagaactacgagttacctgatggacaagtcatcaccatcggagctgaaagattccgttgccctgaagtactcttccagccgtcgctcgtggggatggaagctcctggaatccatgagacaacttacaactccatcatgaagtgtgacgtggatatcaggaaggatctgtatggaaacatcgtcctcagtggtggttcgaccatgttccctggaatcgctgaccgtatgagcaaagagatcacggcgctcgcaccgagcagcatgaagatcaaggtggtcgcaccgcctgagaggaagtacagtgtctggattggaggatctatccttgcttccctcagcactttccaacagatgtggatctcaaagggagagtacgatgagtcgggtccatccatcgtccacaggaaatgcttctaagtgtttctgccttctggttcgtggtggtgagtgtggtacgatctatatccatccccttgttgagatggggattgaaactatatgttgttattgtggttgtttctttttattatttttggtctctttagaaccttttgaatgtctctcgagtctttctatgtactttagttttacctttgtttcttatttctctttaaggatgcttgtgatgatgctctggtccttaagtaagcaaaaaaaagtcattttataaaaaanaaaaaaaaaaaaaagagggcggcnncgcta

SEQ ID NO: 1426 - DNA, 679 bp, Brassica napus
  unsure (1)..(679): unsure at all n locations
  Clone ID: BRANA-23APR03-CLUSTER3110_1
aataaccaatccacgttctttatcccccaaataaacactctttacgttttcggattaatcccacgatccattacaatggctacaatcatctcctgctccgctctcccttcgatccgtgcatcttccggatccatcagaaaaccggatccaaccgggaagaaacccggttcatggtgggctcctctcttcggctggtcatcggaaccagattacgtgaatagcaacaacaacagctcctcggctagtctggattcagatctggataaaactacgcggaggtgtctcacagaggagaaggcgaagcagctccgcatgaaaatcgcccaagtctccacgttccacgaagtcatgtatcattccgcaatcgcgtcacggctcgcgtctgacgtgtccgttcgggtcaacgagtaactggatcgggtcacggataataaataaataattcatcgaactaaaatttctttttcggatcaacaacctcttttgatcgatgatactcctcaagaaccgtgttggattgcgtatcgtcgtccatntagatcgtgcgcgttgttgtttcttgtcaaccgttggattgtcatttagtttagctttttttaaccaatatataaatatacaataatgctgaccgttggatttctagttgaagtttaagacaagtgtaaaaaaaaaaaaaaaa

SEQ ID NO: 1427 - DNA, 1952 bp, Brassica napus
  Clone ID: BRANA-23APR03-CLUSTER311_1
tgtgatcatcgtctcgggttgacttagaattttaccaccatgtatcgtcttatctccagcattgcttcaaaagctagagttgccagaaactgtacatcccagattggaagcagactcagttccactaggaattatgcagccaaagacataaggttcggtgttgagggtcgtgctttgatgcttagaggtgtcgaggagcttgctgatgctgttaaagtcaccatcccaccaaagggtcgtaatgtcatcatcgaacaaagctggggtgcacctaaggtgacaaaggatggtgtaactgttgccaagagcattgagttcaaggacagagtcaagaacgttggtgccagtcttgtcaaacaggttgctaaccgcccaacccaattgaaccgttgccttggtgatggaacaacgtgtgctacggttcttactagagctatcttcacggaaggctgtaaatcagtcgctgctggaatgaatgcaatggacttaagacgtggtatcaaactggctgttgacaccgttgtgacgaagttgaagagccgagcacgcatgattagcacttctgaggaaattgctcaagttggaaccatatcagctaatggagatagagaattggtgactgattgcaaggctatggagagtgttggcaaagagggagtcatcacaatccaagatggcaagaccttgtttaacgagcttgaagttgttgagggtatgaagattgacaggggatacatctccccatacttcattacaaaccagaagaaccaaaaatgtgaactagaagatcctctcattctaatccacgagaagaaaatctccaatttaaattctatggtgaaagtcttagaacttgccctcaagagtcaaaggtcgctgttgatcgttgcggcggatttggagagtgatgctcttgccgtgctaattctaaacaagctccgtgctggaattaaggtctgtgctgtgaaggctcctggttttggagaaaaccgtaaggcaaacatgcacgatctagctaccctcaccggagcccaggtaataacagaagagttgggtatgaatcttgagaaaattgacctcagtatgcttggaaactgcaaaaagataactgtatccaaagacgacactgttttccttggatggggggctggtgacaagaaagcaattggggagcgatgtgaacagatacgatccatggttgaagcgagcgagtctgactatgacaaggagaagctacaagaaaggttggctaagctttctggtggtgttgctgtactaaagattggaggtgcgagcgagtcagaagttggagaaaagaaagatcgagtgaccgatgctctaaatgccaccaaagcagctgttgaagagggtattgttccaggtggtggtgttgctcttttgtacgcgtcaaaagaacttgacaagctttcaacagctaactttgatcacaaaatcggtgtccaaatcatccagaacgctctcaagacacctgtttacaccattgcttccaacgctggagtcgagggtgcagtcattgtaggcaagcttttggaatcagataatcctgacctcggttatgatgctgctaaaggagaatacgttgatatggtgaagtctggtattatcgaccctgtgaaagtgatcagaaccgcattggttgatgctgcaagtgtctcgtctttgttgacaacaacggaagcagttgtgactgagattccaactaaagaggatgcgtctccagctatgggcggtggtggcggcggcatgggtggtatgggcggtatgggaggaatgggtttctgataagaaccatgccatgctagctaaggttactttggagattgttttgagatgataaagttgtttcatgctcaaggaactaacggattcttttttctgtcatgattgaaagggagagaccttaagatttttccatgaaaaaaaaaaaaaaa

SEQ ID NO: 1428 - DNA, 686 bp, Brassica napus
  Clone ID: BRANA-23APR03-CLUSTER313_4
acatccaacatcataacacaagcttataatcacaaaagcaactaagtctccttattttcttatcatcacaaagaaaaagagaaaagcaaaagacaatggcttcggctctgagttttttcacatgccttgttttgactgtgtgcatagttgcatcagtagatgcagcaatctcatgtggcacagtgacaagtaacttggctccatgtgccagctatctaacgaaaggcgggccggtgccagctccatgctgcgccggagtttcaaaattgaacagtatggctaaaaccacaccggaccgccaacaagcatgtaaatgcctaaagaccgctgcaaagaacgtcaatccaagtctagcctctagccttcctggaaagtgcggtgttagcattccctatcccatctccatgagcactaactgcgacaccgtcaagtgaagtgggaactcatatatcatcgtgaggatgaacagtatggtctagcataaataaaagagggtctatctacactgacctcagcatgtcctagtttgtcttgtttttattttgtagtcgaaagtttgtcatgttactttgtaatcatttgctttatatatattgtatcttaattatgtttaagatatgataatattatcttattaatcatcttctcttcacataaaaaaaaaaaaaaaaaaaaagggcggccgc

SEQ ID NO: 1429 - DNA, 1710 bp, Brassica napus
  Clone ID: BRANA-23APR03-CLUSTER316_1
ggcgtcattgccaattggcgaaacaaccagctttttaatggcaatatcgtattttactaatctccaccttcctcgttaacatcgagcttcagatacaacacacagatccctgattcttcttctataaaccaaaacctcaggaaccataaaaaaaaaagggcatcaaaaatgttgaagctttcgtgtaatgtgactaaccacttacacaccttctccttcttctccgattcctcccttttcatcccggttaatcgccgtaccctcgccgtctcgtcttctcagccaaggaagccggctttagatcctcttcgggcagttatctccgccgatcagggaagcatcagccctgttaattcgtgtaccccggcggatcggttccgagctggtcgattgatggaagatggttattcttacaaagagaagttcattgttagaagctatgaggttgggattaacaaaaccgccaccgtcgagacaattgctaatctcttacaggaggtggcatgtaaccatgttcagaagtgtggattctcgaccgatggatttgccacaacactcaccatgaggaaattgcatctcatatgggtcactgcaagaatgcacattgagatctacaagtacccagcttggagtgatgttgttgagatagagacatggtgccagagtgaaggaaggattggaacgagacgtgattggattctaagggactctgctacaaatgaagttattgggcgtgctacaagcaagtgggtgatgatgaaccaagacacaaggcggcttcaaagagttacagatgaagttcgggacgagtacttggttttctgtcctcgagaacccagactagcgtttccagaagagaacaatagcagcttaaagaaaatcccaaaactagaagatccagctcagtattctatgctagagcttaagcctcggcgagctgatctggacatgaaccagcacgtgaataacgtcacctacattggatgggtgcttgagagcatacctcaagaaatcattgatacgcatgagcttcaagttataactctagattacagaagagaatgccagcaagatgacattgtagattcactcaccacctctgaaatccctgacgacccgatctcaaagcttaccgggaccaacggatctgccacgtcaagcatacaaggacacaatgagagccaattcttgcatatgctgaggttgtcagaaaatggccaggagatcaatcgtggaagaacacaatggagaaagaaatcctcacgatgattttcttatatgcttctccagtgttggtgaagttcttgcttcacgtttatagttttattgtgtcttttgatcagatctgttgtggggttagatggtactggattatttgtgtagtgtggcgtctgtgttgttcgttttctgtccaaattttgggctttaagcaaaacgtttcttaggtctgcttgtagcttttcataaactagatttgttcatccaattatatatgctgagtttctctgatgaaactgggtatgtgatgttggaggcaaaatttgcacaattaaaatttgtattacataagttttttggataagctaaagttgtatgcaatgtaatacttttttatttattggagattaataatattttaaataaaaaaaaaaaaaaaaaaaaaaaaaaaaaaaaaaaaaaaaaaaaaaaaaaaaaaaaaaaaaactcgag

SEQ ID NO: 1430 - DNA, 1036 bp, Brassica napus
  unsure (1)..(1036): unsure at all n locations
  Clone ID: BRANA-23APR03-CLUSTER3182_1
aaagatctttccttttccactaccggagtaaggtacttacttttatgttattataatattcgtaaatcctttaatcctcctcaaaatatataaattaatcgtcgtcatgtacttcattttgtcgaagtccaccttgtcaaggtgaaatgtttttctggcttttacatcgtgcctaaacagagtagaagtagcgacgtctcctaccaccggctgggatcttacctggagtctagtgaacttgaacaggggcttctgcgtcccaggaacggtacagagctttcgagaaggtcgtagaaagaggttgagagtcctcgcggttctcaggttgcctccgaggtttctaacgagagatggtcaagcggagaagcagcaagaggtgaagcaagatcttctcgaagccatcgagcctctcgaacgtggcgccatcgcttctcctgatgaccagcttcggattgatcagttggcgcgtaaagtggaagcagtgaatccaaccaaggagcctttgaaatcagatttgctcaatgggaaatgggagctcatttacacaacctctgcttctattctgcaggctaagaaaccaaagttcttgagatcgataacaaactaccagtctatcaatgtggatacactcaaggttcaaaacatggagacttggcctttcttcaactcggtaactggagacataagacccctcaattcaaggaaggtcgcagtgcagctcaaagtgtttaaaattctcggccttatccctgtaaatgcacctgataccgcacgtggtgaactagagattacctatgtggacgaggaactacggctatcaaggggtgacaagggaaacttgtttatattgaagatgtttgatcccacttaccgaatccctctctgaagccaaaatggttccaagcccatcatacaaacatcgcttgttctttatctcttctatcatatgtatagatgaatgtttattcttctacaaacataaagtntaataaaaaaaaaaaagagacgagctcttgtcccaaaaaaaaaaaaaaaa

SEQ ID NO: 1431 - DNA, 927 bp, Brassica napus
  Clone ID: BRANA-23APR03-CLUSTER3258_5
atcattcggactaataggcttccgcagaaagccgacgaaaaggcagagaaaagacgcacaccgaagaaaaacacaaagacttcatcatcatcatctcctccttctttcgcctcagcaagaagctaatctgattcagccatggctaatgcggcgtcaggaatggcagtccacgatgactgcaagctcaagtttcttgaattgaaggccaagaggacataccgtttcatcgtctacaagattgaggagcagcagaagcaagtggtcgttgagaaactcggcgagcctggtcaatcccatgatgactttgcagctagtcttccagctgatgagtgccgctacgccatcttcgattttgatttcgtcactgctgagaactgccagaagagcaagattttcttcatcgcatggtctccggacacagcaagagttagaagcaagatgatctatgcgagctctaaggacaggttcaagagagagctagacgggattcaagtagagcttcaagcgaccgatccaactgagatggatctcgacattttcaaaagccgagccaattgaggaacggttgtatcaaactttgttgcttctgttaccagagtcatatgctttatcctaaagtttgctgtgacggcaccaaccaaaacagcttcatttgatcggtctttctcttcagtgtcttttttttttgggttcttacagtgtcttgcttaaaacttaaagagatttggcctgtgctcttttataatcgtgtaagaaacccaaaccgtttatcaacagatgatcctattggaacattgtctctcatctacatgagatgcctagtgatccagggatttaaacaaatgatataagataaggtagactgtctcgtgtaaaaaaaaaaaaaaaaaaaaaaaaaaaaaaaaaaaaaaaaaaaagggcggccgc

SEQ ID NO: 1432 - DNA, 2537 bp, Brassica napus
  Clone ID: BRANA-23APR03-CLUSTER334_1
gcacgagggagaaacagtttgatttaccactcaattaccaagaagggacctttgcatggaacccaaatcaatgatcaatataagccactgggatatcttgacaggcaacgtctagccgcaaggaggagtaacactacatattgctatgacttcccgttggcatttgagacagccttggagcagtttgggcattacaacaaccgggagttaagaaaccatgcaagggtactcttatcagtgctaaagagcttgtattctccaatttcagaaggtacatctcttatgccagttgaaagatcaccgggtctcaatgagtttggaatggtggcctggagcctagagatgtcgactcctgagtttcctatgggacggaagcttctcatagtcgccaatgatgtcaccttcaaagctggttcttttggtcctagagaggacgcgtttttccttgccgtgactgaactcgcatgtcccaagaagcttcccttgatttacttggcaccaaattctggtgccagactcggagtagctgaagaaatcaaagcctgctttaaagttggatggtcggatgaagtttcccccgaaaatggttttcagtatatatacctaagccctgaagaccatgcaaggattggatcatctgtcattgcgcacgaaataaagctccctagtggggaaacaaggtgggtgattgatacaatcgttggtaaagaagatggtattggtgtagagaatctaaccggaagtgggccaatagcgggcgcttactcgagggcatacaacgaaacatttactttgacctttgttagtggaagaacggtaggaattggtgcttaccttgccccccttggtatgcggtgtatacagagacttgaccagccgatcatattgactggcttttctacgctcaacaagttacttgggcgtgaggtctatagctctcacatgcaacttggtggcccgaaaatcatgggcacaaatggtgttgttcatcttacagtctcagatgatctcgaaggtgtatcagcgattctcgactggctgagctacattcctgcttacgttggtggtcctcttcctgttcttgccccgttagacccaccggacagaaccgtggagtacgttccagagaactcttgcgacccgcgagctgctatagctggggttaacgacaataccggtaaatggcttggcggtatctttgataaaaatagctttattgagactcttgaaggctgggcaagaacggtagtgactggtagagctaaactagggggaatacctgtaggagttgttgcggttgagacacagacagtaatgcagatcatcccagcagatccaggacagctcgactctcatgaaagagtggttccacaggcagggcaagtctggtttcctgattctgcgggcaagacagctcaagcgctcatggatttcacaaggaagagcttccattgtttatccttgcgaactggagagggttttcaggtgggcagagagatcttttcgaaggaatacttcaggcaggttgcgactattgtagaaaatctgagaacgtatcggcagccagtgtttgtgtacatccctaagatgggagagttgcgaggtggagcgtgggttgttgttgatagccaaataaattcagattatgttgaaatgtatgctgatgaaactgctagggggaatgtgcttgagccagaaggaacgatagagataaaatttagaacgaaagagatgttagagtgcatgggaaggttagacccgaagctaatcgatctcaaagcaagactgcaagatcccaaccaaagtgaggcttatacaaatatcgagctcctccagcaacagattaaagcccgagagaagcttctcttaccagtttatatccaaatcgccaccaaatttgcggaacttcacgatacttccatgagaatgactgccaaaggagtgatcaaaatgtgtgtggagtggatcggctcgaggtccttcttctataagaagctcaaccggagaattgctgagaactctcttgtgaaaaacgtaagagaagcttcaggagacgacttatcgtataaatctgcaatgggtttaattcaggattggttctccaaatctgacattccaaaggggaaagaagaagcttggacagacgaccaagtgttctttacatggaaggacaacgttagtaactacgagttgaatctgagcgaattgagaccgcagaaactgttgaacccaacttgcagagattggaaattccgtcggatctatcggcgctgccacaaggacttgccaatcttctaaacaaggtggagccttcaagaagagaagagcttgttgaagcgctacgaaaagtgttaggttgatgtacaagaggtctaagcttgtgacccgagaaagatggtcctttggtgttgcttgtgtcctacggtgaaagaagctagttggaaattagatgtggtctttctttcttaaatgtgttggcccgagctgtaaatgttgttgtagcgtataagtgagaattgcgtaataatttattcaac

SEQ ID NO: 1433 - DNA, 935 bp, Brassica napus
  Clone ID: BRANA-23APR03-CLUSTER34261_1
gtttcaatttggccacccactctcactctttcaacaacacttcctcacctcttccttctcacgcaacttcctctacaaaactcttttaagacatctctgtacacactcgtttcttttagttatctctctgctgtctagtaaggtctttagttctgctaactatggcgcttgaagctctaaattcaccgaggatagcttctccagttccgactctgttcgaggagcactggaccaaaggtaagcggtccaaaagatccagatctgatcatcctcaccgtctcactgaggaagagtacctcgctttctgcctcatgcttcttgctcgcgacggcgatcgccatcacgtggaggaggaaaagactgtttacaagtgcggcgtttgtgacaaggtgtttctttcttaccaagctctcggtggtcacaaggcgagtcaccggaatttttccagcggtgtcgacccacgcgtccggacaccggccgccgtgaagtcacacgtttgctcgatatgtcataaatcattcaccaccggtcaagctcttggcggccacaagcggtgccactatgatggaagtagtaacgttgtttctaattctgaaggtgtggggtctactagccacgtcagcggaaatagccgccgtggattcgaccttaacatcacgcccataaatgaattatcgccggacgatgaagtgaagagcccgttgccgtcgaagaagctccgcctcacgtaaggcctcaagtaaggcctattggattcttatgtatataccaaatttccagcttcacagattcaattttttcttataatatagtttttgttgattcttttacccaaacataaatacgtgcaagttgtaagggcatgccacttttcatataaacttaaaaatgttgtaattggaagactaaaaaaaaaaaaaaaaaagggcggccgc

SEQ ID NO: 1434 - DNA, 763 bp, Brassica napus
  unsure (1)..(763): unsure at all n locations
  Clone ID: BRANA-23APR03-CLUSTER34466_1
aaaagaacaataatgttgtgttattaaaatacaaaaaaaatgtgcgcnttttagaatcagaaaactgcgaattaaaaaggtgagagcatgaacctagaatcggtcgacccacgcgtccgagtatcttgaaggagataagaaagatgaagacgaatcgaaagtagcgaatctaccaccgagattcatcgagagattcgtggcgaaaggaatcaaagtagatctcatcgagcctggtcgaatcgtctgctccatgaaagtccaacctcatctcctgaacgccggcagtttcttacacggcggagcaacggcgactctggtggacttgataggatcggctgtgattttcacaaccggagtttcgagctcgggtgtgtcagtggagatcaatgtttcttacctcgattctgctttccttgacgaggagatagagattgagtccaaggctctgcgtgtgggtaaagctgtagcagttgtgagtgttgagctgaggaagaagaaggatggtaagcttatagctcaaggtcgccatactaagtaccttgctccccgttccaagctttgaacccttattataccttaaacaaatatgaatcggtttgtcttatctcacatcacgattaataatgtattaaagtatgttctattctccttctaatactgaaaaagctatgttgaagaagttaaaaaaacgatttaagcataaacgtttgatataatactaaactattatcagttaaaaaaaaaaaaaaaaaagggcggccgc

SEQ ID NO: 1435 - DNA, 2976 bp, Brassica napus
  Clone ID: BRANA-23APR03-CLUSTER346_1
ggcacgagaaaaaatagcttctccatggcaacctccgtcgataaccgccactatccccgcctcagctccgccctaaacggcggggttgtccactccttcaaacctcctctcgtcccttccccttccctcgaccgtgaccaagaccagagcgtcaacgtcccaaccgaaaaatccgtcgacaaaaccaccaaagaagaccgtttcgactccagtgacgacgaggacgagagccacaaccgttacgtctcctactacaaggagatggttctcaaatccaactccgatctagaaccgacggctctagactcgcgagacgaatccacgggtgacaaatggatccaccgtaactcctctatggtgcgtctcactggaaaacaccccttcaacgccgaggctcccctcccccgcctcatgcaccacggcttcatcacccccgtccctctccactacgtccgcaaccacgggggcgtccccaaagccgagtggtcggactggtccgtcgaggtcaccgggctcgtcaagcgcccggcggggctcaccatggagcagctcatctccgagttccccagccgcgagtttcccgtgacgctcgtctgcgccggaaaccgccgcaaggagcagaacatggtgaagcagaccatcgggttcaactggggctccgccggcgtgtccacctccctgtggagaggcgttgctctgagcgacgtcctccgccggtgcggcgtctacagcaagagaggcggcgctctcaacgtgtgcttcgaaggcgcggaggatcttcccggaggcggggggtctaagtacgggacgagcatcaagaaggagatggccatggaccccgcgagagacattatattggcgtacatgcagaacggggagcttctcacgccggatcacgggttcccggttcgggtcattatacccggtttcatcggcgggcggatggttaagtggttgaagcgcatcatcgtcacgcctcaagagtcagacaattactaccactacaaagacaacagagtcctcccttcttacgtggatgctgagctgccaaatgaagaatcttggtggtacaggccggagtatataatcaacgagcttaatataaactcggtgataacgacacctggtcacgaggagattttgccgatcaatgcattcacgactcagaagccttacactttgaaaggctatgcttactctggaggagggaagaaggtaacgagagtggaggtgactctagacggaggagagacgtggagcgtgtgtgagcttgaccaccaagagaagccaaacaagtatggcaagttctggtgctggtgcttctggtcgcttgacgttgaggttcttgatctgcttagtgctaaagaggtagctgttcgagcctgggacgagtctttgaacacccaacctgaaaaactcatctggaacctcatggggatgatgaacaactgctggttcaggatcaaaaccaacgtgtgcaagcctcacagaggagagataggtatcgttttcgaacacccgacccgacccggaaaccaatcgggcgggtggatggcaaaggaacgtcagatcgagaaatcctccgagtcacaccctactttgaaaaaatcagtttcaacacctttcatgaacactgcctcaaagatgtactcaatgtccgaagttaggaaacacaactcagctgaatctgcatggatcatcgtccacggtcacatctacgactgcacacgtttcttgaaagaccaccctggtggttcggactctatcctcatcaacgctggcactgattgcaccgaggagttcgaagccattcattcggacaaagcaaagaagcttctagaagattaccgtatcggtgagcttattacaacggggtacgactcttcacctaacgtctcggtccacggtggctcgagtgtgatgtctttgctagctcctatcagacagctagctcctactaagaacatagctttggtcaacccacgtgagaaagtcccggttaaactcatcgagaagacttcgatctcccacgacgtgcgtagattccgtttcgcgttaccgtctgaagatcagcagcttggtctacctgtcgggaaacacatcttcctctgcgccactattaacgacaagctttgtcttagagcctatactccgaccagcacggtcgacgcggttggatacatcgacttggtcatcaaggtttacttcaagaacgtccatccaagattccccaacggagggctcatgtcgcagcacccagactcgttaccgatcggtgcggttttagacatcaaaggtccgttaggacatattgagtaccaaggcagaggtaaattcatggtcagcggtaaaccaaagtttgctaataaactagccatgcttgctggaggaaccggtataactccaatctaccaagtcattcaatcgatactaagtgacccggaggacgaaaccgagatgtttgtggtttacgcgaaccgaaccgaggatgatattcttgtgagagaagagctagaaggatgggctagtaagtttccggacaggctaaagatttggtacgttgttgagattgctaaagaaggttgggagtacagcacagggtttatcaccgaagctgtgcttagagaacatgtccctgaaggattagaaggcgagtctctggccttggcatgtggaccaccgcctatgattcagtttgcgttgcagcctaatcttgagaagatgggttatgatattaaggaagatctcttgatcttctaagaatttgttcaagatttatatatgtattgaaacttgaaagttaataacaattatagcttatgtaaatacatggttaattatcatgtgtgcttttgttagagtttttattccaaatttataatgtataaattgcgtttatggctattgttgttgatgatgatgataaatggtgaaagcatgtaactcaattaaaaaaaaaaaaaaaagggcggccgc

SEQ ID NO: 1436 - DNA, 736 bp, Brassica napus
  Clone ID: BRANA-23APR03-CLUSTER3537_3
atcgactctcgcgagctcttctcttcttcgtactaatctcgttgcgatctctctctcgctctccctctcgctctccagcgcaaagtgtgagacttttggcgggaaaatgtcggggaaaggagcgaagggtttgataatggggaaacccagtggtagcgagaaggacaaggacaagaagaaacaacccatcacccgttctgctcgagctggtcttcagttccctgtaggaagggtgcataggctgttgaagacaaggtccactgctcacggaagagttggagcaactgcagctgtttacacagcagccatactggagtatctgaccgcagaagttttggagttggctggtaacgcgagcaaggacctcaaggtgaaacgtatctccccgaggcacttgcagcttgcgattcgtggagatgaagagctggatactctcatcaaaggaactatagctggtggtggtgtcatccctcacatccacaagtctctcatcaacaaatccgccaaggaatagattcttaccactctttgggccttgcttctctgtttcttttaagtatctctcgcgagagagagtctgtgtttgataaaagaagacgctagagagctctttgtttaggttccttttgttatgcatatgtatttgatgatttatctaaaactcattttctgactaaaaaaaaaaaaaaaaaaaaaaaaaaaaaaaaaaaaaaaaaaaaaaaaaggggcgggccgc

SEQ ID NO: 1437 - DNA, 886 bp, Brassica napus
  Clone ID: BRANA-23APR03-CLUSTER3555_1
aaaaagtatctcttttctattttacaattacgatctctctttctcttgcggaaaaattttggagaaatctatagctagggcctttattttcgaatgttagaccactttttttacctcaagccaaagggagttgaacctgataggctagcccgtaggtaagaacgcgagtggacgacggagtgcatggaagcgacccacgctcgttcgcttctcagctgacgctccttctcttcttccctccctactctccctcttctccgctcatacccttgaccgtccacgccgtacgtcatgctgtccccggagctggggttctgccgtcccgtgatgttggagatgttggtgattgatgttgctgctttttagaagcatataggttggctaagtgagagaaaaagggctaagggagctatgatgggcgtatttgttggtgacgcgacaatggtaattttcggtgggggagataaggaatatcctgctgcgagtttcttgataaacaccatagcttctcttcttgttgtgggcagccatggtcatggagcaatcaaaagagggcggttatcggggagcgtgagcgactactgtgcccatcatgcgcattgctcggtgatgatcgtcaagaagcctaagatcaagctatgatgatcacccaacagccaaaataaagtctctccgcctagtcaaatcaaataatgtttaccttgatgtgaaatgattcaagacaatatttgtgtgtgattgtttattacatgtactctttttatcatcagtgtacttttcagtattcctaaactatattattcccgtttaacaaaacaattctcagatacaatcactgagacgaagagagaaatagagagagatattgagcgttaagaaatgcaat

SEQ ID NO: 1438 - DNA, 878 bp, Brassica napus
  unsure (1)..(878): unsure at all n locations
  Clone ID: BRANA-23APR03-CLUSTER3555_4
attttggaatcttcttcttcttctgtaagctcaagcaaaagggcgttgagagtcatggctaccgtagagaagaaaccgctgatggtcgtcggtgtggacgaaagcgagcagagcacctacgctttggagtggacgctcgatcgcttcttcgctccctacgctcccaattttccgttcaagctcttgatcatccacgccaaacctaacgccgtctccgccgttggtttcgctggtcccggaattgtggaggttgtgcctcatgttgatgcagatttgaagcataccgctgctaaggttgtcgaaaaggccaaaggaatctgtgagagcaaatcggttcatgacgcgacgatggaagttttcgaaggcgatgcaaggaatatcctgtgcgaggttgtggataaacaccatgtctcttctcctgncgcaaaccgacgtcgttccgatcttaggcgcatcggagacgaaacagctctctgcttccgtcgcggagctcggaatcaaatttgaattcttaaccggtgatgatcgcgccttcttctccacgttcctctcgctacgtacattcgattccagatcttgatttcccgacggtgtctcacgtttctgccgcttacgtgagctctcaagcggaggagcaactattttgatcgaagggagtagatctaacctccgtctaagagaagctcgagtagacgaatcgaccgtaaccgccggttcgctctccccaacaacaccgcagcaaatcccagccatttgatctcagcaacaccacaataacaacttcaattatagatcaaaataaacaaaacaattctcagatacaatcactgagacgaagagagaaatagagagagatattgagcgttaagaaatgcaat

SEQ ID NO: 1439 - DNA, 937 bp, Brassica napus
  unsure (1)..(937): unsure at all n locations
  Clone ID: BRANA-23APR03-CLUSTER3557_1
atatcttccaattcagtttcgacatttctcgctattcgtctcgggttttgtttgttgattgagagaacatgggaggtgacaaagacagagggtttcatgggtatccacccgctggatacccgccaggtcctggggcttatccaccagctggatacccaccacatcaagtttaatccagtttcgacattgtttcgcgattcgtctcgggttttgttttgttgattgagagaaaacatgggaggtgaggaagacaaagagaaagggttttttgggtacccacccgctggatacccgccgggtcctggggcttatccaccagctggatacccaccacaacaagcttaccctcccccaccacctggtgcctacccacctcaacctggttatcctccgggtgcatacccacctccacctggtgcctaccctcctgctcctggttatggtggttatcctcctgcgcctggtcatgctggttatcctcctgctggatatcctcctcatcactcaggacacgcagctggaatcgggggtatgattgcaggtgctgcagctgcctacggagctcaccacatagctcatagctctcacggtccttacggacacgcagcatatggtcacggatttggacatggtcatggctatggctatggttatggtcatggtaagttcaagcacgggaagttcaagcatcacggaggcaagtttaaacatgggaggcatgggatgtttggaggaggtaagttcaagaagtggaagtgatctaaaaacctcttttaatcttatctctcgccggttcaagtttgacaattgaggctttaataatgattatgatatcacatgttgtactatgaagctattatatatggttttatgatattactgattctgtttttaatataatttcatatattatgcccntgtaaaaaaaaaaaaaaaa

SEQ ID NO: 1440 - DNA, 1056 bp, Brassica napus
  unsure (1)..(1056): unsure at all n locations
  Clone ID: BRANA-23APR03-CLUSTER3560_1
acccttatcgttccactaatcaatattttcatctctctccgacatgacagacgacagagtctacccagcctctaaacctcccggcgttgctggagccaccgccaacccaactttcccggcgactaaagctcagctctacagcgcaaaccgccccgcttaccgtccgccagccccccgccgccgcacccacagccgcggatgctgctgtcgctgctgctgctggacgatcttcgtaatcatcctcttgatcctcctcgtcgccgccgcgtccgccgtcgtgtacctgatctaccgtcctcagcgtccgagcttcaccgtctcttccctcaaagtctcctctctcaacctcacctcctccacgcacctcgccaccgccatatccctctccgtcgtggccaagaacccgaacaaaaacgtcgggttcagctacgacgccgccgacgtcacggtctacagagtctcccccggagacgatgacgttgtgatcggtaaaggctcgatcgcgtcgtttgtgcacggtaagaagaacacgactctgcttagatctacggtcgggagtcctccgggagatcttgaccagctgtcggcgggtaagctcaagggagatttgaaggcnaagagaggagtggcggttaagattgttctgaacacgaaggtgncggtgaagatgggagctgtgaaaacgcctaagtcagggatcagggttacttgtgaagggattagagcggtggctccgacggggaagaaggcgacggcggctgttaccnccgctgctaagtgtaaggttgatctcaggttcaaggtcttgaaattcnctttttaaaacattggggaaggaaaatnaaaatcttncattccattttttttttgttatataaatccattgtttcatttcttttttatttgatttcatatacagttttttcgattctggtaagactttatttttttgtttatgtaaatnaagatatatacacagtgttcggtccgaatattntngttngtggtnattcnagaaaaaaatgttngatctgcntanncaaaaaaaaaaaaaaa

SEQ ID NO: 1441 - DNA, 1026 bp, Brassica napus
  Clone ID: BRANA-23APR03-CLUSTER3561_1
caattagtctttaactcgtttggtaacagtttggttaaaagcaaagaaacaacccaaagtctctcaattcaatgcgataaaaaaaaagagagtcaaagacacagagatccgaccatcggagcaagacgaagaacatatgatgtcggagggaggagcaccgtcgaaatacgtgaagttgacgaaggagcaaggtccggtcgatgaggttaatcccggcgaactcaatcaaccgattcaggttccccatctagcagttcacaaatgcaacgagtgtggccaaactctacctgagaattttgaagctcctgcagatgagccatggactactggaatattcgggtgcactgaggacatgagtagtttttggcagggactcttttgcccaagtgttctcttcggacgtgtctatgaaactctgagtgacgaagaaacctcatggaccaaagcttgtatctgccattccattgtggtagaaggaggactaacagttgcatccatagctgcttgtgctcccggtatagatccgcatacaacgtttcttatgtgggaaggcttgctgtttgtttggtggatgtgtggcatttacaccggaaacgtcaggcaaactctacagaggaaataccatctccagaactctccatgtgacccatgtatggtgcattgttgtctccatttctgtgcggtttgtcaagagcaccgtgagatgaagaaccgtctttcggacaactttgtgatgcccatgactgtggttaatccgccacctgttcaagagatgagtgcctctaacgactctgtcccggtttcacaccatggctctgagctcgagatgcggccattgtagagactcaaaatgtttcaaccagatttaaggtcctgttttgttctgttttgtaatggacctgtgttttaatgaggaatggatgatatgttaaaccgacttggtttgtttagtattcatacaatcatgatccttatcgcaaaattaaaatattatttttaagaaaaaaaaaaaaaaagggcggccgc

SEQ ID NO: 1442 - DNA, 673 bp, Brassica napus
  Clone ID: BRANA-23APR03-CLUSTER3590_1
accgaacacaaagtggtcatgtcttcttcttccttcgtctcctcctgctcttcgattttacgtattggtgatgcgagaagtgggaactcacgagcttcaagcttcacattccaacctcaggtttcttgcgggattcaaagggatgataatggacgccgtatctggcggaggagaacacttacaaagaaggacgatatgctgcgttacaaactgcagagagttccgtttgtggaagagcaagtgaggaagatacaggaagttgggaaggtaatgaccatggacattgagcgtttgcttttgagcgaagacaaccgctttgagttcgtcaacagtgtagcagctgaggcaacagagtacgttgagaaaaacagagacgaatacggaggcaccaagaaagccatctttcacgttctgagcaaccgtgtcaacgatctcgggtttgatcgcccagaagcttatgcagtcagatccttacaaacctggtcctggctacttgaaggagtattacacttgaagagatactactgttatcaagagtttaaattgtgattcatcagcttttcttgttcttgttcaatgcattcacaactttaattttggtagaacaatattataaagttttaaaatcttgcaagttgttggtaagtcaatgcaaaaaaaaaaaaaaaaaagc

SEQ ID NO: 1443 - DNA, 927 bp, Brassica napus
  unsure (1)..(927): unsure at all n locations
  Clone ID: BRANA-23APR03-CLUSTER3652_1
gaaagggccaactagggtttgacaatcaaattgggatcgaaagaggaaattagggtttgacaatcgacatggatacaaaatcaagcgaggaatcgtcgatcgagacggagccaatggaaacttccaccggcgttgacacgtccttgctagggaagcgcaagttggaggaaacagacgaccaggaggattccggcgaagaggaagtcgacggagatgaggaggaggaggaaggtagtgatttctattgggagaaggatagtttcgatgggcgggaatatcatccctctgacgacagcgagtactcagacgaggatctacaggaaagagcacgttattacaatccgcactgtcatcgaaaccaagggtttctttgagtcatcgggtaaaatccccttttacacttggtctggaattgttgtagcctcgcatcgggatcttgaaacgaaaatgtatggaggtatcacgggtcgggagttcgtcgggaacatggcatgtgaatgtgttgaaaaacacaaccgaagaacaataagaatgtgaaattcgagcatgtattgagggctaatttcgacccaggagccaagactaagtactacatcacctttgctgcaagagaatctgactctcctgatgcgcctctcgtggaatatcaagctaaggcggtttggtctgcaggcattacttatcccatcttttgcagacccgctccaccatcacctaaacactaaacagggttataaagagtaactgaagcgatggaagagagcacttgaaagaggtaatcaagttgatggaagggaaggaagcagttaaaagagattcaacaatgttcttgtttatgttctacntttaaactatttgcctatttcgtggatttaaaaactatgttttagttatatgtcaagttctactttaaaaaaaaaaaaaaaa

SEQ ID NO: 1444 - DNA, 1257 bp, Brassica napus
  unsure (1)..(1257): unsure at all n locations
  Clone ID: BRANA-23APR03-CLUSTER3653_2
aagccaggatccgggcatagctgtacagatccccacactccaaaaggaaccctaatcatgcctccaggtgctaagaaaaggaaagctgcaaagaaaaagcagcaacaacaagaagcatcttctcctcaaaccaatctcatacccaccaccaaccatgaatcgagggaagaagatgctgtcagaaccgacaaggatactgatgagcgtatagagatcactgattcaagccgtgatcgtgacaagaagaactctagcagtagcagtaatagcagcagcagcagcagctcggatgatgaatccggtgaagttaagaagaaggagagtggtgaatctgtttctgaagctgttactgtgagttctgtgccaaaccaacctattccaattgctggagatgctcctttcatggggtctactggctaatgtgattggtcgagagtatcggtttgatggattcaactactcctcctagtggtacacttacctcagacgagagttctcttgcatctgatgaggttaagcaggcgtcttcaagtgcagtcgacccacgcgtcagagaaactgagggaaaaacttcggctcctgttcctgaaggcagcaaggagtctggagctaccagttctcatgaagaagaggcttccgtgctaccaatgcatggagttgcgcaaagaacctcatggttaagttgttgtggcttgtttgatgtggtcacaggatccagtagataaactcagaaacagtgtttccttcgtgagctcagaagtgttatcacagctaaggattctcggttttctatatcaggttacctatgaaaattcagtaacttgatgaatagtcttaaggcaggcttgtctgtagtttctgctctttatataagtggctctcttccctttcgctctgttcgattccttgtctgttgttgtttttgttctctcaggttctgagactttgagacagttgttggccaatttatgtatgattattatttctctaaaaaaaaaaaaaaaaaagggcggccccataagggtttcataaaaaaaaaaaaaaaaaaaaaaaaaaaaaaaaaaaaaaaaaaaaaaaaaaaaaaaaaaaaaaaaaaaaaaaaaaaaaaaaaaaaaaaaaaaaaaaannaaaaaaaaaaaaaaaaaaaccaaaaaaaaaaaaaaaaaaaaaggggggggccccttttaaagaaccaaattttaataccccggccttgcaaagtaatattttttttttggggccaccaaattcaattcc

SEQ ID NO: 1445 - DNA, 690 bp, Brassica napus
  unsure (1)..(690): unsure at all n locations
  Clone ID: BRANA-23APR03-CLUSTER3666_1
aacaagtcactctacaatggcggaaacgttctctcgcggcgacgcccaatactggcccatctacggtagcagcaacaccaccgaaagaaacagcccttacgcttctcttatccgccttctcagatctcattcaccaacctcctcacagctctttggtttcctcgctctcttcatatccggcggaatcctcctcttcctcctaggcgtaaccgtgacggtggtcgggatcggcttcgttgtctttcttccgttgatcatcatctcgagtccggtatggatcccggtttttatcggggttggcgggttcttatcggtcgccggttttcttgttggaacgttggctgtcgtatcgtgggcgtaccgttatttccgtggaaggcacccggttggatcggatcaaatggattatgcacgtggtcggatctatgacacggcctctcacgttaaagattatgctagagagtacggtggatatttccacggtagggctaaagatgcagcccctggtgcttaaccctaaccggtcggtataatctggttcaggggaagatagttgacctgttccgtatatggaggataaacatggttcatgcncggtaatatatatactattacatattttgttatttggtttccgtttataaataataaaatgaatatatatggttaaatataaaaaaaaaaaaaaaa

SEQ ID NO: 1446 - DNA, 759 bp, Brassica napus
  unsure (1)..(759): unsure at all n locations
  Clone ID: BRANA-23APR03-CLUSTER3687_1
acatttctctcaaagtgatcagacgagttaagcaaacaacaacagagaatcaaacaatggccctcttctccgccgcgcttccccttctcctcctcttcctttctgtttcctctccgtctgttagcggaaacactgcgcagtccgtcgaatgctccgccgtgataatgaccttgacgaagtgtttgcctttcgtgacgatcgggagtcaagtggagaagcccgagaccgcgtgttgctctgttctcaaaaccgtgctcgacacgaaagctgaatgtctgtgcgaagggttgaagagcagtgccgccgcgggaatcaatctgaacctcactaaagccggtactcttcccgatgcttgccaactcaaagctcctcccatgcctgcttgtgcattgtttgctaaaccccctgctagtgcgccagctccagttcctgctgctagaccactaaatggatcgggaccgagttcgaactcagctccagctccaagcccttctcatagtaaccatggatcttcaatctctgtcttgtcactcgcaatcagcggcgcattggtcataatgttcgctcgtatctaacacccctatcatttttagttaagagtttgcttttatnttgtnagnnncnanggagttttcttgttnagaccgnttatatttttagttatgacattaccaagtgctctgtcacncattnttcagttttattatttgaattgagtggttattatttaaaaaaaaaaaaagaaaaaaaaaaaaaaaa

SEQ ID NO: 1447 - DNA, 845 bp, Brassica napus
  unsure (1)..(845): unsure at all n locations
  Clone ID: BRANA-23APR03-CLUSTER3688_1
gtttccttctttgtccttacaacgccggatctgtctccccttcattctcgccgtactatagtttactagattctccgagcaaccggcgtcggcgatgggaactgggagagaagccagcgtgtcgctagatggagtcagagacaaaaacatgatgcagcttaagaagctcaacactgttctgttccctgttcgatacaacgacaagtactacgccgatgcaatctcatccggcgaattcgctaagcttgcttattacagtgacatatgtgttggagctattgcttgtcggctggagacgaaaggagggaccatgagagtgtatataatgactcttggtgttcttgcaccataccgcggcattggcattggctcaaagctgttgaatcatgttcttgacatgtgctccaagcaaaatgtatctgagatatacttgcatgttcagacgaacaacgaagatgcgatcaagttctacaagaagtttgggtttgacatcacagataccattccagactattacatcaacatcgagcctagagactgctatgttgtcaccaagtcctttgctcaaatntgaagncaacaaatgatgacagtaaacgtgacttgggggaagccattcctcccccacagtttgtttgctcaattttcaagtctattcttaacgttacaaacttacaatgcgtntgtttcctaagttttgcttgtttttgatgtccttaactgatgtttctctgtacntagtgatntgttacccccttggttttggaccttttgattggggaagttttgactttgcaactcttattttacttaactaagccaattcaacaaaaaaaaaaaaaaaa

SEQ ID NO: 1448 - DNA, 2150 bp, Brassica napus
  Clone ID: BRANA-23APR03-CLUSTER368_1
tcgccgcctgagccaatctcagcaatgtcgtcgacctatgcgagattcgacaccgtttttctcctttctagattcgccggcgctaagtactcgccgctgtggccttcttcttcatcgtcgtcgcactcttctctcttatcttccgggattcaccttagagccaagccgaattcgcgtttgcgatcggttacaggagcatcctcttcatcgtctggtcctatcatcgccggaagtgaaagcattgagatcaaatcgttgccgacgaagcctatcgaggggcagaagactggaacaagcggcctccggaagaaggtgaaagttttcatgcaagataattacctagccaactggatccaggcattgtttaattcattgcccctggaggactataaggacgccacattggttttaggaggtgatggtcgttacttcaacaaagaggcctcgcagatcataatcaaaattgcggctgggaatggagttggaaaaattttagttggacaggaaggcattttgtcaaccccagcggtttccgctgtaatcaggaaacgaaaggcaaatggaggatttattatgagtgcaagtcataatcctggtggacctgaatatgactggggtatcaagttcaattacagcagtggtcagccagctcctgaatccattactgacaaaatttatggaaatacactttcaatctctgagattaaggtggcagagattcccgacattgatctttctcatgttggagttactaaatatgggaatttcagtgtggaagttatagatcctatttccgattacttggagctcatggaggatgtgtttgactttgatctcattagaggtcttctttcaagatcagattttgggttcatgtttgatgccatgcatgctgttactggtgcttatgcgaaaccaatttttgtcgataatcttgaagccaaaccggattcaatttccaacggagttcccctggaagattttgggcatggccatccagatcctaatttgacatatgcaaaggatttggttgatgtcatgtatcgtgacgatggacctgatttcggagcagcaagtgatggtgatggtgacagaaatatggtcttaggaaacaaattctttgtcactccttcagactctgttgctatcattgcagccaatgcacaagaagcaattccatatttccgtgctggtcctaagggtctagcacgttctatgccaactagtggtgctctggatcgtgttgccgagaagttgaagcttcctttcttcgaggttcccaccggatggaaattttttggaaatcttatggatgctggaaaattgtcaatctgtggagaagagagctttggcacaggttctgatcacatccgtgagaaggatggcatatgggctgtgttagcgtggctttcgatcctagctcatcgcatcaaggacaagaaaccaggggagaagttggtttctgttgcagatgttgtgaacgagtactgggcgacatatggaaggaactttttttccagatacgactatgaagaatgtgaatctgaaggagccaataaaatgatcgaatatcttagagatatcgtggctaagagcaaggccggtgaaaattatggaaactatgtcctccagtttgcagatgacttttcatacaaggaccctgttgatggaagtgttgcatccaagcaaggtgttcggtttgtcttcactgatggatccagaatcatatatcgtttatccggaaatggttcagctggtgccacggttagaatatatattgaacagtttgagccagacgtttcaaagcatgatgtggatgcccagatagctataaaacctttgatagatcttgcattgtctgtatcaaagttgaaggagtttacagggagggagaagcccactgtcattacatgaggaaaaaaactattctgtgtcacatggtccttatgaaaggcgagttgggttcctgacttcagttttgtctgccatgtttttattcgaaacttccagagcaatgaactgattatctatgtaacatatatatatatatataacttgatgagtcagaataaaattaaaggatatattttctttcgttggtcgagtcatgttcgatgattaaaaaaaaaaaaaaaaaaaagggcggccgc

SEQ ID NO: 1449 - DNA, 1104 bp, Brassica napus
  Clone ID: BRANA-23APR03-CLUSTER3700_1
attcacttcatagattccctccaagaaagacaaacagagagaaggagagagtaagattctaatcggaagaagatatggacggaggcacggagatgtacggtggacttgagacgatgcagtacgtaaggagacatcatcaacatagctgcagagaagaccagtgtacttctgctcttgtcaaacacatcaaagctcctcttcatctcgtacgattttcactaaatagtttctgatttcttgaacttggtctgatatctctctatatagttttttgattagtcagatttttttttttggcctctgcttagtttttcaaaataaaataaaatttattggagtatatgtaggtgtggtcagtggtgaggagatttgatgagccgcagaaatacaaaccatttgtgagcagatgcacagtgatcggcgatcctgaaataggcagcctcagagaagttaatgtcaaatctggcctccctgcaactacaagtaccgagagactggagcttctcgatgaggatgaacacattctcggtatcaaaatcattggtggtgaccatagacttaagaattactcttcgattgtgacagttcatccagagataattgaaggaagaccaggaacaatggtgattgaatcgtttgtagttgatgttcctcaaggaaacacaaaggatgagacctgctactttgtggaagcactcataagatgtaatctgaaatcactggcacatgtttctgaaagattggcttctcaggataatatcactagcttctcaacataatcaatggaggaggaggaggaggccagtgaaagtgaaagtatggattttgtgtgtgatattattattcatcaggaatttatgttttggtttggtcttatgtagagactttccaagatgcgtgtgtttgtgtgtgataatgatccctcagtttcttagaagatatattctccaatggtgaagaagttttgatgtaaaaagttatatgtcttcgggtggtagtttgtgactgttgttttatttgtagatactcttgtaaaaaagaaaataacgtaaatgcaaacctatgtttatatactagtaaaaaaaaaaaaaaaagggcggccgc

SEQ ID NO: 1450 - DNA, 1030 bp, Brassica napus
  unsure (1)..(1030): unsure at all n locations
  Clone ID: BRANA-23APR03-CLUSTER3705_1
attttgaggattgcgacgatcgaatcaaccgaagaagacgatgaagatctcccacgttccctgtctagaagacaactactcctacctgataatcgatgagagcaccggagactcggcggttgtggatcctgttgatcccgagaaagtgattcagtcggctgagcagcacagtgccaatatcaagttcgttctcaccacgcatcatcactgggatcatgctggtggcaacgagaagatgaagcagttggtgcctggaatcaaagtctatggaggctctctggataaggtcaagggatgcactgatgcggttgataatggtgacaccttgtctttgggccatgatgttaacatattagctcttcacaccccttgtcacaccaagggtcacataagttactatgtcacttggcaaagatggagaaaccccagctgtgttcactggagatacacttttcgttgctggctgtgggaagtttttcgaagggacagctgaacagatgcatcagtccttgtgtgtgactctggcttcactacctaaaccgacccaggtttactgcggccacgagtacncagtgaagaacttggagtttgctctaactgtggaaccaaacaacgagaagatacagcagaagctgtcatgggcccgtcaacagcgccaagcaaatcttcccacaatcccttcaacgctagaggaagagctcgaaacaaacccgtttatgcgcgttaataatcctgagatacaggagaaacttggttgcaaatcaccgatcgataccatcagggtaatccgaaacaagaaggatcagtggaagggctaagaatcgtagagcttcttgcataaatgtttttcgtgtgttgtggtgaacctttgaataagtgtttgtaaccgttgacgtttatactatctgtgaaactggtaaccggattggtcaaccaaaaccggaccgacctgtatgccgtgtacccctctcagtttctagtttcttgtggataacaataaatgaatattgccccaaaaaaaaaaaaaaaa

SEQ ID NO: 1451 - DNA, 991 bp, Brassica napus
  unsure (1)..(991): unsure at all n locations
  Clone ID: BRANA-23APR03-CLUSTER3710_1
accgcaatcatgaacgcttactttgtctagttttgttcttgtggccgttatttgcaagaaatggcttcgtgtgccatctcaaacccaattcattctttcaagatcttgaagagaagtccttacaacagtttatttggttggaactctggcgagaaaatagacaatccccggtcggcgcagaaactggtctaccatgacgacgtccaacttcctttctctctttcgttggtaaacaagaccttcctaaagggtaatatatatataatgcattattcattctataagactcgttgaatccgtgtgaagaagcttgtttttatctgaaattctttttaatcgttaggaagagaattaaaatgttgctacaaagcaaccatcgatgggtttagtgctacaaagttccacgaacgttgcgatttccaaggtccatgtgtgatcatagcttacaccaacgacatgtcgttcaagttcggcgggtttagccctgaaggctatcgaagcactgatgattattacgatacattcgatgctttcctcttctattggctcgacgatagcgatgaaccaatcgtacttcctaaggttggaggaagtggagcggctctgtttgattatgcacgcggagggcctcagtttggagctgacggactttttattggccctcctttagctcccgtgatgggcgggtttgcgggtccggatacgaactcagggattggtgatttgaggatggctaaatctagactgggtctgtcatacgctaagaggaaagatgggaaggaatctatctttggagatgaaagtaaggttactcttgacgatgtcttggtcttttgtagcccttatattgcttctttgtattagattacaattacactaataattgagaacaaatttgaagtaaaaaaaaaaaaaaaaaaaaaanaaaaaaaaaaaaaaaaaaaaaaaaaaaaaaaaaaaaaaaaaaaaaaaaaaaaaaaagggcggccgc

SEQ ID NO: 1452 - DNA, 1293 bp, Brassica napus
  Clone ID: BRANA-23APR03-CLUSTER371_1
agagagacaagttactgtgtcagtgtctgaatcgagcaatgggaagcaacgaagaaggaaagaccacacagtctgacaagccagcacaagtacaagctcctcctcctcctcctgagcaaagcaatgttcatgtgtatcatcatgattgggctgctatgcaggcgtactatggaccaagagtagccataactcctcaatattacaactcaaatggtcatgcagctccacctcctccttatatctggggctctccttcgccaatgatggctccttatggaacaccatatccaccgttttgtcctcctggtggagtctatgctcatcctgctcttcaaatgggctcacaaccacaagggcctgcttctcaagcaacacctgttgttgcaactccgttgaacttggaagctcatccagctaactcatctggaaacacggatcaggggttcatgacaaagttgaaagaatttgatggacttgcaatgtctataagcaataacaaatctgggagcggtgaacatagcagtgaacctaagaattctcagagttctgagaatgatgattccagcaatggcagtgatgggaatacaactgggggagaacagtctaggaagaaaagaagccgggaaggatcaccaaacaacgatgggaagccttcatctcaaattgttcctcttctaagagatgaaagtgagaaacatgcagtgactatggggactcctgttatgcccacagctatggacttcccacagccattccctggtgcgcctcatgaagtctggaatgaaaaagaggttaaacgagagaagagaaaacagtcaaacagagaatctgctagaaggtcaagactgaggaagcaggctgaaactgaagaactgtccgtcaaggttgatgcactagttgctgagaacatgactctgaggtcaaaactaggccaactaaacgatgagtctgagaaactacggctggagaaccaagctttattggatcaactgaaagcgcaagcaactgggaaaacagagaacctaatatctggagttgataagaacaactctgtatcaggtacagtagtagtaagaatgcggaacagcaactcttaaacgtaagtctaagaaccgattctgtcgcggctagctgactgtgacgcaaaaggaagaacccacttcatgtcttctaatggattctgattgtaacttcttaaaaagatttttttttccttagatttatagctctctgcatggtgaacagaaactgatgtatatccttaagcagaagagactcagagcgtgatctgac

SEQ ID NO: 1453 - DNA, 1013 bp, Brassica napus
  unsure (1)..(1013): unsure at all n locations
  Clone ID: BRANA-23APR03-CLUSTER37488_1
aagaaaggattagttgtcagtgacagtgtcggctccaagaaagtagaaaccattagatatccaatcggagatccaccggaacagtagtgtcaatgtcgactcccgcaaccgctggaagaggatcgatcactcacgtgatcttcgacatggacggccttcttctcgacacggagaagttttacacggaggtacaggagatcatacttgctagattcaacaaaacttaagattggtctctcaaggctaagatgatgggaagaaaagctattgaagctgccaggatctttgttgacgaaagcggcatcagcgactcgctttcagctgaggactttcttgttgagagagaggccatgctgcaagaactcttccctactagtgagcttatgccaggggctagccggctcatcaagcatctccatgctaagaacattcctatttgtattgctacgggaactcacacacgtcactttgatctaaaaaccaaaagacacaatgagctcttctcactgatgcatcacgtagttcgcggagatgatcctgtcgtggcatntaggagatttaaggatggtcctgttgacccacaaaaggttctggtatttgaagatgctccttccggagttcttgctgctaaaaacgccagaatgaacgtggtgatggcaccggatcctagactagatatatctcaccaagacgttgcagatcaaatcatgacttcgctactcgatttcaaaccagaggaatggggtttgcctccattcgaggattcaaactaaagcttcttcaaggtaatgataataagtcagaatcatgaatgtgtgagagagcgttgattgtttgtcgttttattatatttgttttggcgcctacatgacaagcccatgaggttttatgtcgtcaagggtgtgatttctggctattgaacccaaaatggaaactaagtttgtgacatgacaagagcccaaacaaaaaaaactgccttagcgtttaaaaaaaaaaaaaaaaagggcggccgc

SEQ ID NO: 1454 - DNA, 865 bp, Brassica napus
  unsure (1)..(865): unsure at all n locations
  Clone ID: BRANA-23APR03-CLUSTER3751_1
agattagtcacatagttaaagatgggaaaagatctccttaagaggattcgaaacaatcagaggagaagtagacgaagatgggagctctcgggacgctgatcgacgcgatcttattcgtatgcttcgctctcatggcggttatcggcccgctcatcgacggacaaacggcgcttcccaaatcaatcttcccggcgtttctcaccgatctgaaaatcagttacttcgccgcgttcggagactacttgctcacggagaagccgcatttcctcgtcggactcgtctggcatgagctcgtgttcctgtggccgctctcgatcgctaacctctacgcgatcctcgccggaaactcgtggttcggtaccacctgcttgctttacgtaccttccctcgtcacttccatggctgcaatcctgggagagatgatcggttcagggaaggcatctgagagattgctaatgatgtatgtgcctttcatgggtattgggattctggctgtttttcgtggtttagtctctagttcaactaagagcactggatctgttggaaagaggtatactattatgccaaggagaaagctggcgtagaaaaggtgtgtttcttatttgagatggttttgtccttttttttttctttatgcgtctttggataactttgaatagctgacctaaaaaaggggtctggccaggtgatttcttgtggtctggtttcttattctaccataagatatcctgttctggccaggagaaaccttgcttgagggtgattatttcatttgattagtcttttaactcttttctttatcacattgtgtttgatattttgggattctgctcaagctattgttntcccnaaaaaaaaaaaaaaa

SEQ ID NO: 1455 - DNA, 1119 bp, Brassica napus
  Clone ID: BRANA-23APR03-CLUSTER37569_1
ataacacaaagatgttttgtcattgagatcgctcatcagaattttccttgtgctttttcatcgagttaaagatgcgacacaactgctgccatctctccttcgcttcggtcctcaagatcctcaatttcctccaagccttcatcggcatctccatcatcatctactccatatggatgctcgatcaatacaatcgccacgtccccgtcgaccctcctccttctcagcctcccacggcttcttctcccgactctccttatctcttctctacctcacgaaaccagatcaacagcgtctctgactcgtttcagaaacccatcggtctcgttctcggagattcgggtctcaacctccgctcactagatcttcctgctccatggttcatatactgtttcatggcgattgggatcttggtctgcattgtcacaatcatcggtttcattgcagctgaagctatcaatggctgctgcttgtgtttctattcaatcctcaaaactcttgtcatcatacttgaagcagctctcgttggattcattgccattgatcgtcactgggagaaggatcttccttatgatccaactggagaactcactagccttcgagctttcattgaagcaaacatcgatatttgcaaatgggttggggttggtgttgtagctgtccagttactctcgttgctactggctatggttctgagagctatggtttctcctagacaatcagaccttgacgatgaggatgattacgagaatccgattaatagagcacgtgagaacctccttgctccacaggctaaccagacatcatctggatcaagcaatattgacaattggaggtccagaatcagagagaagtacggtctcaacaacggtcagagccagagtccctcagtttaattcaaaagacttgagttcctgtttcgttttgttcctctcttgctacggttgttactttcgagtgtgcataagtattacacaactgttattgtttgatgtttagattggaacaaacattggtttctctttcgtgtgtttgcacaaaagcgtaacgagatttgtgtttaaaatgggatcaagtgattattagtctgctttaaaaaaaaaaaaaaaaaagggcggccgc

SEQ ID NO: 1456 - DNA, 954 bp, Brassica napus
  unsure (1)..(954): unsure at all n locations
  Clone ID: BRANA-23APR03-CLUSTER3758_1
aaaagaaacatgaacgtttcatcttttttttttgaaaaatgctagaaaaataaagatggctcacttgccacagagtctctactccgccgctaggccagagtttccatatccgggaaagtccgtccagccgaagtggagccgcttcccggtgagtgtacggtgcgcatcgaccgagtcgctaacaagtttgactcagaatgcggtggagacagagttgaagtatatggtgagtcaacacgggtggggcgtgaggaggctgagaagagacgacgaagaagagattaggagagtgtcttcggttcaagccgaagctttccacatccctctcgctcttttcaatgattttttcttcttgtttttccaggcagaagttttgtcagggcttctctacaaactaaaaaactcacctcctgacagatatgcatgtctcgtggcggagcaaacaagcgaaactgacactagttcaagctcaagtgtcgttggagtagttgacatcacagttcagacagaaaactcagtactccgccactttcccggtgaggaagaatatctttacgtctcaggcttagccgtctccaaagctcaaaggaggaagaagatggcaagtacattgttaaaggcatgtgatgttatatgttacttatggggtttcaagcttcttgctctaagagcttatgaagacgacgcagccgctagaaacttatactcaaacgctggttatagcgtggtcgagtctgatccaccttggacctctacttggataggaagaaaacgtcgcgttcttatgaccaaacgcatttcttagccgttttcggtttttctatttcttgatgcatatttgctttagcgttataggggttggtttaaatgacttggaccgatcaatatacagacagtaaatttgcaaaaaaagaaaacacttgatacaaaaaaaaaaaaaaaagggcggccgtn

SEQ ID NO: 1457 - DNA, 868 bp, Brassica napus
  Clone ID: BRANA-23APR03-CLUSTER3766_1
atcggagagaaggggagagagagagaagaggaagcgaaagaatggagcgagagggggaggaggagaagaagaaagagggatcgtaaaggtattgggtgagagaagccacagcagacgcagctcctcctcatactcatcctcagaagctcaccaacaacgacgtcgtcgctcccaatgctcctgctctcggctcgctctggaaccaggcgggcacttgggaggagaaaaatctcactaaatgggccactgatagattaaaggagctgctgcgatcagtgggttctttgcagttttcttctggaaaagctgagattgttgatgttaacagatgtgttggagatgctttcttggtgacagttcggaacaagaaaagagttggctatacttacgagctttccctcaaagtccaaggagagtggtcatttgaagaggaaacgaagaaggtgaaggggagtctcgacgttcctgagttctcatttggcgagcttgatgatcttgaggtggatgtgaaggttagcgatgacaaagagctttcccagcaactgaagcagcggattaggctggatttgaagcagttcctggagcctatacgcctgaaactcggccagttcgagcaggaactcaaagatcgatagtggttggttgttctcattgtcttcttcttctttccatttcataacagccattttcagttagggtcgagaacgtggccagacatatagtattacatcttaccagttcttcttttgtattcatgctacatctgtttaccaacacgtctcctttgattgttagctcaattcatcgatcaacatttagtattttacctaatgggaatggtttctatagtgtaaaaaaaaaaaaaaaa

SEQ ID NO: 1458 - DNA, 651 bp, Brassica napus
  unsure (1)..(651): unsure at all n locations
  Clone ID: BRANA-23APR03-CLUSTER377_7
tcgcaaaaacctaaatctcaattcaattcaattcaatggcaccaaaggcaggaaagaaacccgcagagaagaagcccgccgccgccgccgcggcagagaagccggcggaggaggtagcggagaaggccccgttggagaataaacccaaggcggggaagaagctgccgaaggaagccatcggcgcgacggwcaagaatgcgccggcngttcccacagcgtgctgcagcggcgttactagtctaaacaacatggcccgtacaaccccagaccgtcagcaagcttgccgttgccttgtaggagccgctaacgccttgcctactatcaacgttgcccgtgcagctggacttcctaaggcatgtggagtcaacattccttacaagatcagcaaaaccaccaactgcaacagtgtgaaatgagcggcggtcggatgaagctaatgcagacgttcaagtattatgtaatggatgagcgaatactaaaataagatgctccaatggttgttgtttttagagtttttcaatttcctgtcttttatgttgtgacgttcctattactttggtcgtttgtactatgttcacaatcaacgttatataatttcagatctaagatttacgttttaaaaaaaaaaaaaaaaaaaaaaagggcggccgc

SEQ ID NO: 1459 - DNA, 994 bp, Brassica napus
  unsure (1)..(994): unsure at all n locations
  Clone ID: BRANA-23APR03-CLUSTER3787_1
ttttttttttttttttccctgnaagtcagtctccttaccattgtgacttgtaatgcantgtcctaaagttacaaatattttgnaattatatttgcaattttctaacttgaggattcanaaaagaacccaagctgggtttttactanagttttgcatttgtgttctgtaaanaaacacttgtacagttttgtttaattgctacaaaagtntggtntcaacaacggacggntacgatcgaaccatcaacagtagaaatcgcgatcctgcagttacatttcgccgcgatttgatgcgtgaacagacccagaactctaacccgacccgccatctccagcttcgactctatctccactgttgacccggcccggctctcctcccccaccaccaacccggatccaggcctctgaaaatccgcggcggagattcgagaagcagaggaagacgcgagcggaaacgaatccacggagaaactagcgtccatcctcttcgtctgacccggttcgatctcaccagcgggtatgaaaatgaaaccgatccggttcccgtagtagaagagctcgattctgttgttgtagtgagagaacgccgcgcggtttgggtttctgacggaggagagctgggagtagctgaagctgacggagctgttggcgacggagaacgacgggactttgacgtttgtgacggagatctcgggatctctcggtctgaagacggttaggtaaactgtaaccgcggctatgatagcaaagacgatgaagacggcggcgaccgcgcatgaagcgaggtttgttccaccgccagacgaagaagaagaaggcttcgccatttcagagtagatggttggtagcgatgttttaactgttccccggttagtaggataagagttcgcctttaaaaaaaaagaagaaatgcaaaaggatacttgtttgggcatagggataacgttacattcacgtaaaatttttaatatttaaaaagaaaaaaaaaaaaaaaa

SEQ ID NO: 1460 - DNA, 1169 bp, Brassica napus
  Clone ID: BRANA-23APR03-CLUSTER3806_1
cttactttttgttttgtcttctttttgtattgatcagtggacggagttgagaaacgcagtctgcacttgaaccgacactatacaagcgatcttaatctgaagcctctctaataatggccgaacgcactcagatacttcgagctcaacaccggcgctaagatcccatcggtgggtctcggaacatggcaagcctctccaggacttgtaggtgatgctgtcgccgccgctgttaagatcggatatcgtcatattgattgtgctcagatctacggcaacgagaaagagatagggacagttttgaaaaaattgtttgaagacaatgtagtgaaacgcgaggagttgttcatcacttccaaactatggtgtactgatcatgaccctcaggatgtgccagaggcactaaagagaaccctacaggatctacagcttgactatgtcgatctctatttgatgcactgacctgtaaggatgaagaaaggttctgttggagctaagccagagaaccttttacctgtagatattcctagcacatggaaagcaatggaagcactccatgattcgggcaaggcacgagccataggtgtaagcaatttctcaaccaagaagctagctgatcttatggagttagctcgtgttcctcctgccgttgttcaggtcgaatgtcatccttcttggcgacagactaagctacgagagttctgtaagtccaaaggacttcacctcaccgcatactcgcctttgggttctccaggaacaacgtggctaaagagtgatgttttgaagaaccctatactaaatactgttgctaagaaactcgggaagtctgctgcgcaagttgcgcttcgctggggactccaaatgggtaacagtgtacttcccaagagtactaatgaaggaagaattagagagaactttgaagttttcgactggtcaatacccgatgacttgttttccaagtttcctgagattgaacaggctaggttattgactgctcccttctttgttcatgagacattgagcccttacaagtctctcgaagagttgtgggatggcgaaatatgatatttcaactgatccaattgttttgtcaataataggaggttactctctgcctgttgaacttgacattttatctataaaaatgatgcctctcaaaaaaaaaaaaaaaa

SEQ ID NO: 1461 - DNA, 867 bp, Brassica napus
  Clone ID: BRANA-23APR03-CLUSTER3807_2
aatctcttcgattccgaccccaaattggaagcaagtttaaattcgacaccaatggcagattcagagccaatcagagaagagcaacaagagactctccatcaccaaatgattccttccgagctgactcacgacgagttcgccgagtcgaccgagcgtccgctcaatcaccgagttccacacctaccaactcggtccgggacgctgctcatccctcctcgtccaacgcatcaagtctccgccggaaaccgtctggtccgtcgtgagacgcttcgaccggcctcagacttacaaacacttcatcaaaagctgctccgtcgacgaagggttcgagatgcgagtggggtgcacgcgctacgtggacgtgatcagcgggcttccggcgaacacgtcgagggagaggctcgacctgctcgacgatgatcggagagtgacggggtttagcatcaccggaggcgagcacaggctgaggaactacaagtcggtgacgacggttcatgggttcgagagagaaggacggatctcttccgttgttcttgaatcgtacgtcgttgatgtgccggcagggaacacggaagaggatactcgtttgtttgctgatactgtggttaaactgaatctgcagaaactcgcgtcggttgctgaagggatggatcgtaattccggcgacgggagaaactctccggtgatgtgaaatgttgatggagtgaaataaataaatacgacaaaagtttgggaatattcttcgtttttctctttttaattgtaagggtaatatttcatttgaaagaacattcttactgaattgtaattggctcctttgattattgtcatgttttcattaaaaaaaaaaaaaaaaagggcggccgc

SEQ ID NO: 1462 - DNA, 864 bp, Brassica napus
  unsure (1)..(864): unsure at all n locations
  Clone ID: BRANA-23APR03-CLUSTER3824_1
atcgacgtatcagaacgcgcgattgagaagccggagggaaggcggccgccatggatccagcaggagcatcggtggcaaacgacatcggaggagaaggcgagaagttcgcggtggggaatatttattcggttaaagtgatcaccggagatgagttccgagggatcgtcatggcttacgatccaatccccaacttcgtcgtttttgaagagggttcgaaacctagagctgggcactcgaagaacactcggatggtgaatgcgagtttcataacggggctgtcgtatctgggcaaaaccgaagatccgcttcttacagacaactgttgtgttaatcttgactcgctccgagccaaagaggcacttgctatcaggcaagcggaagcagaagctgagagattgggtgttggtgttaccgcctgaggcgcagagcatcttcgattcgttgtctaagacgcttcctgtgcagtgggaaaactctgacattttggtgatgaaagaagtacgtgttcgtagcccctatctttccgattgtgtctttggaggaactgatgctgccaacaaccgagtcaagaaagtgcttgaactagtgagacgaaggttgcaacttgttggcacataaggccagcgaaaggagacggtcagtgaagtcgccagaaagggtatgttactctgctactaacccgagaaggcgtntagaactgatcggccagggagaagtgggtattgttggcttttctcgcatgttgttgtctttaccagattagaaatttnttgagttccatggatgtgaaactcaggcagactaatttcgccatgttttcaaaattttatcagtattatactattatcaaaaaaaaaaaaaaaa

SEQ ID NO: 1463 - DNA, 719 bp, Brassica napus
  unsure (1)..(719): unsure at all n locations
  Clone ID: BRANA-23APR03-CLUSTER3839_1
agtacgttctcagataatctcactgctcgtctgggaccatgcagagtgacgtgactacgaatccacgagcatcagacgactctagctcctctgacgtcgaagctgagatcagcgacggcgatggctttttgccgatcgatagacctcctacagtctccgaagaagacgaagtttcgctgttgatgagagcagaggcgtatcaaggctacatgaaggagcttcctcttccgacaagccgcggttctttgatcccgttcacgagatgggttgggttaggcatgtcgatcaaggagctttacggtcagcctttgcattacctcacgaacgttctattacagcgttgggatcaagcaagactgggtggtgattctgaagatcagagcttggatttgatcattcatcctttgaaagctgaagctaccatttggcttgttgaagagattcatcggctcacttcttctcatcttcagattgctgagctttggggttctgatcctatgtatcacatgttgattgatccaatcattcccaagttatcncaatnttaaacaccttttttttttgtatctaagtcattctctattttaaattttagacaatgtattgtgaatgctttttctttcatctctgtaatcaccagaagtcattacaagaacacttgccttgacttatgaaatgaaacctgttattgtntcttagaacgaaaaaaaaaaaaaaaa

SEQ ID NO: 1464 - DNA, 1045 bp, Brassica napus
  Clone ID: BRANA-23APR03-CLUSTER3857_1
attttttttctctacttttaatctctccctctgttttactgtctgtgtgatcaagaagaaagaaaatgttggcgattttcgacaagaaagtggcaaaagcccccgaggctctaacgagtcaggaaggtggatctgtttgtgctcttaaagatgggttcttaccaaaccactttgcttccatctaccctggtgctgtcaccaccaatctcggatcttctggtctcatcgcttgctccctccacaagcagaaccctctcctccccagattgtttgctgtgaatgatgatatgttctgcatcttccaaggacacatagagaacattccatttcttaaacagcaatatggactcacaaaaacagcaaccgaggtcactgttgtgatcgaagcctaccgagccctcagagaccgtggtccataccctgcagatcaagtcgtgagagattttcaagggagatttgccttcatgctctttgactgcaccacaaagaatgtcttccttgctgcggacgcagatggtagcgttccactattctggggaactgatggtgaaggccatctcgttctttctgatgagcttgaaaccgtgaagaaagggtgcttctttacctcgtctggagggttgaggagctttgagtttccattgaacgagttaaagcctgtaccaagggtggacagttcgggtcaggtgtgcggtgtgcttttcaaagtggattccgaggccaagaaagaaggtgcaatgcctagagtcggcagtgttcagaattggtctcaacaaatctgaaaggctaaaaagtgattttagctgagttttaatttactttgttgaactctggctgtgttccggagctttgagatctcgtcgtttcaatctttctcttgattttctcacactggccattctaaggtttctctggctctattcaaactacgaataaaagacaaacttctgatccaagtgcatttgcagcttgtatttgataataagaagctaataataagtcatggcaatatcaaaaaaaaaaaaaaaaaaaaaagggcggccgc

SEQ ID NO: 1465 - DNA, 652 bp, Brassica napus
  Clone ID: BRANA-23APR03-CLUSTER3890_1
aaaaccaccaggatcagaagaagaagaagaagattcttaagatggtgaactatgtgctcaaaatcacggctgatctcgagaatctcactaatctccagccctccggtggctgcgacgatcccaacttcccttacctcttcaagttgaaatgtgaacaatgcggagaggtgactcagaaagaaacatgtgtgactttgaatgagacttttactcctccgggtggcaggggtacttgtcatctcgttcagaagtgtaagttctgtggaagggaagggaatgtgacaatgattccaggaaaaggtcgacctttaactcaggaagattctgaggctggagagcatgctcctcttatggtgtttgactgtcgaggctatgaacccatcgatttcggatttggtggatattggaaagctgaagctgaatctggaaccaagtttgatgagattgatttgtcgagcggagaggagttcacagagtatgatgagaagggggagtgccctgttatgatatcaaacttccgtgcaagcttcaccgtcaccaaatgatctgttgttctgtttcctttatctctacacacttggtgtatgtaaaaactcattactcaagttctaataaagctcccgtgttcggaaacccaaaaaaaaaaaaaaaa

SEQ ID NO: 1466 - DNA, 985 bp, Brassica napus
  Clone ID: BRANA-23APR03-CLUSTER3902_1
aatatcaaaatgagaagcgaaggaaaggagacagaacactccaatatatcgattcagcgctgatcatcaacgatggcaatcctttgttcggtgacagcagttatacgtccctcttcttctccgttgctgaaatcctctggatgtgacagcaggtcttcgttctcacgagtcggcatatacgctaacacgaagagggcgttgcgggtcacgagcgaagctgacccggagactggtgcttctctggttcgcgaggcccagcagacgaatgttagacccctaggaagtgaaaggccacgacgtatgtaagacgaagaggaagcaaaaggccctaaaatctgtgacacaacatggtacccaaagacttcataccaggtaaacacggactaccccttggatttggtccatccgtcggaaaagactttccgaaggttagccccagcctctgacaatcacatccttgggaagaacctttccttgttcactcccagtgtcgacatgggagcctttgtcattgtggtgaatgctgagaaagtggctgtgtctggaaagaaaaggaaccaaaagctgtacaggaggcattcaggacgacctggtggtatgacagtggaaacctttgatcagttgcagcagagaatccctgagagaatcattgagcatgctgttcgtggaatgctcccaaagggacggcttgggagagctttgttcaatcacctgaaggtgtacaaagggccagaccatcctcatgaggcacagaagccgcttgatctgcctatcagggacaagagaatacagctgcagaaatagataacaccatggagtatatctactaagctccagttttttactcctcgggtttgtgtagtttcttcatctcaaaaccagaggggagactttgaagattcttgattctgttgcctgcaactatcaactctatgctataaagttttttagtgtgaattttttttttgctgctaagggcggccgc

SEQ ID NO: 1467 - DNA, 838 bp, Brassica napus
  unsure (1)..(838): unsure at all n locations
  Clone ID: BRANA-23APR03-CLUSTER3911_1
attcacttgttctcgccttcgtcccttcgcgatcgcagttctgaagaaacctattcctactgcagaataaccatgtccactcaagcttcctcatttaatggcaacctaaagaaaagctgggccagtaaaaagcgtattaaactcggcggtcttcggtggcgagtttttgaatcccaagggcaggttctgggtagactagcatctcagatatcaactgtgcttcaagccaaagataagcctacttattgtcccaaccgtgatgatggggatatttgcattgttctcaatgctaaggatatcggcatcactggaagaaagctcactgacaagttctaccgctggcatactgggtacgttggacacctgaaagaacgcagtctgaaagatcagatggccaaagaccccaccgaggtcatccgcaaggctgtctggcgcatgcttccaactaacaatttgcgtgatgacagagatcggaagctgaggatatttgaaggcagtgagcatccttttggggacaagccactcgagccattcgtgatgcctcctcgtacagtgagagagatgcgaccgcgcgcaaggcgagcaatgatccgtgcccagaagaaggcagagcaggcagaaaatggtggagcagaggtaaagaaaggcaagaagagggctccttntcaagtgtaactgcctagaagaaaagcttcacacatgtgattcagtcttttatttaagcaacgatcataatgcaggcgtggtggataacgttttttctgtttgttgagtgccagacaatagacacggtcctaccatgaagcaaaacccgttcttcctaaaaaaaaaaaaaaaa

SEQ ID NO: 1468 - DNA, 805 bp, Brassica napus
  unsure (1)..(805): unsure at all n locations
  Clone ID: BRANA-23APR03-CLUSTER3915_1
aaatattctaacaaacatcttagcaaggataagtagctacaaaaaaaaaaaattaaaaaaaaaatgaagaactgatttaagtcttggagttgagggaactctctctcccctccgttctctctctaaaaatctttcacagaggtgttgatgagagaagttcaaggttttgctggtttcttttccggctctgactcccggtgattgggcttcgattctggcaagcgtcggcttcttcagcggcgacttggccggcttttcttccggcaagcgatggcttcttcagtgttgcttggttggatctgtctccgacatgcgatggcttccaaagcaccgttcatggccggcttatcttttaactttcatcgctcatctccgatgtctgttcttgttcagatccggtttttctggtttcattttctcgtttttagtttttctcttgagcattttaaagatctgttgccgttgacgtttattctaatcttgagctttctgttccggtggaatgctcgattagacatccgacggtaatttccgagccggtaaagtcgacggcgtctctgcttctgaatcacctggttctcctttgcttacggcaaggcatgtgactatgtgttgtctttgcggagatgcatttttcnccatttgggctttaatggttgggcttanatgtgtccctcttttatattttcgtatgggtcttgtcgtgttaggcctctttttctttttcttttgtttttgctgaccgtttggtnttattaataaaacgagatggaaaaaaaaagtagctacaaaaaaaaaaaaaaaa

SEQ ID NO: 1469 - DNA, 1084 bp, Brassica napus
  Clone ID: BRANA-23APR03-CLUSTER3940_2
aattacgaaccggaaattcattgcactgggaaaaaacgacttcctttggttattttctccgaagcgttggaatgacgcgcgcccagcgttaaaacaaagctcgcgtcaaagtgaagctgctttcgattgatacaccaaacaacgtgaaacatgtctaatgagttgtgtccggagaggcctttgtttggcggcgcaatctccagtgccttccctcaaagattccaggatgcgagtaatatccgacaagttccagatcatcaggaagtgtttgtggatccttcaagggatgagagtttgatttttgagcttttggatttcaagcctgacgttggggacattggcagtgcttcttggttccttcatgatcttgctcgtgagcaagatgcccaaggtttcaagttgattgagcaatcacatgtcattgatgtgcctggattgtcttatagaaacatccctgccattgccacaactgctattggagagatggctatatccaaaggaagacagggaagagaagcccaaaacctattgaaggtttatgtggcaaatattcgtcttaagggagttgaaacagatgtcttagtcactgcgtatgaacctattctcatcaacccgctgagcgaaagtgcgaacgcagtaggatctggtttagctgtaccagcttcacaatctggaataatgccaatcccttaggctttatcattaggtaaaccacacgaagaatcttgtatcatgtcctatcagagccttcataggttactgctaaaaaaagcgctcgtggcttggtggtaaaggaggtatagttgtattgcccgccacccgggttcgagccttggccacaacggatttaacatcccttccgttggggcgctggacctcctacggggtgatagttgggaatgtggctacccagatactagagtcccaaaaaaaaaaaaaaaaaaaaaaaaaaaaatgttgattttccttatatctattttaggttgaaatgtattcctatcgttgtattggccacgagacaagtaacatcgagccaaaatacaaaccttaaacaggcaaaaaaaaaaaaaaaaagggcggccgc

SEQ ID NO: 1470 - DNA, 871 bp, Brassica napus
  Clone ID: BRANA-23APR03-CLUSTER3997_1
atcgagacatcgatcgttgtctgttttcacaagaaaaaacacagagaaactttgtttggagagaacagaggaagaggttgaaaatggaggagcttgcagggcttctgaggatccgagtgaagaaagggatcaatctcgctagacgtgactctctaagcagcgatccttttgttgtcataaccatgggaacacagaaactgaagggtcgtactgtggaaaacaactgcaaccctgagtggaacgaggagttgacacttgccctcaaacatcccaatgaacctgtgactctgatagtgtatgataaagatacgttcacatctcacgacaagatgggggatgcgaagattgacatcaagccgtttctagaggttcataaattgggtttgcaagaacttccagatggaacagtgatcaagagggttttgcccaccaaagaaaactgcttgtctgaagagagcagaatcgtttaccataatggcaagatcgttcaggacatgattcttgtcttgaggaatgttgaatgcggtgaagtagagattcagctggagtggatagaaattccaggtggtagaggactctaagaaacacatgaaatgttttgatgtttcctactgtatttatctgtgtgtgtgagtgtgtgtgtttgtaataaaagccacaggttctgtaataaaatcacactttgtttaaaaaaaaaaaaaaaaagggcggccccctgaatttcagaaacaactgagcatgtttgaggtcttgttggatggtgtgatagacgccaagaggtatatatacatttctagcatctcccaaaaaaaaaaaaaaaaaaaaaaaaaaaaaaaaaaaaaaaaaaaaaaaaaaaaaaaagggcggccgc

SEQ ID NO: 1471 - DNA, 1561 bp, Brassica napus
  Clone ID: BRANA-23APR03-CLUSTER39_1
aagataataaattaatctgtttttttttgtgctatctgcagtgtttaatttggtcccattttaatttagcaaatggttgactgtggctgatattctgttttggggctttctcagcttcatttgcgatggcatttgcagttgtgattctgccattggggatgttcttacattagctgcgtctgtgtgtttattccatggcgatggcagcagctgtgattgtgcctctgggcattctcttcttcatatctggtctcgttgttaattctccttcaggcgatttgttatgttcttattcgacctctgtctaagaacacgtacagaaaaatcaaccgggtgggttgctgaaaccttgtggcttgagcttgtctggattgttgactggtgggctggtgtaaagatccaagtgtttgctgataatgaaaccttcaatcgaaatgggcaaagaacgatgctcttgtcgtttgtaatcatcggagtgatattgattggcttgtggggtggattctggctcagatatccggctgcctaggaaggtccattgctgtcaaccaagtatgttttccccgtttctactcgacaaacgtctgcacccccaacgatgctaagactattcaaaggacaaccttccgtggtgcatgttcacatcaagtgtcactcgatgaaagacttgcctgaaccagaagacgaaattgcacagtggtgcagagatcagtttgtggctaaggatgcactgttagacaaacacatagctgcagacactttcgccggtcagaaagaacagaacattggccgtcccataaagtctcttgcagtggttctatcatgggcatgcctactaactcttggagcaatgaagttcttacactggtcaaacctcttttcttcgtggaaaggcatcgcattatcagcctttggtctaggcatcatcactctctgtatgcagatcttgatccgctcctctcagtcggagcgttcaacacctgccaaagtcgctccagccaagccaaaggacaatcaccagtcaggaccatcctcccaaacagaagtggaggagaagcagaagtaaaaagaaggatctaacggatcaaacaccacaacaagaagcgtatcagttttgttataagaaacaaaccccaagtgaatccctccttgatatcatcactcccgttttgttcagctacttcaactactactattactcggccaatgtctcttagtcgatttatgtaaagggtcgtgatccctagaccttgtgatttttatttttctcaagtgcataggacttgtataactttctattattagattgtaatttgggatgactttccttttctagaaaaaaaaaaaaaaaaaaaaaaccccaagtgaatccctccttgatatcatcactcccgttttgttcagctacttcaactactactattactcggccaatgtctcttagtcgatttatgtaaagggtcgtgatccctagaccttgtgatttttatttttctcaagtgcataggacttgtataactttctattattagattgtaatttgggatgactttccttttct

SEQ ID NO: 1472 - DNA, 836 bp, Brassica napus
  Clone ID: BRANA-23APR03-CLUSTER4002_1
cattttaacactctctgagaaggaagaaactccgattctcaaaatggggagtcgattgggaagacgagtggttcatttcgcgaatctcccgatcaagcttctgatgcccacgaagctgacgaacatccacgagttcgcgctgagaacgatcccatccgcgaccaagatcgagatcaagcgagtcctcgagtctctatacgggttcgaggtcgagaaggtgaacactttaaacatggacgggaagaagaagaagcgcggcgggttgctgatagcgaaggcggactacaagaaggcttacgtcacgctcaaaaaccctttgtcgatttctagagatctgttcccggtgaagtttattgaggaagataggaagagtaaagtgaaaggatctagctttgtggaggaggaagatgataagaagagtcactggcttgatcagaaggagaggagggaagtcggtggttatggtaatggtaaaggtcgtcgcggcggcggcggtgaaaggtctgcttcgccggcgaaaggtgttgcttctgctgcggcggtggcgaagtttccatggagcagcatgagatttggtggcaagtaagggtttttttcgttagtcctcagttaaggttttattaccttggggtttgtgtttctttttagctgtcggaatatggattttgtttctgtttcttttcgtgaagtttctgtcttaataagagacgagcttgatcgtgaatctgaatcttataagctctcagagtttttgtgacttttggcaaataaattattcaattgcaatcagcaagagaactactaatctttgtgtaaaaaaaaaaaaaagggcggcc

SEQ ID NO: 1473 - DNA, 761 bp, Brassica napus
  Clone ID: BRANA-23APR03-CLUSTER4031_1
agttctcaaagaaaaatattccggagagagagagaagagcggtaccgaatctaagcgatgtcggatccttacgagagggcgaagggtggaaggttagcgtttaaaggaggcgatctagccaccatcaaaaagaagaagccaaagaagaagaagaagaacaaggataagctcgacgacggcgccgcccccaatgttgaaaagatgactcccgacgacggtccggccacttcctccgccgcagcagatggtaaagacaacgatatctattcaatcgacgccgcgaagaagaggaagtacgatgagcttttccccgtggaggcgaagaagttcggttacgttcctaaatcgaacttcgattcggtggcggaggctctcgacgatcgggtcaagaagaaggccgaccgctactgcaaaatagagtcatctctttttgttgaatctactcaacttttatttgggtttcctactctcctataagctagtttttgcagcgatgcgaaatttgcgtattatgtttgttgaattttatattctgattggaacttgttactttggaatccaaagtagtggttgttatttggtattattcctttgaatttgcagataacagatgggacatgccatgtgtgaaatctctagcaagcttctgtgcatttaaaaaccagtcattaatatatgttttagtgctatgttctacatttcctcaattgctcactgcattttctttcctctgggtaatggacgagtccaagaagctatag

SEQ ID NO: 1474 - DNA, 874 bp, Brassica napus
  Clone ID: BRANA-23APR03-CLUSTER4044_1
atttgcagactctgtctctctctctctctctcgttttttcctctctcacctgccttgtctagaagaaaaaaaatggctgcgtttgaggaaagctctgatttggatgctatacaggagcatctcttggaagactttttggttgctgatggtttcatgggagattttgactttaatgcttcttttgtctcatggactctggtgtatagagcctgtgatgaatcaagttcctaaacaagaacctgattcaccagttcttgatccggattcgttcgtcagagagtttttacaagtggaagctgaatcatcttcagagcagaattcatcaccacatgagactgatcagagtgtctcacccaggaaagaagcaaagaggttggaagaagaagaagaaccgaggcattaccgaggagtgagaagaaggccgtggggaaaatttgcagcagagattcgggatcctgcaaagaaaggatctcggatctggctaggaacatttgaaagtaatgttgatgctgcaagagcatatgactgtgcagctttcaagctccggggaagaaaagccgtgctcaactttcctctagacgctggcaagtatgaagctcccgtgaatttaggacggaaaaggaagagaagtgatgtgcaggaggagctccaaagaagtcagagcaattcatcttcatcgtcaagtgatctgtgaatgatgcatttaacattcaaaaagtgtgatcagtttcattgtataagttaattgtacagaggaagtgaagtataggttagtgtgtgctaagaactcttgcaacaaatttgtatgaatgttctgttccttaagttattgtttccaagaaaaaaaaaaaaaaaaaaaaaaaagggcggccgc

SEQ ID NO: 1475 - DNA, 852 bp, Brassica napus
  Clone ID: BRANA-23APR03-CLUSTER4071_1
ataatatcatcatcgctcgaacttgatctttcctcgcatcaatggcgaacgagaaacgccacgaaatgtcgagactatcctcacatcaatggcgaacgagaaactccacgaaatgtcgagactatcctctcaaatctgcaaccagatctcctccgtcttctctaaccccacggatccttacccaccgccgcttgatctcctcgtgacggagctcaccggagtctcccgccgcggcgctcgcgtcttcctccacggcgtcggacgcgaaggcctcatgctcaaagccttcgcgatgcgtctcttccacctcggcctctcctctcacttagtctccgacatgaccacgcctccgatctcgtctcccgatctcctcatcgcatcggcgggtcccggaggattctcaaccgtcgacgcgatttgctcagtcgcgaaatctgccggcgctaaggttgtgctcatcactgcgcagccggagacggggtcttgtgtgaaacatgcgacggatgtttggtatgttccggcgcagaccatggcgagtgacggcggaggtgcgacggagaagggagagaggccgttgttgccgatggggagtgtgtacgaaggagcgttgttcgtgttgttcgagatggttgtttacaaactgggtgaggttttgggtgagtcccctgagtcaatacggtgtcgtcacaccaatttggagtaggaacgttgcgttgttttcgcgtttcagtgtgtaaatgcttgctgttttgtttgtattacatgccacgagtgttgggggtggatttacatcctacctcaaggcccattagacaataaattaagctcattttactaaaaaaaaaaaaaaaa

SEQ ID NO: 1476 - DNA, 1203 bp, Brassica napus
  Clone ID: BRANA-23APR03-CLUSTER4097_1
agttacggagttggagaccccccaaaacgcactctcgccaattcagctttagggtttcggtagaagaaagcaatcgctccataaaaccctaatcgggtcagctcgtctaagtcagaagataaatctggagaaacctatgccgtcgacgtcgctggccaacggaaacgcaggagacagaccaccggatgttgtggccgatgataagccgggagtgtcgatgatggagcagttggttccggagattacaacccacgcgctcagctacttggattatccaagtctttgccgcttgtccatgaccaattccttgatgaggaaggctgctaacgacgacaatgcttggaaggccctctatcacaaggattttactctggaacaagatggaataaccccggtcaacgggtggaaagcttactatgcaacaactagagcaatcattagtgtgaatactggattcttcgacatcatcagagagaggtctcttccagaaatggctcagttgtggctcaactccgactatgtcaagtgcatccatgcctctggcgaacttttctctggctacagtgaagtgatgcaaagctggcaactttgtttcaactgggaacaagggtttgactttcaggtccacaacgttcgcactcggatcctaaccgacatggcttgggtcactatgaaagcatacctgaacgtggacgctggtccgttcctcatcaccaacgtgtttgagcaccacaatgggaggtggcacatggttcatcatcacagctctgtgatgctcatcgatggcgtcaatcaacaggttgttgttcactgatgaattatatctctagttttgttttccccttcttcttttcctttttaaagggacaaaaatgagaagggagaaggaaacctgcgtatttggaaattggcgtattagattaattagtgctattatttaattttaatgacatgtactgaatgtttattttgaatggtttgttctaattgttttcctaatgggtatgttaaaccagttggatcaaaaataccccaaaaaaaaaaaggactttttgtacaggactccatgtacattgatgctattgagtatagtaaatgcttggtttcgcaagcaatttgattagcaataactgggaatagattaacaatgagattaagcagtaacattccattataaaaaaaaaaaaaaaaaaggccggccgc

SEQ ID NO: 1477 - DNA, 935 bp, Brassica napus
  Clone ID: BRANA-23APR03-CLUSTER4146_1
agagcagatgcttcgatggtaacgctgtcgtttccatctccctcgctctctttcgtagagagcgggacatgtagtaaatcgactcacgtttctcgggttctcttctctggtcctcacggagaatcgtctgaaccatccaagatactgagagatgttcatatatcagagaggttgatggaggatttcactgagctagcgagagagaacactgacaaggacctcgagacttgtggaactctcgctgccttcctcgaaagaggagttttttatgtgaccactctgataatacctaagcaagaatcaactgctaactcttgccaagctatgaatgaagtggatgtgttttccatacagaacgaaagagagctttatcccgttggatggattcatactcatccttctcagggctgtttcatgtcatcagtagatttgcatacccattactcgtatcaggtaatggtgccagaggcttttgcaatcgtggtggctccaactgatagctctaggagttatgggatatttaagctaacggaccctggaggaatggaggtactgagaggctgctcagagacaggattccacccgcacaaagaaccggaagatggaaagccggtttatgagcaatgctcaaacgtctacaagaactccaaccttaggttcgagattttcgatctgcgctgaggtaaggtaagcaacccttcagtgggaggcaatatcagtggaaaaaaaggatcaagcttgatccactgtgagctaaaaagatatcaatttaaataaccataaacttaaccggaactgtatatttttttttatctaaaaagtcttgtctttattgaggttatatgaacaccaagtcagtcatcttgtaataagctaagaaaatgttaataaagtgttaattgtataaaaaaaaaaaaaaaaaaaagggcggccgc

SEQ ID NO: 1478 - DNA, 1003 bp, Brassica napus
  Clone ID: BRANA-23APR03-CLUSTER4169_1
gtttaatccgtcaagcctggccatactgtttattcatgcaagcatgtcatagtctgcttatgatcctgcgtatctgagtaccattggcaaaccaggaacgaagcaaattggatgtcatttcaatgtaactggttagaaactattccacgccagcctctgagattatttataaaagattctcactctgtccctctactaatctaagatcttcactttcgatttttcgttttctcacatattgagagaaaggcaagaggtgacctcatggcaactttgatctccggagctgtgcttagtggattgggttcaacgttcttgatcggcaggagaagcggcgctggccgtggagaggtgagatttggctggaagaatgtgatcattgcacctcagcgcaagaagtcatgggtcatggcagccgtgaaaggcgatgatggcaactcaaagctagatccaaaatggctcgatgatgcctcagagaaagcttccgagtacgtgaaggagaaaggaagcgaagttggccacttgactgcacatgaaggacaagagggtttagatcacatacagagagcaaaacactactttatggagaaagctggtgtagccatggacatgctgactgaaaatgctcatatagcttcagattttgtggcggaaaaagccaatgtgatggaggaagaagctgtttcaattacagagaaagccagagatttcgtagtcgaaaaaacaggtgaagctaaagatttcattgtcgaaaaagctggtgacgccaaagagttggcgacggatatgagcaaaagaacggctatatacgttggagagaaagctgctgaggcaaaagaagccatattacctccaaaaactgaagaatagattgtatttgtttggatccctaacgtctaaacaaatacaagatgttgatatacaaaacataatttttatcacgtaagaataaaaaaaccgtttaatcagtggtttatcttttcagtgaaaaaaaaaaaaaaaa

SEQ ID NO: 1479 - DNA, 798 bp, Brassica napus
  Clone ID: BRANA-23APR03-CLUSTER4181_1
accctttatgtcctctcaccctttcaatctcgttacctcattcatctcgctttctatctcgttatggctagcgacatccaacacagacccgtgtacggctcaaccaccgtgcctcgcagcaccaacattaacaatccagtcgcatcctttctccgtcagctacaatcaaaagctcctaatcactctggccagcttttcggccttcttgcattcttcatctccggtggaatactcctcttactcactggaatcaccgtcacagctttcgtccttggattcatcgctttccttccaatcatcatcatctcaagccctatatggatccctttgttcctccttgtaaccggcttcttgtccctcgctggaatggtattcggtacggcggctttgatctcgtggacgtataggtattttaaaggcatgcaccctgtcgggtcggatcaagtggattatgctcggagtcggatatttgacacggctgctcatgtcaaagactatgctggtgtatacttccatggcaagcagaaagatgcagcacctggtgcatgaaaagcttcgcccgtatacggtttggtttcatgtagaaattacttttctgtttttattatttgtgttgttttagttttattctgtctctttttgtatgaacatcaatgatgtatactgagatcaatttgatctttgaaatttagtttgtgtttttgtatgaaatgtcacttaaaaatggtaagattttctttttgccgtatgaaatatactatatgagatctgtcccttccgctaaaaaaaaaaaaaaaa

SEQ ID NO: 1480 - DNA, 961 bp, Brassica napus
  unsure (1)..(961): unsure at all n locations
  Clone ID: BRANA-23APR03-CLUSTER4195_1
aggtcttgaaatctcccaaattttcaataacggcggagggagggttagcgaagaagaatggagatgatgcagcaggaggaggcggcggcggcggcggctaataaagctggatcggaagtaactcaaaaccagacgatttacatcaataatctcaacgaaaaagttaagctcgatgaggtgaagaagtcgctgaaggaagtgttctcagcgtacggaaagatagtggaggtgttggcgtttaagacattgaagcacaaaggacaagcttgggttgtgttcgacaatcccgaatctgcttccaatgctatctccaagatgaatggataccccttctacaacaaacccatgagaatacaatttgcaaaaacaaaatcagatgttatcgccaaggccgatggtacttttgttcctcgcgagaaacgaaagcgacacgaggagaaaggtggtaagaaaaagaaagagcagcaccatgattctacacgtgtggccatgccagcatatcctggtgtctatggatctgcacctcctctttcccaagtaccatactctggtggtggtggtggtgtgaaaagcaatcttccggaggcgccggcacccccaaacaacatcctctttgtccaacaccttcctcacgacaccactcctgagattnttcagaatctcttcgacaagtaccatggcttcaaggaggttaggatggttgcagccaagcctggtattgcctttgttgagtttgctgatgagatgcagtntacggttgccatgcacggactggaaggtttcaccattcagcaaacccctatgcgcatcacctatgctaagaaataaacnccatttggtggttgtagtattgtctttgcatctctgtcttctgttttttgttggagatttttatatattacaattatctaacttataaaactttcatccagttaaaaaaaaaacaaaaaaaaaaaaaaaa

SEQ ID NO: 1481 - DNA, 948 bp, Brassica napus
  unsure (1)..(948): unsure at all n locations
  Clone ID: BRANA-23APR03-CLUSTER4196_1
agaccaaggaagaacggatcccccatagccactaccacatatacaagaaaacaaaacacaagactatcaatcaatctccactctttctccgcaggtcgtcaatggcttctctgaagctttcaccttcttcaccaatctctatccctaagagcagcggaagtgtcggtaggagaggagtttcatttcttgttcgggctgagcaatctccgtcgtccaattctgatcttcaggataaatgtcagaggagacgtgtggtggtaacgttaggtgttgttgctccttggatctcattgcttagtaaagctccatcatcatttgctgcagaaagcaagaaaggattcatgactgtctctgacaataaggatgcatatgcgtttgtatatccctttgggtggcaggaagttgtgatcgaaggtcaagataaggtatacaaagatgtgattgagccgttagaaagcgtcagtgtcaatttgatcccgactagcaaacagaatatcaaagattttggcccaccgaaggagattgctgagacactggtaaagaaagttttggcacctccaaatcagaagactactcttattgatgcatctgagcaagaagtggatgggaagacttattatcagtttgagtttactgctcaggctagaaactacactcgccatgcgttgggtgtaatcacagttttcaatggaaaattctacacattgacgactggggctaatgagaggaggtgggagaagatgaaagataggcttcacactgtggtagattccttcaagatcactgtttgaactgatatcaactttggtttggtcattttatgctttcaaaaagcctgagttcttgtattttttggtcattcttccttttctcactttcccttaacaatattcttctccactaagagagattcaatactctgacttcttcncaaaaaaaaaaaaaaaa

SEQ ID NO: 1482 - DNA, 1269 bp, Brassica napus
  unsure (1)..(1269): unsure at all n locations
  Clone ID: BRANA-23APR03-CLUSTER419_6
aaatcaaaacaaaactcttcaacgtctacacttaccataaaaactcgaaatcgataccaaaaataaacaaacaacgacagcatggataagacaacgacactgcttttgttcttcttcttgttcacattcctcacgacttctttctctaaaaacctatgtaaccaagatgacaaaaccaccctcctcaagatcaagaaagccctaaacaacccttaccacctcgcctcgtgggaccctcaaacagactgttgctcctggtactgcctcgagtgcggcgacgccaccgttaaccaccgcgtcaccgccctaaccatattttccggtcagatctccggtcagatcccgccagaggttggtgacttgtcgtatctacagacccttgtcttccgcaaactcactaacctcaccggtcagatcccacgcaccatcgccaagctcaagtatctccggagcctcaggctcagctggacgaatctgaccggtccagttcctggttttctcagtgagctcaagaatctccagtgggtagacctttccttcaatgatctctctggttcaataccgagttctctgtctttgttacctaatcttgtgtcccttgatctcagcaggaacaagcttacaggttctataccagagtcatttgggtcgtttccagcaaaagtacctgatctttacctatcacacaaccagctctccggttatataccaaaaacactaggcaatcttgattttagcaagatagatttctctcggaacaagctcggaggcgatgcttcgatgttgtttagagccaacaaaacgacgtggtacattgatttatcaagaaacatgttacagttcgatctctctagagttgtgatccctaagacacttggtatcttggacttgaaccacaacggaatcacagggaatatcccggttcagtggaccgaagctcctcttcagttcttcaatgttagctataacagattgtgtggacacatccccacaggagggacacttcaggaattcgatacttattcctattttcacaacaagtgtttgtgtggtgcacctcttgatagttgcaagtaaaagattcaagcagccaagctattattattatacttctacaaataatccaataagtctataaacaactgtatctttatttggattgattaataaaaataatcaaccaaacttgctttgataaatttgttgtataatcttcaaaactttttgttaatcaaccaaacttgtttntaaaaaaaaaaaaaaaaaaaa

SEQ ID NO: 1483 - DNA, 817 bp, Brassica napus
  unsure (1)..(817): unsure at all n locations
  Clone ID: BRANA-23APR03-CLUSTER4206_1
attgaaacaacaatactcgaagaatcttaagctatctttttgtaacgtctttgaatttcactaagagagaaaaaaagttagaagaaaatgcagtcgatgaaggaaacagcttcgaacatcgcagcttctgcgaagtctggcatggacaagaccaaagccaccttggaggaaaaggcggagaagatgacaacacgagaccctcttcagaaagagatggctacacagaagaaagaagggaggatcaatgaggctgagatgcagaagagagaagtgcgcgagcacaacgctgtcatgaaagaagccagtggagctggaactggaaccggtttgggaatgggaaccgctactcactcgaccactggacacgtcggacatggaactgggacccatcagatgtcggctttgcctggtcacggcacggggcaaccagcgggacacgttgtggatggtacagccgtgacagaaccgataggaacgaacactggaactggtaggaccaccgctcataacacccgcgttggtggtggcaccactgggtatggaaccggtggaggatttactggataagacgttttgtcatttgttttatgttcntgtcaacttntgctttgngtgttcatgtttttttttccggtcntacctttgttttcctngtaaccgtangactttgttttcgtgtgngtngnttttggtctgatgacagacttnacagttgtggttttttgaataaaagtgntgtgttnaatcttcatatgtcnaaacttgccaatcattaatnannaagtagatgttttgtcctttaaaaaaaaaaaaaaaa

SEQ ID NO: 1484 - DNA, 862 bp, Brassica napus
  unsure (1)..(862): unsure at all n locations
  Clone ID: BRANA-23APR03-CLUSTER4211_2
ctctctctctctctaaaaatgtcccgattcttgtcgacgcgtccggctgtcgaaaaccctaattccccacgggagattcttcctccgtcgcttcaacgagccggcttcgaagaaaacggcggcgccaagcctcgtctgtttcaaccgccgtccctattcatcgaaacctcatctgatcgagatcgacctggactcttcctcgtcagcgacttccaaggccgaagccgaagccgcggttctcaagaagctgaacgagttcgttcggaggatcgtcgttcagaactcgactcccgattggctccctttctccccaggctcctccttctgggtccctccgcaccagaacaccgccgccaagatcgctaatttggtcgaccaggtgacgcatccgttgacggaggaggaggttctctccctgtcttctccttctggctcgccttgctcctctttcttcactcctcctatgatgattcttcatctaaacaagaggtggaaggtagcacggagttgaacgttccggggaatgagatgctggaagtcaagctagcgcattttcctgatcctttctactcgtttaaacatggaggagacgatgatgagtgattttaacatgttcagctcccgatgaagtctgttcctgatgcattggtcgggcttggaaagggagatgcttcctgaggctgatgagggttgtatgtgtacagttgcaaaccgtacatcggggttatatgatgtttggaaatnttaacgcctttgttgactatattttataagcttggttgggaggttattccnctttttaagccagagtacatcctgatactgtgtaatttntaacnatttaagtaatntttnaaaagtc

SEQ ID NO: 1485 - DNA, 850 bp, Brassica napus
  Clone ID: BRANA-23APR03-CLUSTER4211_3
ctctctctctctctaaaaatgtcccgattcttgtcaaaaaccctaattccctacgggagattcttcctccgtcgcttcaacgagccggcgttaagaacaacgtcgcaaagcctcgtctgtttcagccgccgtccctattcctcaaagccgcacgtcatcgagatcgacctcgattcttcctcgtcagcgacgtccaaagccgaggccgaagccgcggttctgaagaagctgaacgagttcgttcggaggatcgtcgttcagaattcgactcctgattggctccctttcgccccaggctcatccttctgggtcccgcctcatcagagcacggccgcgaagatcgccaatttggtcgacagggtgacgaatccgttgacggaggaggaagctttctccctgttctctctttctggctcgcctcgttcctctttcttcattcctctagcaatgacggttcttcgtctacacaaaaggtagaaggtagcgtggagttgaacattccggggaatgagatgctggaagtcaagctagcgcagtttcccgatccaatctacttgttggaacacggagatgatgatgagtgattttacatttccagctcacgtggaaggccagtcctgatgcatggtttgcgttgcacaggctttggagaaaaaaagacagatgattctcgagactgatgaggttgtgtttgtatatacagttgcaagccgtggaattatatcgatgttttggctgtcttaacgctgtttgtgaactataaattatacagcttgatattaattaattaaacccgtagcagacggtgcaacttcagattaaaaaaaaaaaaaaaaaaaagggcggccgc

SEQ ID NO: 1486 - DNA, 681 bp, Brassica napus
  Clone ID: BRANA-23APR03-CLUSTER4220_1
aatcggtttcagattggtttaattacaatattcatctcgaaaaatttctcacgagattctccttggcggtttctttgtcaacgccggtgaaaatcgaagatctggtctcaaacaagatagctataaatcatggacgaaaatactaaatctgtatcaggaaatggtagaaccgagctggtaaaattcattgctgatagccatgccaagctcatgaaaccagctgctcgttattactatacacttaaagatgctataggttgtgggaaaagaagatatacggcagtaaaagttgcagaagacatggaaacaggagtatatgacaaacctcttccttgctttggttgtggaatcggatggttctcctttctactaggttttgtgttcccacctttgtggtactatgctacctttctttacttcgggaactattaccgtagagatcctagagaaagagctggtcttgctgcttccgcaatcactgcaatgggattctcttttgtgttactcgtggtttttgctttccgttggttttactatctttgagataactatgtaagtgcagatttttataagttccatgctcatcaaaggaatagtggcggaacttgatgtacattcacataaacccatgagtttaccccaatctttgttttctaaaaaaaaaaaaaaaagggcggccgc

SEQ ID NO: 1487 - DNA, 2876 bp, Brassica napus
  unsure (1)..(2876): unsure at all n locations
  Clone ID: BRANA-23APR03-CLUSTER422_1
atgttttgtaaagaggcgtcgtccagtctccagaccttaaacatagcaaagagtctcagctctgagttcactaaaccatcagcactcgtcaaccccctctcggcaggacatcgttacaaactgtttcctcgtccaaatctcagaggacgatgcactgtcacaacctcaaagtctgatattgattggatagcgaaagataatgctaagaaaatcaaagtgaagggaattataacggccaaacaaggcttgttaccttccgttggtgtcaccgatttgctcggagtttcactgctcgtcgagcttattagcgccgagactgacccccggacgcttatggagaaggatccggtgaaggataacgcacgacgtgtattgttggatgcacatggtgaggatcagtacgaatgtgtgttcgacatgcccgaagactttggaccagtgggagccatcagagttttaaaccaggatcttaaagagatattcctcaaggaaatgaagctcgagctacccgacggctccgtcacctttacatttaactcgtgggtggcccctaagtccgaagacccaaccaagcggacgttcttctcaaccaagtcctacttgcctctcaaaactccggagcctcttaaacagctgcgaaaacaggagctggagaccttgcaaggcaagaaccgtgagcgagctggtgaattcgaaaagttcgagcgggtttacgattatgacgtgtacaacgatttgggtagtcctgataaagatccggaacttgcccgtcccattttgggaggtctctctcacccatacccaaggcggtgcaaaactggtcgcaaaccatgcgacaaagacccctccgctgagactcgtaaagcattggaattctatgtccccagagacgaggagttcaccacagtcaagggcgcccaattcacgggcacagcagtcttggcggctcttcctgctgtgttcccacagatcgaggctgctctgctggatcccaacacgcccttcccacacttcaagtctatagaagatctctttgaagttggcatcgatcttcccaaggatgctggcctttttcctgtgatccccaaacttgctaaagctgctgctgaagctgatgatcttctccagtttgatccccctagtctccttgacaaggatagattttcatggatccgagacgacgagtttgttcgccagacacttgctggccttaacccctattgcattcagctagttacggagtggccgttgcaaagcaaactagaccctgcggtttatggtgatcccaactcacttattacttgtgagattgtggaaaaggaaatcagaggagtcatgtcatttgatgaggctctggagaacaagagattgttcatgctggactatcatgatttgcttctaccgtatgtgaacaaagtgagagagttggatgatagcaccttatatgcttctcgagcactattcttcctcagcgatgatagcacattgagacctgttgccattgagttgactcgtccccaagatgtaaacagcccgcagtcgaggcaggttttcacgccaggctatgatgctacctcctgctggctatggaaacttgctaagactcacgttatttctcatgatgccggttatcaccagcttatttcccactggctgaggactcattgctgtatggagccatacataatagcggcaaacagacaactaagtgcgatgcatcctatctttaggcttctgcatccccacttccgctacaccatggagatcaatgctcgtgcacgccaagttctcatcaacgaaggtggaatcattgagtctcgtttctggcccggcaagtattcattagagctaagttcagatgtctatgataaactctggaggttcgacagggaaggcttacctgcagacctcatcggcagggggctggctgtggaagatgagacagcggaacatggggtacgcctcacgataccagatttcccatttgcgaatgacggtctaatgctgtgggatgcacttaaggaatggatcacagactatgtgaatcactattatccagatgcagaacaggtcacgtcggatgaggaactccaagcatggtggagtgaagtgaagaacatagggcatggagacaaaaaagacgaaccatggtggcctgagctcaaaacacaagatgacttgattgaagtggtgactacgattgcgtgggtggcttcaggtcaccatgcagctgtaaactttggacagtacgggtatggtggatacttccccaaccgaccaaccacatcaaggataagaatgccagtggaagagccgacagaggaagagctaaaagagttctatgaggatccagagaagacgatgcttaagacattcccgtcgaagaagcaggcgacgcaagtgatggtgactctggatctactatcgacacattcaccagatgaagagtacttgggagaagagccagaagcatcttgggtcgatgaacctgtcatctttgctgcatatgaacgattcaaaggcaggctccaatatctagaaggagtgatagatgagaggaacgtgaatgtttctctaaagaatcgaactggagcaggtgttgttaagtacgagcttttaaagcccatctctgaaccaggcgttactgggatgggtgttccctacagtgtgtctatttgatctaacgcattttgatcaaatgcattggaagttatcatctatgtttcttccaaattatcatctatgtttcttgctttcttaataaataatgaatctcaacctgctcaagggtaccttgttttatgttttanggatnnnnnnnnnnnnnnnnnnnnnnnnnnnnnnnnnnnnnnnnnnnnnnnnnnnnnnnnnnnnnn

SEQ ID NO: 1488 - DNA, 876 bp, Brassica napus
  Clone ID: BRANA-23APR03-CLUSTER4238_2
aaaacactcccctcaagcattttccttctcacaccaaaacaaaaacttaacaaaaatattaaaatcacaaaattcttaaaaatctcttcttcaatggcgacggggaaaagctacaacgcacggccaagccaccgtttcctcggcaccgatcagccgtactacgccgccaacgattcgggattcgagttcgacgaatccgatctctactccgcttccgattcccccgatttccgccggaaaatctctaaaccggtcagatcggtgaagaaagcgtctaaccgtccgtccacgtgcggcgcttcctccgccgcagcggcgtcgtctctcccggtgaacgtgccggactggtccaagattctccgggaggagcatcgcgataaccgacggagaagcatcgtggatgacgacggagattggttggacgctagcggcgggaggttgccgccgcatgagtttctggcgaagacgaggatggcgtcgttctcggtccacgaaggagttgggaggacattgaaaggaagggatctgagtagggttagaaatgctatttttgagaaaattgggttccaggattaatatttttaaaaataattatattcgaggtccttttataagtaactgtcagagagagagagagagagcatttgatatttcttgaaatgccctcgacttatcgtatattccgaaaaattttacccatgtaattttgttaactttgagatattattaaattttgcgtattgagatgagtactgtaatgtataatttttccggaagaaagaaaaatggcttcttattttataaacaaaaaaaaaaaaaaaaaaaaaaaaaaaaaaaaaaaaaaaaaaaaaaaaaaaaaaaaaaaggggcggccgc

SEQ ID NO: 1489 - DNA, 812 bp, Brassica napus
  Clone ID: BRANA-23APR03-CLUSTER4266_1
aattgattccttcgtcaagcctcaatcactttcctcactcctctctctctcaaatcaacagcacgaagagatgaagcacctgatccgccgcctctcccgcgtcgccgactccgcgaactacagcctcctccgctccgattcgcagcgacctagccgccgtccaccgccgcctcgtcgctcgaagaagcacacatcctccgttcccgagggacacgtgcctgtctacgtgggagacgagatggagcggttcgtcgtgagcgcggagctgcttaaccacccggttttcatcggtttgttgaaccgatcggctcaagagtacggttacgaacagaaaggagttctgcagatcccctgccacgtgttggtattcgagcgaatcatggagtcgctccggctcggattagcggtgccgagcgacctacaagatctgatcggcgacgagacgatttgacacgcgagggaatctttggtagttagagagagatattgatctggttcttcttttttttggctcagatgcagtacgacgtcgtgttgatggtgtacatagctatatgtatatttttttttttcgggatgatgatgatgaaaagttcaaatgggaaggggaaagattagcgatatttttagggcttttctttttgaatttttttttctttttataaaatttgtttgttgcaaatttcctgtttttcgccggtttaagaaccggtttgagactcttgtgaaggtttatatggaaattgcttcggtttggttatgcataaaaaaaaagcgtgattttctgggtttatttgaagaagatccttttc

SEQ ID NO: 1490 - DNA, 994 bp, Brassica napus
  Clone ID: BRANA-23APR03-CLUSTER4276_1
ggatgtatatgatcagattctttcaagttgttgtagaatcagatagctcctccgtaatacatttcatccatggcatctccttctgttctagagcatcgtccagcttcactagatgcttcagcagatccacccgctctgttcgacggaaccacaagattgtacacaagctatggttgcccatatgctcaacgtgtttggatcaccagaaacttcaagggtctgcaagaaaagattaagcttgttcctttggatcttgggaataggcctgcttggtacaaggagaaagtctatcctgaaaacaaggtgcctgcacttgagcacaatggaaaaatcataggggagagtcttgatttgatcaagtatcttgacaacacttttgaagggccttcgcttttccctgaggataatgcaaaaagagagtttggagaagagttgttgaagtacactgatacattcactaagactatgtgggcgtccctcaaaggagatccttttacagaaaccgcacctgtgttagactatctggaaaactctctgtataaatttgatgatgggccattcttcctcggccagtttagcttggttgatatagcctatataccgttcatcgaaaggtttcaaatcgcactcaatgaactattcaagtgtgacattactgtagaacgtcccaaactatcagcttggatcgaggaaatgaacaagattgatgcctatgtacaaacgaagaccgactcaaaggagattgtggagattttcaagagaaaactcatgtaaggaagcaagcactcagcagtaaagtttattaccggtgatatggtctttggatataaagcaagaaccatttgatgcaataagatttgtataatttaagtcatatgcagtaacataatctgtattttactgttaatcaaagacccaagcgatgtttagtacaataatttgagaataaaaacctctgattctgccctaaaaaaaaaaaaaaaagggcggccgc

SEQ ID NO: 1491 - DNA, 965 bp, Brassica napus
  unsure (1)..(965): unsure at all n locations
  Clone ID: BRANA-23APR03-CLUSTER4278_1
aaccggttgtgtaagaaagtggaagagaatggttcagacgaagaagaataagaagaagaaggtccaccacagcgacgatgaagaagaagacgacactttctactaccgctactcctccgtcgcagcacccccttctcaccccacaaaaccttcctcctcctcctccaaatcatcagctcctccgagcggatcaggcggcttagccccttccaaatcaactctctacgtctcgaatctcgacttctccctcacaaactccgacatccacacgctcttctccaccttcggaaaggtcgcgcgagtcaccgtcctcaaggatcgccagacccgccgatcacgcggcgtcgccttcgtgctctacgtctcgcgcgacgacgcgggtaaagcggcgaaatccatggaagggaagatcctcaacggaaggaagctgacggtttcgatcgcggcggataacgggagggcgtcggagtttataaagaagagagtgtacaaggataagtcgaggtgttacgagtgtggagacgaagggcatctttcgtacgagtgtccgaggaatcagttgggtccgagggagagaccgccnccgccgaagaaaaggggacggaggagggaggaggaaggagagggtgaggagtcgagggattggtcggggacggatgtgacggaggagggggttggtgaggataattgggcttctgtggtggataatgaagctggggagaggctgagaatgagggaagcggaggaagaggaagagaggaggaggaagaggaaggaagctgcagggaagaaagttagttactttagtgatgagagtgatgatgaagattgatgaatactcaggaacaaggttatacatgtttgatgagtttgtatcattcaactccttttcagttgttgatttgaagattacatctttgttcatcaatgcatatcagctatttgttgtaaaaaaaaaaaaaaaa

SEQ ID NO: 1492 - DNA, 1674 bp, Brassica napus
  unsure (1)..(1674): unsure at all n locations
  Clone ID: BRANA-23APR03-CLUSTER42_1
ataagaaaatatgaaggaagaaattcaaaacgaaacagctcagactctgtcacagagagaaggaagaatgttttcttttctcttcccagtgttagaggttatcaaggtggttatggcttccgttgcctccgtggtctttttaggcttcggcggtgtaacactcgcttgttcagccgtggcattagccgtatccacgccgcttttcatcatattcagtccgattctcgtaccggccactatagccacgaccctcctagcaactgggctcggcgctggtaccaccctcggagtgacgggcatgggtctcctcatgcggctcattaagcatcctggcaaggaaggagctgcctcggctccggcagctcagccatctttcttatctctgttggaaatgccaaactttattaagagcaagatgctagaaaggttaattcatataccaggagttggaaagaaatccgaaggccgaggcgaatctaaaggtaaaaaaggtaaatctgaacatggaagaggtaaacatgaaggtgatggtaaatccaagggtagaaaaggtaaatcaagaggtaaagataaagataagaaaaagggtaaaggttcacgtaagggttcatctgatgatgatgaaagttcataaatggaagttcatataataattgtggtaaatgcatgggtaaagataaattcatgcaaagataaacacatgtaaagataacacactattggtccatctataaaaatcgcttccaccagttcctttatagtcctaatgtcctgtccagataagtcgtgagcagccacgactgtgcactgtccccaggcaaagagaatttcaacgggggctggctcgatatggttctagccacagacgtagccgtgtcttgtaccgatgtaagcaaccctctgatcggagtaagatcaatcttatgaccaagaaactcaacatactccgggatctcaatcgaatccgttagcagcaacgggaacaacccaacgaacgatgtgtacgcgaggatccatttgccgttgagaaggaagagagcatcggtgggagctggtgtagggttcttggactcgagctgtgtgattagatctccgatctcggctctcgtctcgctcgatgcgctcaaccctcggtctgtgccgtacaacgaatccaccagcgatctcttgagaacctccgtctcttccacggattcgattgcttcctccgccatcaatagagcagatcctccctcactcgtctccggatccaactcgtcttctgcatcgatgactctgactctgaaatccgcacgagaaacggcgaattcgccgggggagaacaacggacggcgagtgagcgcgctcattggcaccagcgaagacggtggcttggagaggggttttgagtttgatgggctttggactcgggttttgcaggggaattggttgaagaactgaaccgtcgccattgtttgttttttttaactattcgaaagaaactccgaagctagtgaacaagaaaaatggatatttgttggtagggttgggggtgtagaattagtcgcggccaagcgggagcgattgggtggggacgcgcccccnccccgagggggaggnnggaggaggaaagggnggnaangnggnnnnanngngnnnnnnnnnnnnnnnnnnnaaanaannaannnnnnnnna

SEQ ID NO: 1493 - DNA, 977 bp, Brassica napus
  Clone ID: BRANA-23APR03-CLUSTER4301_1
gtcgttacagctttcttatattagtcatatccaacaatcgcacgtgactcacagttcagaaatatcttctcaaaatctcaggctctgataatttgtgctcgagagaagaaggagagagagaagcagatcttttcatctcgatcccttgcaatatgggagagagagtgggagaatgtctcgacgggttgatgcgagctcgtggggcgcggcgttggtaatggtctctccgtacactttgtccgcaatcggaatcgccatctcgatcggtgtctccgtcctcggtgccgcctgggggatttacataacgggaagtagtttgatcggtgcggccattgaagcgcctcgtatcacttccaagaatctcatcagtgttatcttttgcgaagctgttgctatatatggcgttattgttgctatcatcctgcaaacgaagttggagagtgtaccgacttcaaagatgtatgacgcggagtctctcagagctggatatgcaatcttcgcatctggaatcatagttggattcgccaaccttgtatgtgggttatgtgtagggatcattggaagcagttgcgcattatctgatgctcaaaactcaacactctttgtgaagattcttgtgattgagatcttcggaagcgctctggggttgtttggagttatcgtggggatcattatgtccgcacaagcaacatggccgaccaaatagatattaccggtctgaaactgttgtgatatctggaaagaacatggcttcttgattatctttgttgttatatggatactctcatgtctagaagtaaaacctgtgggagaacccgagaaccacttttggatccctgatttttttttgtatttatttaaaaatttggaataagtcacacgttgaagaacgtcttcttcatgtttgtattcacgttggtcgttctctatttatcaaaaacagagtttgtaaaaaaaaaaaaaaaaagggcggccgc

SEQ ID NO: 1494 - DNA, 668 bp, Brassica napus
  Clone ID: BRANA-23APR03-CLUSTER4309_1
agtaggaaacagagaacatttttcaaaaaagaaaagaaaagttaaaagttagagaggtattaccagagaagcaaaagatgggctgcgttgatcttatcaatttaacaagtaccaatatttatcggccggtgcttacaagaacatcaaacaaaccctacatcacaagaggaccatcgatggctgctattcgagctgagtcagtggctactgagaaattaggaatctttatcgagaagaatcctcccgagtccaaactcacccaactcggtgttcgtagttggcccaagtggggttgtcctccaagcaagtttccgtggacttatgatgcaaaggagacttgttttctgctagaggggaaagtgaaagtgtaccctgatgggtccgatgaaggcgtggagattgaagcaggcgactttgttattttccctaaagggatgagttgcacttgggatgtatccgttgctgttgataaacactaccaattcgagtgaatggttatcagtttctgctccgcatatttggtgatatgttcgatataacttcactgtctttgtatgttgacttaattttgtgtgtcatgtatcagtctatgcattgctgggatttatttgcttcgatatctaagtgatttctcgccatgtaaaaaaaaaaaaaaaaagggcggccgc

SEQ ID NO: 1495 - DNA, 875 bp, Brassica napus
  unsure (1)..(875): unsure at all n locations
  Clone ID: BRANA-23APR03-CLUSTER4342_1
attatacgaaccgcaagttttgtttctccgagcatcaaacaaaaatggcggcgtcttcgaccaccaccaacatcctttcccttggctcttcttcagttcataggttccctccaatccaccaccaccctcgcaatcatcctcctctccgtccctcctttccctataaaccctccttcaacctctccctcaaaaaccctaaaaccatcgccgccgccgcctccgcctccgcctctgcatctccaacgctctcctccgctaagccctctcctccgtttcccttctccgagtcaaccaaatcaatcacgaccctcgcggttctcgccggaatcgtaaccaaatcccttatccagaaattctccgccgccgtcgtaaccctatcccctcatattcaagcttctatccgagtctccggtccgctcttcttcgcggcggcccgcgaccgccctgcgggttatctcaacactcccctgacggttgtggcggctggtttgtccaagtggctggatatctacagtggtgtgctgatggttagagttttgctgagttggttccccaacatcccttgggatcgtcagcctctttgtgccatcagggatntttgtgatccttatntcaatctattcaggaacatcatccctcccgtatttgatacccttgacgtcagccctctgcttgcttttgctgttttgggtactttgggttccattgtcaacaatagcagatgattgttattactactcgggaggatcttttgtgttttatttattgtctctacttataagaagctaatgattatgtattggatcttatggtctctgtttctgtggcaatgaatgagtttggtttcaatacaagttgtaaaaaaaaaaaaaaaa

SEQ ID NO: 1496 - DNA, 949 bp, Brassica napus
  unsure (1)..(949): unsure at all n locations
  Clone ID: BRANA-23APR03-CLUSTER4344_1
aggagacagtttcttacggcgaggaagggaaaatcggaatagaggcatgggggaggcttcagcggcggcggagctcgagagactccaaatcgatatcctccgtagaatctcggtcctcgaaagctctattctcccggagagttcgtcgccttctctaccggatgatgaaagccaaacagtgtctcgcctctccgccattctccgctccggcggcgttaaagacatctccttcaagagggtcgctccagattactacgactggcctcttgaatcccgccgcgacgtcctcggagcttcctccgtcgaccatctctgcaagagcattgtcctggttaatactcaagcctcatctgatattgtggattgcagtgatcgcaacaactccaaatactatgtggttgttgttcagtatactgccagattcaatgcggaagcagtgaagaactttctttactcactaaacgagggcaagatcccgaagaaaagatttaatctgagacttgctcccgaggagacgtcgattgaactgactgggtttgagcacaatgcggtaacctgtgtagggatgaagacaagcataccggtgatattggatgaggccanagccaaacttagaccggactttttntggctgggcggggganagattgatttnaagcttggcntcagaacatttgagttccttgattttgtgaaaccatttgtcgttccttgtagctgaaagctagaatctacttaacaatattnttcttcatgtcattcatcctaaagtgtatggtcgctactttgtgaaatgttaccgttagctaagatttgagctggcagtgagggttttgtacctctcacagacattggtattnttggtaatgaatgaccatgttggttacgttntactattcttgcctagagctaaaaaggcggtgaagagttntcaaaaaaaaaaaaaaaa

SEQ ID NO: 1497 - DNA, 869 bp, Brassica napus
  Clone ID: BRANA-23APR03-CLUSTER4361_1
aaaatcgagccgacactgtatgtaccgaaactgagctaaggttctgttgtaatcctcaccaccacgcaaagtcattgagatcgagatgaaggaggacgatgtctttccgacgaatcagaagaaggatagctccgattcggtcttgttcggaagaggacgttacaagttctttgccttcgctgctcttatgcttcttgcgttttggtcgatgttcaccggtacagtcactctccggttatccacggaagatctaaaccggttatcggaagatatcgggatcccaacgaaccacgagagcctagacgttttggaaatggaggagagggagagagtggtgaagcatatgtgggatgtgtatactaacagtcgtcggatcaagttgcctcagttttggcaacaggcgtttgttgctgcttatgaggagcttaccagcgatgttcctggggttagagacgctgctattggtgaaatcgccaagatgtcggtggctcggtctatctctcttgatccaactactccttcccgatcaatgagcgcaagggtattgggaagaagcttcaacaagattctacacaagccagcagcaagtagctgagtgctgatgtattggtaacacatataaacctaagctcattcctactcgctgaagccaaaagatgaacactatcaaatgaatagttcagttttgggagattaaaaattattgtctcgaaatcaattgctccttttggattctaccaattggtagctagtactttcatatatatacatgtataaacatgagtctttatggtttttttatacttcttctgagatgttcaataaatcctgaataagtgccaaaaaaaaaaaaaaaaaagggcggccgc

SEQ ID NO: 1498 - DNA, 805 bp, Brassica napus
  Clone ID: BRANA-23APR03-CLUSTER4362_1
gaacaagaaaactcgtatcttataataatcccccttctctgttgtcttcttgtggtgagaggactaggaggcaacaatggcggaatctcctgtgcaggtgaacctggtcccgatcgaagctacatccgaaagcttcgcagattatggtcaagtcatcgaagcctcctcagatggtgatctcttcgatcataacgatgctcagttagatctctccagaggaaccccacgtttttatatcatgcggctcgaaggtcgatcctttggcttctcaacgatcacgcaccacgcgaacgtgacgcagtgtttgggatctgtaggaggtcacgtttggtaccttggcgtagcgaagccatctcttattgaagatgctgatggagaaagaggaacaagagttgtagagtcagggtccgatggtcacttgtacgcgcctcctacggttgaagaagtgcgagtcttcaggttttcaggaccgaagtttgttaaactgaaccgtggtacgtggcatgctgggccgttgttcagtgacagctccatggacttctacaaccttgagctcagcaacacaaatgaggtggatcacacgacacatagtttcaagaagaagaatggggtcatcttccggtttgaggataacacaacgtcctaaagtcaaaaaatcctatatgatgatcagtgtggttctgttttcatgtctttataagcaaataaaatgagaaacgtttttcttgttgtattcaatgtgccaacactgtctgtgtacaaattggttcatctattgactcactatccaaaaaaaaaaaaaaaa

SEQ ID NO: 1499 - DNA, 684 bp, Brassica napus
  Clone ID: BRANA-23APR03-CLUSTER4381_1
aagaccgtccattgtgagtcggaacaccatctgttcctggaagaagtctctacctcaacctcatcatcgtcttatcgctctttgcatcaaattcgatgaaagaaatgcaaacatcatctgttcctcctggaagaagtctctacctcaacctcatcgtcgtcgtcttagcgctctttgcatcgatcaccatggcagaatccaccggagaagcatcgtccgaagcgaaggtccacatcatctacaccgagaaacccaccgatgaggaacctaaagactatcatctccgtactctctcctccgctctcggcagtgaggaagcagcaaaggacgctctgatctacagttacaaggaagctgcttctggtttctcagctaagctcacacctgagcaagtcaccgagatctccaaacaaccaggtgtgattcaagttgtgccgagccagacctaccagttgcacaaacctgttggtgctggtttcaagctgacttaactaaaatgtagcttgttgttgtaaatgtcgtggctttgagaactggtatctaactataataatgccatgaatttgctagagttctgtgttgttgagaaattgggttttataattatattattttaagacataattgttattctatagttcctaaaaaaaaaaaaaaaaaaaaaaaaaaaaaaagggcggccgc

SEQ ID NO: 1500 - DNA, 470 bp, Brassica napus
  Clone ID: BRANA-23APR03-CLUSTER43976_2
atccgcttttagggttttgaagcaaagtttcgtcgtcttcgcgattctgctcgattgtcgccccatggcgagaccaagtcgtggacgtcgttcaccttccgtctctgggtcttcctctcgttccacctccagatctcgttcgagtctgtccaggtctgtttcgcgctcccgttcccgttccagatcgctctcgtcttcttcttcttcttctccttccaggagcgttagctctgggagtcgcagtcctcctccacctcgtggtaaaagttctgctgggcctgctagtaggcgaggtcgctctcctcctccttcaccctctaggaaagctgctgcacctgttcaagaatcacttgttctccatgttgattctctcagcaggaatgtgaatgaaggccatctcaaagaaatatttggcaactttggtgaagttgtacatgtggagcttgccatggatcgggctgttaatcttc

SEQ ID NO: 1501 - DNA, 1042 bp, Brassica napus
  unsure (1)..(1042): unsure at all n locations
  Clone ID: BRANA-23APR03-CLUSTER4405_1
attgaccattttgactcgtcttctgttttctcattattgaacattttgagctctcgtctcgtctcgtctttcctccacaccaaaccatggcggcttcttctctgcaatccctaaaccctacattctcccaaaccctagcttctcccaacacctctcctcccttccgatccccctttctcagattcaattcctccttcaatctcaaacccctctcgactcgctcctcctccttcatcgcacgctccgccgccgagccgcaggagagaaagaccttccacggcctctgctacgtcgtcggcgacaacatcgacacggaccagatcatcccggcggagttcctcaccctcgtcccgtcgaaccccgacgagtacgagaagctcggctcctacgcgctgatcgggctcccggcctcgtacaaggaccgattcgtgcagccaggggagatgaagacgaagtactcgatcatcatcggcggggagaatttcgggtgcgggtcgtctcgggagcacgcgccggtgtgtctgggagcggcgggggcgaaggcggtggtggcgcagtcgtacgcgaggatatttttcaggaactcggtggcgacgggggaggtttatccgctggattcggaggttagggtttgcgatgagtgtaagacgggggatgtggcgacggtggagctgagggaaggggatagtgttttgattaatcatacgaccgggaaagagtataagctgaagcccattggtgacgctgggcccgtgattgacgctggtgggatctttgcttatgctaggaaagctgggatgattccttctgctgctgctgcttgatttgatttctccaactcaggggtaaatgcatatgtcgatgagagttgatcttcaagggtaagtaattttctgcttttgtttccaataaaaaaagaacaataagaacatgtatgtttcaagaatttgtgaacctagtctatgcttttatggatatatgttatgcttttcggtttagtcttctatttcnctttatatgttctctaaaaaaaaaaaaaaaa

SEQ ID NO: 1502 - DNA, 743 bp, Brassica napus
  Clone ID: BRANA-23APR03-CLUSTER4415_3
gtttaattaacacatacagagagaaaagtcacaacacaaatccgaagaagcctaaagagtgaggaaaaatggcagcgacgactctttccatcgcaaccacaatccgctcctcctctcacctcactcccgcttctccccatgtcttcccttcccgaccaaacacaaccgcatttccctttcgcctcggttcatcttctccgacactaacccaccgtgcaacccacctccgtcccatatccgccgtcgaggccccggagaaaatcgagaagatcggatccgaaatctcgtccctcactctcgaagaagcatgcatcctcgtcgactacctccaggacaagttcggcgtctcgccgctctccttagctcccgctgcagcggctgtggctgctccgggagacggtggcggtgcggcggctgcggtggaggagcagacggagttcgatgtggttatcaacgaagtcccgagcaacgcgcgtatcgcggtgatcaaagcggtgagggcgttgactagcttggcgttgaaggaagccaaggagctcatcgaagggttgccgaagaagttcaaggaaggtgtgaccaaggatgaagctgaagaagctaagaaacagcttgaagaagctggcgctaaggtttccattgcttaaagtgtttttagcaagtttataaaaaaatgtgttctttttcggaatttcatggatcttttttcgcgtgttgtcagtaaaaaaaaaaaaaaaagggcggcc

SEQ ID NO: 1503 - DNA, 1217 bp, Brassica napus
  Clone ID: BRANA-23APR03-CLUSTER4418_1
tttctttttgtacaaatttgtttcctcatcttcgaaaccgacactccaacaaaaaaaaaagctacaaacgaaaatacccaaaataccctcctcttctatctccttctcttttcttaaccatagaagagaacttgaccttccagatattaatactttacaaaatgaccacaaatactacatacttaacccaagaaaactgcttactccgttacctatttacactcttagaaaattaaaaaaaaaactccaaatggtcgatctttcgtactctctctctctctcaacttccctcaaagattaattccacacatctccatatcatttaacaacattatgtacgactcactaactggtttttgtgaagttaaattcaacagagtgtgtgtagttctctgagggtggttctaagccaaggcagggatgctgcagtttctactgtccctatcgaggcaatcaaacccttcgatcctgaccgctgggctgttaccaaaattgcctctaacacatcctccttttctcccagaggaagaagaagaaggagacgagggaggttggcccagcagagtcgagatcggcgaagaagagatttcatctctgaatcgagcatcctgtgttaatgggttagcgactctgctcggcggcgacccacataaaaacggggacggcgagtctaatacctgcgtttgatgaacttgttccgtaccataaccatcctttgtgagaatgatatctaagatatcagtctctgccttggattcacacacctccacttgttgatggctgatgtaacaacgcagagagagcgggatggtggtggagggaagggttacggagaccaatacgacgtggttttggacaaacgacaacagtttggtctctttccaccactgacacggagttcctcagatctccaccggcagcgaaagcgtttggttgaaccgcccagtgattcatcgttttctttccttttttttatcgatccaaaaaattaaacgaaaatttgtttttaccttaagcttaactgtacaacttctattgccagagagctatggtgatacgagctagaatatagatttaatttgaaaagagaacagaaaaaaaaatttaactgagaagaaaaaagaagtttgggaagagaacggaggatgatgaaaggcgtgaaagtgtgtggtaagtgttaggcgagagaagagagacgagccatgaagcagtgcctt

SEQ ID NO: 1504 - DNA, 695 bp, Brassica napus
  unsure (1)..(695): unsure at all n locations
  Clone ID: BRANA-23APR03-CLUSTER4450_2
agtacgganaagtgctttcgccgcagctgagagagagagaatggcgtcatcatcggcgagaggagagctggagaagatggggatcgatcagctgaaagcgttgaaggagcaagcggatctggaagtgaatctcctccaggacagtctcaacaacatccgcacagccaacgctcgcctcgaatccgccgcgggagctctaaacgatctctctcttagacctcaaggtaagaagatgcttgtgccactcactgcgtctctctacgtgcctgggacacttgatgaggctgataaggttctagttgatatcggcactggttacttcatagagaaaacaatggaggatggaaaagactattgtcaaaggaagatcaacttgttgaaatccaactatgaacaactctttgaggtgttggccaagaagaaaagcgtggcagatatatccgggatgatcttgcagggtaaagttagacagttacaagcagcaaccacgtcctgaaaattcttcattctcttgtggcttttactattttgatgttttgagactgcacatttgttttgtctgatcagttttgtaacgaatcttatgatctcaaaatcgggaatatgtttatgtgttactataagaaactttgtgcatgtaatatcaaagagaaacaattgttgcttaaaaaaaaaaaaaaaagggcggccgcttc

SEQ ID NO: 1505 - DNA, 876 bp, Brassica napus
  unsure (1)..(876): unsure at all n locations
  Clone ID: BRANA-23APR03-CLUSTER4506_1
acctgttcacctaaccttctctataccaacggtttcatatctgactcagtgtttgtttctggttcgcccgcgacccagtttatagtttcttcgcagtccaggagatgttaggaagctccttagcttcccctttggctacattgggtcctgccaaatgctttcgacactctgcaggtgattctgtaacatgcactagtagtgttctaccattgagactgaacttgtcatatcatggtgtggctggaggagtaaggacatctcgtggcccacgaaacaagtggatagtggtctgttcaccaacgcaagtggaaacctctggtgatgagccgaagacatgggaagaatgcaaagaagctctgtctcgttttgatttcagcgtagaggagcaagacaagatactaggaaaagcgtttggtcatatccactcgccctactggacagaagagcgagtgaaggagaatccaaaggtggaagccttgaatcatgtgcttgagttccttagaggtctcggtttgtcagacgaagatgtacacaaagtgctgaagaagttcccggaagtacttggttgcagcttagaagaagagatgaaacccaacattgggatcttggaaaatcaatgggggattacgggtaagtcgctgcgaagtctgttgcttcggaacccgaaagtgttggggtacaatgtggattgtaaaggagattgtattgctcagtgtactcggtgttgggttcggttttagtctttcactagttcgtttctttgtttgnatctactcctccatnttatggtttcgttacagctactgaaataaacnagcattnatggttgaaggaccaatgtgaatgcttgtacttagatgaaaaaaaaaaaaaaaa

SEQ ID NO: 1506 - DNA, 877 bp, Brassica napus
  Clone ID: BRANA-23APR03-CLUSTER4507_1
agtgaatgttttttaaaaaatccgaaacagatccaaatgaaaaattagggaagaagcagagcaaactcattggtggtgtctctctaaacccactaactctctcaaccgaagatgaagctcaccgatggtcctcaacaccttaaccgcctgcgacggagtaagaatctccaccactttccccaccgtcgaacacctcagctcatccgcgctgttcatcgccctcgccatccctctcttaagcacctccatcgcctcctccaaatccgactcctccccgtccaccatccccctcgcccccactcgcctcgccgcgagcatcaccggcggatccgccacgctctgctgcaccagcgcgaaatccctcatcacgtccctctctctcctcctcgtctccgaccggaggctcgagatccggtccctctggtggcgcgtgaggtcgtcgaccgtggagtccgtgagtttgaagacgagagaaggcttgaaatcgccgacccagaggatgagcctggcgtaggaggtgaaccacggcgggcagaagaaggtgaaaacgttgtctccggcgagggagacggcggaggatttctcttggtagtattggagacagtgagatagaaactgggtcacgagagattgttgctgctcttcgttggtttcgtccaaggaagaggcgcacgtaagctgttcgacgaaatacctgtgacgaatcagccaaccgttaacgaagctgctgaagctttgggagctgctggtgactggcatgtttttgtctactgtggagtggtcactaaggactgagtatgtgtatttggaacgtgctttgtgtacaaagatttatatacgattttttggacttgaccaactaaaaaaaaaaaaaaaa

SEQ ID NO: 1507 - DNA, 668 bp, Brassica napus
  Clone ID: BRANA-23APR03-CLUSTER4508_1
aataattagtatcacattttcttctataaatcttagatttctcctccttgagtgtttagggatttgtctgtgtaaaaatggacatgggggaagagaaggaagtagtttctctgggaactctgagtaagaagatggatgattttgcaaaggctagagattgggagaagtatcacagcccaaggaacctccttttagccatggtgggtgaagtgggagagttatcagagatattccaatggagaggggaagtggaaagaggacttccggattggaaagaagaagacaaagttcatcttggtgaagaattatcagatgtgttgttgtatctggtgaggctttctgatgtttgtggtgtcgatttgggcaaggccgctctgcggaaactcgagctcaatgccattaagtacccagcacccaaacagactgatcattgtgttggtgaacattcaagcgacaatactaagttgaccgaagataattaatctctgttttttctcaaaaaaaaaaaaaaaatcctaatgtgagttgttgactcttgctttgtacaacttttccattggtctctgtattgttgctttccctgtcttgcactgaatctttttacattagagttaacctttttacatatattgctcgtggagttatttgattcaaaaaaaaaaaaaaaa

SEQ ID NO: 1508 - DNA, 669 bp, Brassica napus
  Clone ID: BRANA-23APR03-CLUSTER4525_1
atgacacgttgcagaatttgtctgaatgaaatgcgtctgaccaacggagcacatccacaaaaccaagactcatctcttctcctcagccaaaaagaaaatggcgacctcgcttctcacctcgacgccactgtcctcgtctttcttacctgttcctcggaatctgtctgttcatggccattgtccgagccaaagaactctctggttcggtctgaaacaatcgtctctctgtgtacgcgccgctaaactccctcaaggggtgatagtgccaaaagtggaacccaagtttgtaccagcgtttctgggattcacatttacagctgagatatggaactctagagcttgtatgattggtctcatcggtaccttcattgttgagctgattttgaacaaaggaatacttcaaatcattggtgttgatgttggaaaagggcttgatcttcctctctgattttgccattcttcttctttacaagcttctttttcttatttcttatggaattcaacaatctaagagcttgcttacaagttataagtttcagcatttgcatataaacacatactgagagaactgttctgattctgataagagattataaaaagcctttaataatcttaaaaaaaaaaaaaaaaaaaaaaaaaaaaaaaaaaaaaaaaaaaaaaagcggccgc

SEQ ID NO: 1509 - DNA, 891 bp, Brassica napus
  Clone ID: BRANA-23APR03-CLUSTER4538_1
gcacaacacaatcaaaaccataaaccaacgactccaagtctcatatatggcttcttcacaagaccaatcagctttggacctcatcactcaacacctccttaccgatttcccttcattggagactttcgtctctagcatccatcagagcaccacctccactcttagccaacgcaagccatctcttgccaccatttcagttcctactactgcaccggtggttcaagaggatgatcataggcattacaggggcgtgaggcgtaggccgtggggtaagtatgcggctgagatcagagacccaaacaagaaaggcgttcgtgtctggttaggtacttttgacacggccgtggaggctgcaagaggttacgacagggctgcttttaaactaagaggaagcaaagccattcttaacttcccactagaagcaggcaagcacgaggacaacaacactgtggctttgaaatctaagaggaagagaccagaaacacaggatgaaaaccatggcagaaacctgatcagccataaagctgtgataagggaagagacggaagctcagggtgaggcttgtccgttaacaccatcaagttggatggggttttgggatggagtagacggtatagggacgggactattctctgtgcctcctttatctccttacccatcgctaggacattctcaactcggagttaagtaagcttatggatgtaggtgacatccgcaactttggattttatatcatcggcaagcgaacacacaaagaatcttaaagattgtattaaagattcctcatggagtgaattcgtttcttgatttgttgattgtaaatggtttgttatattcattcgttcttctcagtgcaattataaaaaaaaaaaaagggcggccgcaaaaaaa

SEQ ID NO: 1510 - DNA, 912 bp, Brassica napus
  unsure (1)..(912): unsure at all n locations
  Clone ID: BRANA-23APR03-CLUSTER4553_1
acagaacccgagatctctattttgtgcgtctctctctccatctttcatcagctacctaaaaccgaatctctctttcgaatttcaaacaacgaagctccgcccaacagatctcgccggcgtttcgcaatggataatcctattcaagagattctggagaagcagcttctgacggtggcgaaagccatggaggacaagctcgacgaggagatcgcgtccctggaaaagcctgacgaggacgatctggaggtgttgagggagaggaggctgcagcagatgaagaaaatggcggagaaaaggaagcgttggatgagccatggacacggcgagtacaccgagatcccttccgagaaagacttcttcgccgccgtcaaggctagcgaacgcgtcgtgtgccacttctaccgcgagaattggccctgtaaagtgatggataagcacttgggtatattggcaaagcagcacattgagacgcgttttgtgaagatccaagctgagaaaagtcccttcttggctgagaggctcaagattgtcgttcttcccactcttgccctcatcaagaacactaaagtggatgattatgtggttgggttcaatgagctgggagggaaagacgatttcagcacagaggatctggaagagaggttagctagagctcaagtcatacattacgaaggggaatcatntcataaaccaaagtntactacacaaaccaagaggagcgtaaggcagagtgctagatcagattctgactctgaataaatcccaagtttgtaactaaaggttgtcgtcagccttttcttgtgtctctgtttcgctgaagaggaatgtattcatgagttgtatgaaacgagttaagttgtgacttttataattcgatgctattcactcgttctaataaaaaaaaaaaaaaaa

SEQ ID NO: 1511 - DNA, 582 bp, Brassica napus
  Clone ID: BRANA-23APR03-CLUSTER45589_1
ctacaaatctttacacctttgcctctctctcttttcgttcgttgttggttatcaaaggaagacaaatgggttgctctagttcaacagccaaggcggaagggagaaaggaaaagattagaaggccaaaatcatggaaacatcctcagccaatatcaagagctgagctcacacagatgcgagaggagttttgggacacagctcctcactatggaggcaaaaaagagatatgggatgcgttaagagctgcagcagaagaagaggacttatctcttgcgcaaaccataatcgagagtgctggtgtgattgtccacaacgctgacctcaccatttattacgatgagaaaggttccaaatatgaattgcctaaatatgttttaagggatccttcaaacttgatcagaaccaaataaagtaagaagaagtaggagacaagctcgtttgtgtatgtttgtttgtcgtccagggaatcatgaatcatgtgtcttgacttacttatatggtcatctttgcttggatttgtcatgcgagactatgcgtatgtgaggattgacatgatgatatttacaaacttccatagaaaaa

SEQ ID NO: 1512 - DNA, 763 bp, Brassica napus
  unsure (1)..(763): unsure at all n locations
  Clone ID: BRANA-23APR03-CLUSTER4558_2
ctggtctggtggtgtattgatttgcagaagattagattgaattgaatttgattgctgaagctaagatgaagctcggtgctaggcttattgctttggtgcttctcctatcttttacgattgtactaacgaaagcggaagtnattacgttgacccctgaaactttttcggacaaggtgaaggagaaggatactgcgtggtttgtaaagttctgtgttccttggtgtaagcactgcaagaaattggggaacttgtgggaagaattggggaacgcaatggaaggtgacgatgaaattgagattggggaagtagattgtggtaaaagcagagatgtttgcaccaaagttgagattcattcctatccaacgttcaagctattttacaatggagaagaagtttcaaaataccaaggtaaaagagacgttgaatcgctcaagacgtttgttgtagaggaaactgaaaaggcagcagaaaaagcacaacttgaagacaaggaactgtgattcatccttttgttcattcagttttgcttatgcagttgacttagtttcaccacaagttagataggcatggtggcggaatagatcaagtcttttggatttatatgccttccaaacacatactgttttttcagtttcagtgcgagacaacgatcactgacactcttctgttgtattttcgtttacgagcaattgcattgtgctttgatattttataaaaaaaaaaaaaaaaaaaaaaaaaaaaaaaaaaaaaaaagggcggccgc

SEQ ID NO: 1513 - DNA, 905 bp, Brassica napus
  Clone ID: BRANA-23APR03-CLUSTER4579_1
atctaaaaccataaaccaatgctaagtaaaaaatttgaacaatggcgaagtcactcctttgtccttcagccctaaactcattcatctcctccaatctctcttcatcaacttcttccaagaacaaccaaatcgcatgctcgggaaacatcaagaaccagacaccgtctctgtcgtggaacagacgagagctgtctcttggtttcatgagcacatttctcgcggttggtctcgttggtaataacgacaggagaagccgcgacgcgaatgcagcgatcctcgaagctgacgacgatgaggagcttctggagaaagtgaagcaagaccggaaaaagaggatcgagagacaagctgttcttaactctgctgttaaagaaaaggggtatttgcaggatcttgtttacaatttaagcaaagtaggacaagccattgagaacaatgatctaccagctgcaggtttggttttggggaatggcagtgataccgaatgggtcaaaacggctaacttggctttcacaaagttgagtgcaagtccagaagagaatacagaggtggaaacgtttaattcatctttagcttctcttgttacatcagtgaacaagaacgatctagagtcatctaagctcgcgttcgtgtcatcggctagtgcatttgagaaatggtcgagcttgactggtcttttaggacagctcaagggcatctgatagactgtggctaccaattttttacttttgtgtgtaattttctgaagattgtcaacaaaagaaagagtttcctttgaaaaaatccatctgctaaacatctttggttatgtcattttttaatctttatacattttgttcatacttgccttgcatgcacattcaaattgaattaaaaaagattttttatgaaaaaaaaaaaaaaaa

SEQ ID NO: 1514 - DNA, 806 bp, Brassica napus
  Clone ID: BRANA-23APR03-CLUSTER4599_1
tttttttcttagcagtttccagagtctttgtctctgggaagtagaatcggatcttccatggctttgtctctgggaagtagaatcggatcttccgtcttaatacgacggcgtatccctttcgtcggtgcgttttgcgtgctaagcttgggtttctcgtctctctcatcctccttctcctcgtcttcctataaaccgggttgtgcacagtctctctcttttgcccctctcttaaggtctaggtttagcagtaaggcttcttcttcttcatcgatcaaaatggaggaggggagcaacactgtgcctagcgttgttgtctacgtcactgttcctaacagagaagcgggaaagaagttggctaatagcatagtccaagaaaagcttgctgcttgtgtcaacattgttccaggtgttgaatccgtgtacgagtgggaaggaaaggttcagagtgattcggaggagctcctgataatcaaaacaaggcaatcccttctagagtctctcaccgcgcacgtcaatgctaatcacgaatacgatgtgccagaagtgattgcattgcccataactggtggaagcgacaagtatctagaatggttgaagaacagtacaagaaactgagaagtgagatctcgtggctgtccaccatcaatggcttttggagtttcggtttcttcacaacctatatgttccaaataatgagctcccctcatctgtggattatggcatagtgtgtgatgtgttcaaatactaagaccagttcacttaaaagtgtaataaaaatttgtactcgtataaaaaaaaaaaaaaaa

SEQ ID NO: 1515 - DNA, 838 bp, Brassica napus
  unsure (1)..(838): unsure at all n locations
  Clone ID: BRANA-23APR03-CLUSTER4603_1
aaatccaatccgttcgttaataagacggagagcaaaggggaacaaaagcttatccagacactaaacttcaaatgaatgtctgaaggcgaagtttcttctattagtcgaagaagatggctcttctctttttcaatcctctcgctcccctctcttctcaaagtcttcaatctttcgtcgttcgctctcatctcttttcagcctcaaaccccactccgttctgtctaagaacagagtctccctcagtgcttacaacttgagcagttgttgaaaaagagctgtgattgtgaaggcggctgcttctggagtcgacggagctgagcccgagagcaatgaggaaccacctaagactgtcgtcgctgctgttccagttgataacctacccagtggtaatcgaaagagccaaaaggaaacctcttcccgtggaacagagggatgaagatgaaactggcgcaagatggtttaggcagcagaacggtatagcgtcttgagtgcttaggtgagaaaactaaggtaggaagggttcgttcgacaaccagtccaaaatgaagtagcagcagaaatttttagcaagaatggtcgtttctcacctttcccaagatgaagaagctcaagaatgtttagacatgatgatgatatgactggttgctttgctgtcttttttttttttttaattcaacttttcttgtaatgttgtttgtaaactttctggaaccatttttaatgccttttgaaatgcnaaaaaaaaaaaaaaagccattgcttttggattgggnnnnnnnnnnnnnnnnnnnnnnnnnnnnnnnnnnnnnnnnnnnnnnnnnnnnnnnnnnnnnnnnnn

SEQ ID NO: 1516 - DNA, 859 bp, Brassica napus
  Clone ID: BRANA-23APR03-CLUSTER4630_1
ataaaatggcattaatgtacagaagatcccttctcttacagcatcttccttgtccctctgtaactccttttttacgaaactaccccttgaaaccgctcaaattctccagccagcccttctcccatcgctgccgtcagtctccagcatcctcctcctcctcctccgctcgttgttgttcttcatcgtcgtcgatggaatctccaccggaaggttatagaagaaacgtaggtgtctgtctcatgaatccttccaaaaagatcttcgctgcgtcgaggttggatattcccagtgcttggcaaatgcctcagggtggaatagacgagggtgaagatccaagagttgctgtcatgagagagcttaaggaagagactggtgttcactccgctgagatcatcgccgaggcacctcactggataacttatgatttccctccagatgttagggagaagcttaaggtccgatggggatctgactggaagggtcaagctcagaagtggtttcttctgaaatttactgggaaagacgaagaaattaatcttcttggtgacggaactgagcaacccgagtttggggagtggtcatgggtgtctcctgatcagctcgttgaacttgcagtggatttcaagaagccagtctacaaggaagtcatgtcagctttcgcttctcatctccagtaatacacaaaccatatctaactcactgcttttgcaagttcgagaataagctcttcttgaaatacattcgcttcttgaataatcccatgaacgaaaatttacaatcattcttgcctgtttccttactttatctctagcaaaaatgtgagaaatctcagtcaaaaaaaaaaaaaaagggcggccgc

SEQ ID NO: 1517 - DNA, 810 bp, Brassica napus
  unsure (1)..(810): unsure at all n locations
  Clone ID: BRANA-23APR03-CLUSTER46361_1
aactcttggcagatgataatggcgtcgaagcgagaatacggcataccttatacacctcttccttcatcacagccttctcaaacggtcatcgttctaactccttatcgccgccaccctcgcccttcgttcctccgcagcctccgctgctctatcctcttcaccgccgcaatcctcctcctctccgccgccgtctacttcctctacccttcggatccagaaatcaatgtctctcgaatccagctcaaccacatacgagtcctcgattcgtttaaacccacgctcgatctctcgttttcgctcacgatcaaagtcaggaaccgcgatttcttctcccttgattacgattcgcttgtggtctcgatcgggtatagagggagagagctagggcttgtcaagtctcgaggtggacaccttcgtgctcgtgatagctcttatattaacgcgactcttgaactcgatggtctagaggttgttcacgatgtgatttacttgatcggtgatttggctaaaggtgttatcccttttgataccatcgctcaggtcaaaggtgatcttggtcttcttctctttcaaatcccaattcagggaaaagtgtcatgcgaggtgtttgttaatattaacaaccagaaaatttcacnccaagactgtcatngtaagtgaaacaaaatcctgagcttgttcaaagatgaaagaggaatttaccagagatacatatgttgaatacgttgtgggntatgganaaatgatttgtaagatttttgtatagataaatactactggattgccnntnaaaaaaaaaaaaaaaaaagc

SEQ ID NO: 1518 - DNA, 543 bp, Brassica napus
  Clone ID: BRANA-23APR03-CLUSTER46428_1
attgttatctctctgtgccgtccccaactccattccgaagaaagagagaagagaaatcgaggaaaatggagaaaggaaagggaagaaaggaggagatcgttaccagggagtacaccatcaacctccacaggcgccttcatagctgcacattcaagaagaaggcacccaatgcaatcaaagagatcaggaagtttgcattgaaagctatgggaaccaaggatgtcagagtcgatgttaaactcaacaagcagatttggagcagaggtatccgtggtcctcctaggagagtcagagtccgcgttgcccgtaagaggaacgatgatgaagatgccaaggaggagttctactctctcgtcactgtcgctgagattcccgctgaaggattgtctggtttgggcaccaaggtcatcgatgaagacgagtgaaaagaaaaaagctagtgaagttctcacgcaaaccgttatccttcaaaaatattgtttcagctttttttttttgtttgctaaatctttagatgaaagacagaaagagaggaagactttt

SEQ ID NO: 1519 - DNA, 958 bp, Brassica napus
  unsure (1)..(958): unsure at all n locations
  Clone ID: BRANA-23APR03-CLUSTER4662_1
atatatcccaaaacgctttatgttctgtctaacgccgtttcgacgccgtgttgttgtttttcgccgggactctctctccctctgagacggtcgctaatcttcttctgactcattcctctctcagatcatactcagttcactacaatgtctctctgcaatcaactaagccgtctcgtcaagcaatcccctctcaccaaacactccctcaggtctttctccgctgaggcggcgactcaccacaggcaccaccaggagacgcacagcttcctcgagccggagagctacataggcagctgggaggccccgaaagatcccaaggacagacgcgaggatgctcgcgcagctgaggagagactacgcgaagaaagtgagcatgaaagtgaggctgtatcgtaaagagtacgagaacgagatggtgatgcttaggggggagaagcagggtaaggacgaggcgaggttggtggctgagcgtgctgctaatgaggagaggcggcggttgaaagctgaggcggctaaggttagggctgaggagcgtaaggtctttgaggaagagttcaggagaaccctgatgaaagaaagagatgaaaagctggagttttggagaatgacgggactaaaaagggaagagaagaagaaagataaacagaagctattgcatgagcaaagttcattgtggatcgaaccaaaggaactggagaagaagattacggaagctctagttgagtccactactctataaacccaagcccctcttttattaatctttgtttgagaaacgatcatttttgtaattttgttggagacgacttatcttttcttctttgaatagagagataaaagcgaaatcggttaggcgcttgtgcatcaagcacataatcagtattggtggtnttgtgatcnatcattaataanaaagtttgtttttgttgttaaaaaaaaaataaaaaaaaaaaaaaaa

SEQ ID NO: 1520 - DNA, 792 bp, Brassica napus
  Clone ID: BRANA-23APR03-CLUSTER4679_2
atcaacaactatcacacaaacacataaactcaaaaatcttattctatttgtttcgttttatcatcagaaaaacataaacatggttgctatttcagagatcaagtccacggtggagactacggcggcgaactgtctgatgctcttatcaagggtcgaccaagaaaacgtccgggaagtgcaaaacgcgttttcacatgtaagacgtgtttgaaggagtttcattcgtttcaagcgttgggaggtcaccgagcgagccacaagaagcctaacaatgagagtctctccggtttgataaagaagtccaaagctgcgtcgtcgcatccttgtccgatatgcggagtggagtttcccatgggacaagctctaggaggacacatgaggagacacaggaacgagagtggcggcgccggcgcattggttacacgcgagttactgtcggaggcggcgttgacgacgttgaagaaatcaagcagtgggaggttggcttgtctggatctgagtttggggatggtggagaatttgaatctcaagttggagcttggaagacctgtttgttgatttgtttttaccctttttgttttctggatatattaagtagtttctctcattctttgatttttttccttgatattttagatttatacatatacatctgcagatttaggaaactttcataggccggtgtaatattttctttcctttcgtggtgaaaatattctttacttagtattggagatttgttatatatgatatatctttcagtttaaaaaaaaaaaaaaaaagggcggccgc

SEQ ID NO: 1521 - DNA, 858 bp, Brassica napus
  unsure (1)..(858): unsure at all n locations
  Clone ID: BRANA-23APR03-CLUSTER4697_4
aaaagtatagaaagaaagaaaaaaatctgaaaaaaatcagaaagagagaaagaggaaaaagaaaagtctttctcttttttttcttcttctcccagattctctctctcctcctgcgatcgtattttctctcactttcattggttttctcggcggctccatctcctcttttttttttctcanaatcgttcggttccatctttcttgggataaatcttcctcctctctgcanacgccatgtcggacaaaggtcgtcccttgccgaattttggagaatgggatgtgaactacccagcatcagctgaaggtttcacagtgatattcaacaaagctagggatgagaaaaagacaggtggcaaacccggatcacccggtaaatccactgaaggtcatgctaagtccggaggaggaggaggagatcctagtaaacctcagcctaaaaaatggctctgctgcatgcagtctccagcagtggactcttgacggacacaaagattggattttacttgctgccaagtaaaaaatgaagaaggaaggtgacattgcttagacatgtaaagcaatgttctttttttttttaaatgttttattgtctttcttgaaagtatcccccccccaacaaaaaagaagttcttaagatgatttggagccccccctttagtattcacgataatgattttccttcttctttgaagttgtttgttattctaatcgtgttgcaacttttattggaaaaccaggaaaaaaaaagaaaaaaaaaacatagttattgtgtgtctatatatgtaatgattctcatgggtattttggcgttatatttaaaggatactctgatcaaaaaaaaaaaaaaagggcggccgc

SEQ ID NO: 1522 - DNA, 1033 bp, Brassica napus
  unsure (1)..(1033): unsure at all n locations
  Clone ID: BRANA-23APR03-CLUSTER4734_1
gtcgtcattttgcttctacaagcgtcgtcttcctcagatcttttagctctcccatgaatcccgagaagattcatattaaacacctcttctgatctgcaatcgaagttcttggcgggggatccaatttgtttcaattttaagggagaaggaagaagcatggacacttttacggcggaggatctgtcgacgatcggcggaatcgccaccgtgtcgctcctccattcgtttattccgacgcactggctacctttctcaatcgtcggacgcgcgcagaaatggacgctttccagaacactcttcgtcactgcatttggagcagttctgcatgtcatatccacttcccttcttggtataacagcgatcacaatggcgaataccatcgccggtgaagagactgttcacaagcttgcttcccttttgcttgtgattctcggtggaagctatgtattactgtttctggctggtaaaggaggccacactcactctcataacaaacccatggagaaaatggctgttgctgggcttgtccttgttcctgcattatctccatgtgcaacaactcttcctgtttttctcgctgttggaaattcaaagcccatgatggttctcgccatcatagttctgctgatcagcaccatattggtgatgacatcgctggtggctctatcgttctacggtgcaagtcagctgaagtttcactgggtggagcgatacgacaagctactggttggttcggtcctgtgtntggtaggtatcttaacccttntnttccatgatcatgaccnccatggtcatgaagctcatcagctccccaggaaaatcattactctttagagtccggctttcgaatctcctttttgtctgttatgtctgtttgttatagagcgccttaagggctttcccgttgtacgtctataactagttccaatgctctntgttgcacgtgaanaaacatatgtaagtgtcaatttcctttagtagaacaacattagttgtgaatgtgattctnttaagcagaaaaaaaaaaaaaaaa

SEQ ID NO: 1523 - DNA, 1015 bp, Brassica napus
  Clone ID: BRANA-23APR03-CLUSTER4754_1
aattgatttttgtgtgtggtcttctggaaatcgaacgagtgaagagcgaaagagaatcgagagagagagagagaagtatgggtcctcacggagatggtgacatcgagaatgttgaatcggagagtcgtcgtcgacccatctccacagtcgtcttcgtcatcgcgatgcaagcggaggctcaacctttggtcaacaagttcggactctccgaaacttctgattctccgcttggtaaaggattgccctgggttctctaccacgggttgcacaaggatcttcgaatctatgtagtctgccctggaaaagatgctgcttcagggatagatagtgttggaactgttccagcttctctcattacctttgcttctatccaagctttacaacccgacattctcatcaatgctggaacctgtggtgcctttaaggttaaaggagccaacataggagatgtattccttgtatctgatgttgtcttccatgataggagaatacctattccgatgtttgatctgtacggagttggtcttcgtcaggcattctcaacccccaatctcctcaaggaactcaatttgaagattggcaggttatctactggtgattccttggatatgtccacacaagatgaatcattgatcattgccaatgatgctacactaaaggacatggagggtgctgcggtggcctatgttgctgaacttctgaaagtaccagtgatattcttaaaagccgtgaccgatctgatcgacggagacaaaccgacggcagaagaattcttacagaacttggctgttgtgacctctgcgctagaggaaactgccactaaagtgatcaacttcatccatgggaaaaccctttcagacctctaactctgtacttgtgctatttttatgtaacaaccgtggttctttaaaaatgcgtttcaacatcattcgcagtgtcactcacttccagtgatctataataataaaaaacttcaaaactttcagacgaaaaaaaaaaaaaaaagggcggccgc

SEQ ID NO: 1524 - DNA, 936 bp, Brassica napus
  unsure (1)..(936): unsure at all n locations
  Clone ID: BRANA-23APR03-CLUSTER4786_1
aagaagaatcacagagtcaagaaaagcttcaatggtgattttatctgcgagctcgaccgtgagagctgccttggatacacagcctagactcccatacaaccctaacgcccctcgtaaagtaaagaaaactcctaacggcaactctttcttaccgctgcctttacctcctccgccgtctccgcgaatcagcatctccgtcgacgatttgctcaagcgacccgaaagcaaagagttgagtgttgaagttgttgatagttacatggggtatgagacgtggtctccaagtccaccgaagctggagaagccaagatcagtattcaatgctgcttctttagcttttataggtgattccatctatgagctatatgctcgtaggcattttcttttccctccacttagtattgaagattataacgatcgtgttagagctgtggtgcgctgtgaagctcagtatgctctgctgaagaaacttattgatgatgatttcctaacaaaggaagagaaggatgtactcaggtggggaaagaatctaggctcggctagaactcgtacaagaaggcgtgcaggtgttgcggtttataacaaagcatcatcactggagacactgattggttatctgtatctgactaacgggaaaagattagaaaaaataatggagaagctaggattntcaagcgactnttcgactgagatcatgattgaaatggccaagccaaaaccatcagaaccaaacctgccttcctttatactcaatgagcaagtaagcnccncagtagtatagtaaaggttgcttactctctgggatcatggagaagntaaaagatcatcaaagtttccttagtaggccggtttagcatttcactgttcagttaaatggagagacatcattattatataaatgtgtaactctattcctgctgaaaaaaaaaaaaaaaa

SEQ ID NO: 1525 - DNA, 856 bp, Brassica napus
  unsure (1)..(856): unsure at all n locations
  Clone ID: BRANA-23APR03-CLUSTER4822_1
agttgacggaaacgaatctcggaacagcatctctttcatcgtctcctcattttagggtaatcatcagcgtccatgtccgggaacaccaattgtaccgtgtacatagggaacttggacgagcgagtaagcgatagggttttgtatgatatcttgatccaagcagggagagtaatcgatctacacatccctcgcgataaagaaactgaaaaaccaaaaggctttgcgttcgcagagtatgagactgaagagatcgccgattacgccgtcaagctcttctccggtcttgtctctctctacaatcgaactctcaaattcgccatatctggacaagacaaagcacagtcaggttcaggtcacaggacaagacctcagtctctgagtttcgatcattcggatagaactcatcaccattcggagagattctcatcacagttgatgtcttcaccttcccctatgcctcttggttacactcaagagccacctccgccaggggtttcaaatggagccggtttggagtacagcagtagaagggttttgagttcggcnctagatatcaaccattcaagacccagtngntactgagaccncttttctttgcttttttgctgttgtgaaaagaacgaactagagggagatgaagaactcgtgattgtaatcatccaaggaagtttagttcaactgatgtaacctttgtttttcagtaaaaagacgcatctttctgtgttgtttagaacaaaaaaagaaaaaaaaaaaaaacaaaaaaaaaaaaaaagaaaaaaaaaaaaaaaaaaaaaaagaaaaaaaaagcaaagaataaaaaaaaaaaaaaggcataccgttataagggttccaaatt

SEQ ID NO: 1526 - DNA, 862 bp, Brassica napus
  Clone ID: BRANA-23APR03-CLUSTER4830_1
catctctatcattatctcgagtgttatcagcttttgagtttgaaacatactttgatcgttgtttcgattttcctttttcttataaaccgaccaaatcttgatctaaaaaactatggcggaggaaaccaagaaagtgcatgaagtgccaaaggtagcaacggaggaatcatctgcggagacgggagaggttacagatcgtggtatgttcgacttcttgaaaaagaagaatgaggaaacaaaatcagaagagacgatcaactcagagttcgagcagaaggttcaggtttccgagccggtccctgaggttaaacacgaggaagaggagaagaagcctagtctccttgaaaaacttcaccgaaacgacagctcttctagctcctcaagcgaggaagaaggtgaagatggtgagaagaggaagaagaagaaaaaggataagaagaagattgctactgaaggagaggtgcaaacagaggaggagaagaaagggtttatggacaagctcaaggagaagcttccaggacacggaaagaagcctgaagatgactcaaccgctgtggctgcaccggttgttgctcctcctgtggaggaagcgcatccggctgagaagaaggggatcttggagaagattaaagagaagcttccagtaccactcaaagaccgttgacgaggagaagaaagatgatcactgaaaacatgaatactaatgatgatgagagacatgttgtgttgtttgtgatggataattatcatctttttcttttgtgctgttgaagtttgttggcttctttatagtttattttacagtttccctatttttctctttgttgtgtgtttagtgtatggtttcaaggtattttgaagt

SEQ ID NO: 1527 - DNA, 1112 bp, Brassica napus
  Clone ID: BRANA-23APR03-CLUSTER4831_1
gaggataaggtctgaaagcacaacacttctcttgttcttgcttctccttccgacacaatggctacgttcctcacacctcttgtttcaatcaaacctacagtcttttcattcccgtcccaatccgtcacctctccacacagacaaaccaatgtactctcactcaaaccgtttccttctcccgcgggagcacagagctccagggtgagattcattccccacgcggtggagactgaagaaaaacccgcttcagaccctaacgcagagtcctcaaggcgtgtctacatcggaaacatacccagaactgtggataacgaacagctctcaaaactcgtcgaagaacacggcgccgctgaaaatgttcaggtgatgtatgataagtattcaggaagaagccgtaggtttggattcgctacaatgaaatcagttgaagatgccaatgctgtgattgacaagttaaatggcactaccattgaagggcgtgaggtgaaggttaacatcacggagaaacctatagcgtcatcatcgtctcctgatttgtcattgcttcagtctgaggattcggcgtttgtagatagtccttataaagtgtatgtagggaatctggcaaagactgttactaaacagatgcttgagaatttgttttctgagaaagggaaagtagtcagtgccaaggtttcaagagtgcctggcacttccaaatcctctgggtttgggtttgtgacattttctacacaagaggatgttgaagctgccattttggctctaaacaactctttgttggaaggacagaagattcgggtgaataaggcatagtgtgagaaagaagaggagtccttgcgccctcacaagaacgtgaaaagaatctctttttgtaatgcaaacatgtagagcttagtatcatcatctttgtatctttgtatcctttctaagatgaaaaaatgaaagcatttcattctgatcatttatacgcatcatagatacacaggataggctgctctcaatacggccattatgtgctacagattgactttagcattggtgttacacaatcttgctcatctctacaaattaagagtatgatcaaaaaaaaaaaaaaaaaaaagggcggccgc

SEQ ID NO: 1528 - DNA, 690 bp, Brassica napus
  Clone ID: BRANA-23APR03-CLUSTER4938_2
attatagctctcagcttctctgtcacctcagtagaagaaaatgtcgatcattccaatcaacgatcgccggagtatctctcccggcgatagaatctgggagccattcgaactcatgaacaccttccttcgacttcccctcaccttctctcctcctccctcgccacttcccctcactttccccactcttcaccatccaccgtcgaaacccagctgtactggacggagactccgactgctcacgttttcaaagcgtatcttcctgggacgactcaggatgaagcgatcgtgttcgtggacgacgaaggatacctccagatctgcgcgggagacaacaagttcatgagcagattcaagcttcccgacaacgccctgaaggatcaggtgacggcgtggatggaggaggatgggttcctcgtcgtgttcgtcgcgaaagatggtactttttcccagacgccaccggagatcgaggataatcgcaatgtgagagtcgtggagatcaccggcgatgatgattaaattaagtctgggcctgtgtactaaaataaacagagtaatcatgtctttaggtttgtgatcggaagtcctttgtgaccttgtgtgatgaagtctcttgtgttataaaccaaactgtgtcgttttactgaattgaaaaaaaaagttatgtaaaaaaaaaaaaaaaagggcggccgc

SEQ ID NO: 1529 - DNA, 704 bp, Brassica napus
  unsure (1)..(704): unsure at all n locations
  Clone ID: BRANA-23APR03-CLUSTER4959_1
agcatattcttctccttcttgttcttccgagtgttcatcatcagatctcttggtttttcatatccaatggcgtcctgtgttgctcatcttcctctctcaagtgggtctcagtctcgttatgtaaaagcaaatggattgtccaccacaaagctcagttccatttgtaaaacttctgcattgactatccagaagaaatcaaaccggagtcgtaagttttcggtttctgcagggtatggaagcgaacgagagtaggagagcaagtggtggtggtggtggtgatttcatagctggttgttcttctaggggggtgctgtgtttggcgctgtcgcctatatctttgctccacagatcagaagatcgataatgagtgaagaagatgagtatggtctccaaaatccagaacaaccaacgtactacgaagaaagtttggagaagacaagagagacccgaaataagaaaatcgaacaacttaactcagcaatcgacaatgtttcatcgcggttaagaggtcgagaaaataacacttcttctcccaatgtaccagtggaaactggcccagaagttgaagctacgacttaaaagaaacaaacactttactgggtctctgtttctcatttgtaaccagagttcaaaaacagttccatacggttaagtgttaagtgcttcacttaaaaaaaaaaaaaaaaagggcggccgctntagag

SEQ ID NO: 1530 - DNA, 1762 bp, Brassica napus
  Clone ID: BRANA-23APR03-CLUSTER4983_1
gaaaacataacaaacaaatatctctaaaaccagtggtttttgtttgttataccttctcttcgccaacgcatttcctggcattgcccaatttctgcaactgcgaagctgtcttgtctgagaaagaacagaataaggtctccaagttgcccggtcagaacttcaatgtaaattttgctcactattctggattcgttaccacgaatgagaagctgggaagagcgctcttctactggctaattgaagctgctgaagatcctgcgtctaagcctcttgtcctcggggttcattggaggccagggtttttcaccagttggttttgtgtggagcaagagatataggactatttcatttaaacccaagatgagactcctttctaccttcatcctttttggctcaaagccgagcttcgattatttttggttgcagctgttgcagttgggatttgagcttcaaatactataacgcatcatctgatgactctttatatgaagatatattcttggaaccaaactcgctatcatttgttctgttatgcattgagagacgccgggtttacgtactattataaattaactaatttccataaaaaaaaaaaaaagagaactgctcaagactcactgaagtttctgctgaaatgggttgagcgttatccggagtataaaggaagagagttttacagtcgacccacgcgtccggctggacattacattcctcagctgagccaagccattgtaagacataacaaagcttctggcgacaacactatcaatctgaagggctacatggtaggaaacggtctgatggatgatttccatgacaggcttggtcttttccagtatatttggtcgttgggttttatatccgaccaaacatatagcttactgaagcttcagtgtggttttgaatcttttattcactcctccaaagcgtgtgataagattcaagagatagcggacaaggagataggtaacatagaccagtacagcgtcttcacaccagcatgtattgcgaatgcttcccagacaaaaatgttgctaaagaaaagaccaaggactagccgtgtgagtgaacagtatgatccttgcacggagaaacactctaaagtgtatttcaatcttccagaggttcaagaagctctccatgtcccgccaggacttgcaccatccaaatgggatacttgcagtgatgtagtgaatgaacactggaaagactgttcttcctcggttctaaacatttaccatgagcttatagctgctgggctacgcatttgggttttcagtggagacgcagatgctgttgtaccagtaacagcaacccggtacagcatagatgcactaaaccttcgtccattgagtccttacggtccttggtacatagacggacaggtgggagggtggactcagcagtatgctggtctaaactttgtgacagtgagaggtgctggccatgaagttcctttgcatagaccaaaggaggctcttgcgctcttcaaggcttttatatctggaaccccattgtcgacacccgagagcaacatcagcaaagacatgtctgacctcgttagtgactcgtgatgagtgggattctcagtcagaagctttcagttattgaacggagaagaaggggagaatagtgaataagagtttcagatgttttgtttgaattggttctttttcttcttctggttgcttgtttgaaacatttaatgttcaggattataataagcttcttctaccaaaaaaaaaaaaaaaagggcggccgc

SEQ ID NO: 1531 - DNA, 1058 bp, Brassica napus
  Clone ID: BRANA-23APR03-CLUSTER5023_1
acaattaaaggaagaaaaggaaagcattcctcttttggggaaatggagattgaagaaatcgaagcggttctcgagaaaatctgggatctacacgacaagctcagcgacgagattcacttcatttcccgctctcacttcctcgactccctcaaaccagctcctaatagatcggagacgaagaggaagaagagccaggagttaggcgaagagaagaagcggcagggctacgtcttcatcaaaggattcgacaataacgacgagaacgcaacgattcaagaggcgaagagcctgtacgcgatccgcaccgcgcttgagcatctcgaagaccagcttgagtttttccatactatacatacacagcagcgaacagagagagatcttgcggttgcacggctggagcagagcaggatattactagctatgagattggctcaacaccacggcaagagctaccgtgtcctcgacgaagctcttgcgtttgttggcagctttaaaagcgacactcgtttcgtttcgcctcatcaactttacaactcctctccaaacccaaccggagaaaactctgctccttgtgatggaactaagcccaactttgtgatcaacgcctttgcatcggctttcgggtttgccaaaagagcatttgggttcaaccatctgggaggcgtgcttggaaacgctgctatattctccataagcttggtcgctatgctacatcttcaccaggtggctactagtgaacatcatcatctacagaagagagaagacagaagagagatgtcttcatctgacataagcttggacgtgatgatggctcgtggttaaagactagggttcgaacttgtctacacgtgatcaactaagatgagaagagatagttgtttgcactccatttgatgtaacgggtttggacttagaaacaacaaaaatgtgtttagcttgcggaaataatatctatgcaggtaggttgtgggttgaatgtatagagtttgcaaagatggagtattatggcttcatttctatatgctttattataatgtttcagaaaaaaaaaaaaaaaa

SEQ ID NO: 1532 - DNA, 864 bp, Brassica napus
  Clone ID: BRANA-23APR03-CLUSTER5054_1
agagacggggagaaaagatggattcggagaaggcggtggtggacgagctgccgctagctatcgtgcgccgggtggtgaaagataagctttcggagtgttcgccggactatgacgtgagcattcacaaggaagcgttgcttgctttctccgagagtgcccggatcttcatccactacctctccgccacggcaaatgatatatgtaaggattcaagaagacaaacgatgaaagctgaggatgtgtttaaggcattagaagacatggaattttctgaatttttggagccgcttaaagcttctcttgatgattttaagaagaagaacgctgggaaaaaggctgctagtgttagtggagcagcagtagcttcaaagcccaaagagacgaaaaagaggaaacatgtagaatcatcaacgcaaaagggcgtcgggaaaagcaaaagagatgagggagatttaaagaatgatgagaatgacaacacaaaagagaatgaggatgataataccgaagagaatgggaatgatgaggaggaggaagaggatgcgaacgggaatgaggaaaacagcatggaagagattgggaatgaggacaatagcatggaagaagctgggagtgggagtggtgaagatgatgagaatgaaggtagtggggaagaggaagagggtgatgatgaagatgagtgaattcgagaggccttttcatatccttttctgcaaagaccatgttttcaggctaatgttctctcattataatgctaaaatcgattagctttattaaacttgagtagcactgttgttgttggcatgtccatgtcgtagactcgtataatatttgctctttatagttttaccaaaaaaaaaaaaaaaa

SEQ ID NO: 1533 - DNA, 1186 bp, Brassica napus
  Clone ID: BRANA-23APR03-CLUSTER5071_1
ctctctaattcatcgtcgtccgtctgtttccgttgtcggtacagagtcgtcgtagagcgtccaccgtctggttcagccgtcctagcaattttctttccaagcccatcttcagagctttatcctttccacaccgatcattccgctcatcgggaaacttcttgtttttttaactcatcacgcattcttacaacccggtttaccgatctaaacctgtgatcgattgaactctacggctctcatttcggagttttcatcaatttgaatggccgcttacgcgaattatctacggttagcacgacttggaaccggttcagctgtaaatttttcaactttcagatcgatcggttctccaaacccgacatttgacaggactctcttcgatcaccaccacgagattcgttcatcatctcctctctacagacaatccaactccagattcatatctcaacttgtcaaaaccaatgggaaacgtttgtatctcgtcgacacactcgctttggtaaggagcttggaagcgcaagggttgccttcaaagcaagcagaggctatcacaggtgctataactgaagtactgaatgatagcttaggagttgtttctcagttggttgtttccaagggtgagatgcagaaagctgaaatgacgcaggaatcaaacttatccaagttcaaaagtgagattaacagttcactggaccaccatttctctttgctgcaacacgagaatgagaaactccgcaatgacatagaacgtatccgcactgatataaggcacgagattgacaaagtcacagcaggacagcggttggacctgaatcttgaaaaagggaggataagagatgagctaacgaatcaaaacgccgaaacctctaaccttacaaacaaacttgaccgtgagattcacactttgagagctcagttggaagcggccaagtacgaggtgatcaagtattgtatcggtacacttgtctccatctcagccgttggcctagctgtcctccggatcgtcatgtgactctccattgttgaccaacaccctcatctttgctgtttttttcaattctggatgaaatcttggtctgctctttccatcttgtggcgtattttaatattttataatgtaatttgatttcctttttgtagtatatatgacgaaagaaaaaaagaaaaactaaaaaaaaaaaaaaaa

SEQ ID NO: 1534 - DNA, 1342 bp, Brassica napus
  Clone ID: BRANA-23APR03-CLUSTER508_15
acaaaaatatccgcagctcttcttcaaccacaaagacaattctctcgtccttcgtcttcttcgctcattgagtttcgctttgccatcgcttcctctcgaggtcaaaatggttgaacaaactcagaacccgacgattctccagaaggcgtctggccagctcatgcgtacgggtgttgtttctcatgacattcacggttacacttcctctttccagaggcgtgcaacgtacggaaactactccaacgctgcgttccagtaccctctcgccgctacttcccggattgtggcaactaccaccacctcccccgtgtttgtccaagctccaagtgagaaaggattctctagctttgctattgatttcctcatgggtggtgtttctgctgccgtctccaagaccgctgctgctcctattgagcgtgtcaagcttttgattcagaaccaggatgagatgcttaaggctggcaggctctctgagccttacaaggggtattgggtgactggtttcggcaggaccattaaaggatggagggttttggttctttgtggaggggaaacactgctaatgttatccgttacttccccactcaggcgttgaactttgcgttcaaagattacttcaagaggcttttcaacttcaagaaggacagggatggttactggaagtggtttgctgggaacttgggatctggaggtgcagctggtgcctcttcccttctcttcgtgtactctcttgactacgcacgtacccgtctcgccaatgactccaaggctgccaagaagggaggtgaaaggcagttcaatggtcttgtcgatgtctacaagaagaccctcaagtctgatggtattgctggactctaccgtggattcaacatctcctgtgttggtatcattgtctaccgtggtctctactttggtctgtacgactctttgaagcctcttctccctgctgacctccaggacagcttcttcgctagttttgcccttggatggctcatcaccaacggtgctggtcttgcatcctaccccatcgacacagtccgtagaagaatgatgatgacatccggtgaagccgtcaagtacaagagttcgatggatgccttccagcagattctcaagaaggaaggacccaagtcactcttcaagggtgctggtgccaacatccttcgtgccattgcaggtgctggtgtgctctctggatacgacaagctgcagttacttcttctcggaaagaagtacggatctggatccggctaagtgtgctagccaccagtcgccatcaccataaagctgcggctttatttttttttctcgatttttatttgcagtttcmaactttttttta

SEQ ID NO: 1535 - DNA, 938 bp, Brassica napus
  Clone ID: BRANA-23APR03-CLUSTER5091_1
cttcctcccttttgccgccgcctcaaggacttgaactttccttcttcgtatttgccgacggcaaggaaagttctcgatcacatccacgatgcagcatctactcttcgcggttgtactcgccgaggtcgcggtgatactcgcgctctctttcaaaacgccgattcggaagctcctcatcatgagcctggatcgcgccaagcgcggacgtgggcccgtggtggtacagacggtttccgcgacggtgtgcgtggttctggtggcgagcgtgtacagtatgatgaagatccagaagcgctgggtcgaggagggtgcaatgaacccgacggatgaggtcatcatgtctaagcatctccttgaatcgactctcatgggtgggtttcttttccttgggctgatgatagacaggctgcaccactacatgagagagctacgcatgagaaggaagaccatggaagctataaagaaggaaggatcggttctggaaggcgagaaagccagagcttcagacgaagtcaaaagcttgaaacaagagatcacggcgcttcaggaaagacaaaagcagctggctgctgagatcgaggcaaagtctaaagaaatccgtactgaagaaacaagtgggatcgctctacagaagcaatctgaagggttcctgatcgagtttaaccggttgtctgaggaaaaccaggatcttcgaaaccaattgcacactgtggattcaagaatctcgcgttcaagcatcaagaagaatacttgagccgtctctactccaacatttttatggtttgaacttgtttgtgatatgatgcttggagtttgttaataggggtgattgctacttggtaattgaatcttgtgttaacatatggaagatgatgggagtaaaatcagagggaatacaaaaacacaaggacaggtttgtttcaaaaaaaaaaaaaaaa

SEQ ID NO: 1536 - DNA, 1063 bp, Brassica napus
  Clone ID: BRANA-23APR03-CLUSTER5112_1
gaaaatcgtcggtcaccgagtaaaataacgaaacactctctctatttctctctatctgaccgtttgatcctcaaaaaatggcggagaaagatgcgatggccagaagcgacggtgcgattagggttagcggaatgcagttttcttacgacgtccaagatcctatcttcttcgatttcagcctcgatctccccgccggatctcgtttgcctcttggttggtggctaatgggtttggccagacgactttattgaagattttggaaggaagatttttgctggaaagagggtggttggaggggagaaagtttctgaatcgctctgcctttcacgacacagacctagacacgttatcggtggtacttgtcttacccttggtaggatccttggagcacaaaccgctggttttcctggtgggagagatctcccatccagggtagacagcagagcatatgatatttggagttgaagggattgatcctgtgagaagagagaaactaattgatcttcttgatatcaatcttaagtggcgtatgcataagggttctgatgggcagagacgtcgagtgcagatatgcatgggtcttttacaaccattcaaggtattattactggacgaggtcactgtggacctagacgttgttgctaggatggatttgttggaattcttcaaagaagaatgtgaacagagaggagctacaattgtatatgcaacgcatattttcgacggactagagacatgggctagtcatttggcctatatccatggaggagagctgaagctatctgctaaactgaaggagatcaaggatttagaaacgtccccaaatttgctttctgtggttgaaaattggcttcggtctgaaaccaaagtggagaagaagactaagaagaaacctgttgccacgtctccatttatgtcatctagacaaatggcgtattaccgatgaatctcagcatctttgagacagtaagaataagagctttttcacatttgcaattgtttttctttaatattttgtttgctttagtactcattctcattccaaataaaaaaaaaaaaaaaa

SEQ ID NO: 1537 - DNA, 703 bp, Brassica napus
  Clone ID: BRANA-23APR03-CLUSTER5132_1
aaattcactcatcatctcatctccctctcggccttttagaatattctgccaactatgtcgaagaagatcatcctcgagagctccgaaggcaaatctttcgaggtcgatgaagccgttgcgctcgagtgtcagacgatcaagaacatgatcgaggacgactgcaccgatggcggaatccctcttgcaaacgtcaacagtgcaaccctcgccaaggttatcgagtactgcaagaaacacgtcgaagcagccgccgaagccaacgccggagacaaagacacctacggtgctaacgaagacatcgagctcaagacttgggacgccgatttcgtcaaagtcgaccagcctctcctcgttgatctcatgcttgctgcaaactttctgatcatccctggacttcttgacctaacgtgcaagactgtggccgatatgatgagaggcaagactgtgcttcagattcgcgaaatcttccacatcaagaacgactacacagatgcggaagaagctgaggttcgcaaggagaatgcatgggcctttgagtgacttgaagttgtgttatgttgtttttgaagttgtgttatgttgtttcttttctcttttgatttgaataattgagtgtgtaacaaaccttatttctcttttattatatggtttatgaaaaacatattatatatcagctttgctggttacaaaaaaaaaaaaaaaa

SEQ ID NO: 1538 - DNA, 686 bp, Brassica napus
  Clone ID: BRANA-23APR03-CLUSTER5143_1
accaccaaaacctcgtctacacagaaaacgaaccacaaacacttactttctctttctctccacctttagcatcacccagggagagagagattgaagcccgagccggttcctatggctgccgctgcttcactttctgcacatcaaggtttactcggaacatccttctatggtgcttggggaaattcaatctcaggcgatgattaccacaccatgctcgccaaaacaactgcgccaaggcagcaagctaaagtctcacggaaactcatcagagtacaaccaatgatgaagaatgtcaacgaaggcaaaggtttattcgctccacttgtcgttgttactagggacatagtaggcaagaagaggtttaatcagcttagaggcaaagccattgctttacactcgcagagttctgtaaatcgataggagctgatgcgaaacagagacaaggattgattaggcttgctaagaagaatggagagaggcttggcttcctcgcttgatttgagtatcttcttcttgttcctgtctagatatattttgttcaaacctctcttaatacaagaactcccattctcattccgaaagttgtatcaatcttatataacaaacaataacactattgttgagttacagtttaggaagtaaaaaatatcacagctgaattagtagtcccaaaaaaaaaaaaaaaa

SEQ ID NO: 1539 - DNA, 784 bp, Brassica napus
  Clone ID: BRANA-23APR03-CLUSTER5165_1
aaaaaggaggagagtgagtgtgagagagagagagagagagagagggagggagacacgaagctctctgaaaaaaaaacacacaaaaatggcgataacacctctacgaatcacgacccctttcccatctcaaccctttctcccagccgcaaagccacacgcttcaaagctcttcacggtccgcgccaccgacgtcgaatcaacggaagagactcctcaacccgactcagacaccgaaaactccgaagacttcgagtcacgtctctcgaacatccgtctcagataccgaagcggaactgggaagaaagcagaggttagaaagtctaagaaagggtcatcagcagccggcgggcaatcgtcgaaaagctcggggctttacttgccgccggtgagtctaaaggagccggtttcgggcgggttgaaggtggagttggggtttacgccttacacggagcggctcaacgggaggatggcggggttggggctcgtggctttgcttctggtggagctggcgacggggaagagcttgttgagttaccacacgccttcagttgtgtggcttcagatctatttcatggcggctgtttcggctatgtttgttaagattgagaaggagaaggttagtgtctggcctaaggattaaaatggtctatgtgaaaaatgttgctttgtgtgcttttgtaatgtatgtaatgtatactcttatagaattgaacaatttaaaggatctcaatctggagtgagtttgttgttgttctaaaaaaaaaaaaaaaaaaagggcggccgc

SEQ ID NO: 1540 - DNA, 713 bp, Brassica napus
  unsure (1)..(713): unsure at all n locations
  Clone ID: BRANA-23APR03-CLUSTER5204_1
cgaaaaacatcaaactgtagtcaaactcatctgacgatcgatcgatcgatcatttggaagaaaccatggtggaagagaaaagtgggaagaagcaagtgatggtggcgatcgacgacagcgattgcagcaaacacgctctccgatggacgctctcgtatctcaaagacagcctcgccgattccgatatcatcctcttcaccgcgcagcctcagctcgatctcagctccgtctacgcttcctcttatggcgccgctccgatagagctgataaactcaatgcagcagaactacaaaaacgcagcgttgaatcggattgaggaagggaccaagatttgcgctgagagcggggttaccccaaagaaggtgatggagtttggaaaccctaaagaagcgatatgtgatgctgttgagaagcttggtgttgatttgctaatcgttggtagccatggcaaaggggctctagagaggactttccttggaagtgttagcaattactgtgttaacaaggctaagtgcccagttcttgtggtcaggacaaaggcttgaagagtttgagaaccgcctcgcttgctgtatgtgtgttgtgtaaacatattgataataatgctttgtttgtatactacnactgtttggaaaaaaactttgtgaatggaaataaatatattattggtttgataaataacgagctttnctgtgntaaaaaaaaaaaaaaaa

SEQ ID NO: 1541 - DNA, 854 bp, Brassica napus
  Clone ID: BRANA-23APR03-CLUSTER5231_2
aatacactcttttctctaactttctatctagctttcttacaagaaacaccaatggccaaactaaaccaaactttctttctaatcctctcaatctgctacttcttatcgccggcgctcactgccgccaccgcagcctcacgggctggagcttccaataaagccgtaaacttcatccaatcatcttgcaaaaccaccacatacccagccgtctgcttccactccctctcagcctacgcaaatgccatacaaacaagccctaaacgcttagccgagaccgctctagccgttaccctgagccgagcccaatccacgaaactcttcgtctcgcgtctgacgcgtttcaagggccttaagaagcgcgaggttgaagccatcaaggattgcgtggaggagatcaacgataccattgaccgtttaactaagtcggtccaagagatgaagctatgtgggagtgccaaaaatcaagaacagtttgcgttccacatgagtaatgctcagacttggactagtgcggctttgaccgatgagaacacttgctcagatggtttctcgggtcgggtcacggatggaaggatcaagaactcggttcgagctagaattgttaacgtgggccacgaaaccagcaacgccttatccttgattaatgcatttgctaaaaagtattaatttataactagttttaagaaatattgtgtcgtatctcaaatatatataatatataaaatggtgtcctaaatgtaatatatgtcgattttgttagatttttttttttcttatgtggtttgtaccactactattcatgtgtattatgagttattccctccttcaaaaaaaaaaaaaaaaagggcggccgc

SEQ ID NO: 1542 - DNA, 652 bp, Brassica napus
  Clone ID: BRANA-23APR03-CLUSTER523_37
atcgcaaaaacctaaatcccctctcttcgcttcccgagaaaaatggcaccaaaggcaggaaagaaacccgcagagaagaagcccgccgccgccgcagcccccgcggcagagaagccggcggaggaggtagccgagaaggccccggcggcagaagaaacccaaggcggggaagaagctgccgaaggaagccatcggggcgacggacaagaagaagaagaggagcaagaagagcatcgagacgtacaagatctacatcttcaaggtgctgaagcaggtccacccggacatcgggatctcgagcaaggccatggggatcatgaacagcttcatcaacgacatcttcgagaagctcgcccaggaggcctcgaagctcgctaggtacaacaagaagcccacgattacctcccgcgagatccagaccgccgtgaggctcgttctccccggtgagctcgctaagcacgccgtcttccgaaggaaccaaggccgtgactaagtttactagctcttgaattgaaagttgtgtgttttaggggtctagatctggttgtgtttttctaatttggttacgaatagttgaagaacatatagactggtgttaaatcgactcttttggaagcaaaacctcaatataacgcgttggttattataaaaa

SEQ ID NO: 1543 - DNA, 798 bp, Brassica napus
  unsure (1)..(798): unsure at all n locations
  Clone ID: BRANA-23APR03-CLUSTER5278_1
acttttgcactcacacgctcccacctaaacctccttctccctccctcgcccttcttcggtgtgcgtcatcgcgttcttcttcatcttttttggtaaatcgtaaatgtgatcgctaaaaatggaggaggagggaggagaaggagggtaacgttctcgcgaaaaagcgacagaagaagaggagaaagaaggagagaggagagatggaaatggcatgaatcttgatgagactgagaagatggaactttgtgattctaaggaacttgacatttttcaaattctcaatcacattgagagttacactctgactgtttctaatccgatggtttcagaaaagaggaagttaatggaacagagtatcaaaattgaagaacatgaactcatgataaagaagcaacaggatgagaaggagcagggggagatcgaggacttgcgtttgcgtgatgcatcaaacgaggacaatacttcccttttgcacaacgctcgctttctgattcagaatcctaacattgaggcttgaggtaataatctaaaacccatataggacgtacttatcagccattactaagaacagattatcttctgccgagtggtttaagatctgattatatatattaccttagaccaacaatatatgtttggttgggaaatttagacttgcacaagctaataacttatatgatgtcttgaagggaacatagaacaatcttatcatgaaccttctcggattaattactccgccaccaacccattcaattttttttacctgagactcagtcatgaggatntaataaattagac

SEQ ID NO: 1544 - DNA, 515 bp, Brassica napus
  unsure (1)..(515): unsure at all n locations
  Clone ID: BRANA-23APR03-CLUSTER5301_1
aggagcatcaaatcaaaaatggcgtcgggatggggaataacggggaacaaagggagatgctacgatttctggatggattttagccaatgcatgtctcactgcagagagcccaaggactgctctcttctccgtgaggattacctcgagtgcctccaccattccaaagagtttcaaagaagaaacaggatctacaaggaggagcaacgtaaactaagggctgcctctaggaaaggtgaacaagttgtggatgctactcatacacatcactagtcaccaatcttcctccaagtttgcttcttcatccccatcccatcccattccagacaagaagaataaatccaagattttgcatcttgtttagagccgaatctcaaaaaacactggtttttttctctttaaatgatgttctgctttcttttttcatgttcatttgtctcaacttttgagttgcaaacataccttgagagacgtatctatactcttttcagacncctgaaaaaaaaaaaaaaaaaagc

SEQ ID NO: 1545 - DNA, 748 bp, Brassica napus
  Clone ID: BRANA-23APR03-CLUSTER53261_1
aaaataaaaggtaaccaagaaaaatgtgtgaagagaaaagagcgagaggaaacaagaatggtttcttcgcttcttatgtcgtttgctccggccaccgtgagggcttacgccacaaccgcaaaaggagcatcaggcggcggcaagaaggatacgctgacccacacacggagagttcgaaaggagagataacaagaatggtttcttcgcttctcatgtcgtttgctccagccaccgtgagagtttacgccacaaccaagggaacttcaggcggcgccaaggaggagaagaatccccttgattttgtgctgggttatttgacaaagcaagatcagttctacgagactgatccaattctcaagaaggtggaggagaaaggcggcaccagaagtggcaccaccggaggcagaggaaccgttcgcggcggtaaaagcacggctccggtacccgtggcgcccaagaagaacgatggtggatttgccggcttaggtggattcttcaacaaaaagtaaaagaaaaacgtatagtaatttgcattgtttattgcctctgttttgcattatctaaaattcatcagacttcaattattatatatataaactgctctttcttcatcacaatccattctgaagactcatgcaccacttagagaaatatgagaataatataaaaaaatttgagtaatgtataaacgaagagcagagcaaaagaattgattcgtatacaaaaaaaaaaaaaaaagggcggccgc

SEQ ID NO: 1546 - DNA, 1259 bp, Brassica napus
  Clone ID: BRANA-23APR03-CLUSTER5346_1
aaaaacggcaaacgaaagcgttgtcgatgcctcgtggttcctctctgtactattattatccatgccgtcgaagcagccttatgatgggtcgagtagatcttgtttttgattctcaatggcggcgactgagcgtccttcttttgagctcgccaaaggtatcaatggcctcgacaaaatcgtcctccgccagtctcgttaccgctccgccgaggtatacttgtatggtggtcatgtgacttcttggaagaatgagaacggtgaagagttgctttacctcagcagcaaggctatattcaagcctccaaaaccaatccgtggagggattccgctatgcttcccacaattcagtaaccttggtacactcgaatcacatggattcgctagaaacaggatctgggaagttgatgctagcccacctcctttgccaacgtattcttctcctaatgctttcgttgacctgatcctgaggccaactgaagacgacctgaagacatggcctcacaattttgagttccggatgagggtggacttgggatctgaaggagaattgacactgacatctcgtatcagcaacacaaacgctgatggaaagccgtttacattcacatttgcttaccatacctatttctctgtctcggacatcagtgaagtacgggttgaaggattggagactctggattatctagacaacttaaagaacagagaacgttttacggaacaaggtgatgctattacttttgaatccgaaactgacaagatctacctgagcactcctacgaagattgctattttggaccacgagaagaagaggacgttcgttgttcgcaaagacgggcttgctgatgccgtggtgtggaatccatgggataagaggtcaaagacgatatcagacttgggagatgaagactataagcatatgctttgtgttgaagctgcagctatcgaaaggccgatcacattgaaaccgggtgaagaatggaaaggaagactcgagctctccgcggttccttcaagttactccagtggacagcttgaccccaagaaagtgctcgagtgatactcctccctttctcgtacagtacgatgaagaaatgagtgaagggtggtgtgaagatgttcatcgtattattatactatagaaagaaactgagtttgaataaaaatatcgatatgtggatgagatgagacttgcactcgttaaagtattttggtttcattatatttaaaggtacatttgaccatcaaaaaaaaaaaaaaaa

SEQ ID NO: 1547 - DNA, 1029 bp, Brassica napus
  Clone ID: BRANA-23APR03-CLUSTER53644_1
ctccttatcttcttctcttcccaccaatcactccctcctcaacttgaacaccaaccaaaactgtttctctttctttgctctaagggaagaaacacaaaaggcagagagagcttcctttcttttgtaagttcctctgattttcaagatgaagatacagtgtgatgtatgtgagaaagctcctgctacactgatatgttgttccgatgaggctgctttgtgcgctagttgcgacgttgaggttcacgcagccaataagctcgctagcaaacaccaacgcctctttcttgactctctctccaccaagttccctccatgcgacatctgccttgagaaggcagctttcatattctgtgttgaggatagagctcttctctgtagagactgcgatgaggccacccatgcgcctaacactcgctctgctaatcaccagaggttcttggctactggaatccgagtcgctctgagttcactagttgcagtcaagaagtggagatgaatcatttcgacccacctaaccagcagatactctctaaaccaacaattcaacagtctgctgctccatctcctccatgggctggcgatgagttcttccgttattctgatcttgagtgcagtaataagaaagagccgcttgatcttggtgagctggactggctggcagagatgggtttctttggggaccagcctgatcaagaagctctaccggcagctgaagttcctgagctctcggtttcacatttgcctcatgttcattcctacaatagacccatgaagtccaatgtttccaacaagaagcccaggcttgagattcggtatgatgatgatgatgatgatgatgaacagcacttccttgtccctgacataggctaaagtcttgatgaaactagataatatatagcatttgcttcgcatatgtacctacacacactcatcttttgcctttgccttgctttctctgtgatctgattcaaaccagtaatatatgtatcggcatgttagtcttaaaaaaaaaaaaaaaagggcggccgc

SEQ ID NO: 1548 - DNA, 1707 bp, Brassica napus
  Clone ID: BRANA-23APR03-CLUSTER53_1
ggcatcacgagggtacccgtaaatcccaccatacaacaaagttctgtgaaagtctcccaaaaactgcaaagagtctcatattagttcttactctcagaaataaaacacactctttctgaaaagattagcgtttcaaaccccgaaatggcccgttgtcatggaagtcttgctattttcttatgcgttcttttgatgctcgcttgctgccaagctttgagtagcaacgtagatgatggatatggtcatgaagatggaagcttcgaaaccgatagtttaatcaagctcaacaacgacgacgacgttcttaccttgaaaagctccgatagacccactaccgaatcatcaactgttagtgtttcgaacttcggagcaaaaggtgatggaaaaaccgatgatactcaggctttcaagaaagcatggaagaaggcatgttcaacaaatggagtgactactttcttgattcctaaagggaagacttatctccttaagtctattagattcagaggcccatgcaaatcattacgtagcttccagatcctaggcactttatcagcttctacaaaacgatcggattacagtaatgacaagaaccactggcttattttggaggacgttaataatctatcaatcgatggcggctcggcggggattgttgatggcaacggaaaaatctggtggcaaaactcatgcaaaatcgacaaatctaagccatgcacaaaagcgccaacggctcttactctctacaacctaaacaatttgaatgtgaagaatctgagagtgagaaatgcacagcagattcagatttcgattgagaaatgcaacagtgttgatgttaagaatgttaagatcactgctcctggcgatagtcccaacacggatggtattcatatcgttgctactaaaaacattcgaatctccaattcagacattgggacaggtgatgattgcatatccattgaggatggatcgcaaaatgttcaaatcaatgatttaacttgcggccccggtcatggcatcagcattggaagcttgggggatgacaattccaaagcttatgtatcgggaattaatgtggatggtgctacgctctctgagactgacaatggagtaagaatcaagacttaccagggagggtcaggaactgctaagaacattaaattccaaaacattcgtatggataatgtcaagaatccgatcataatcgaccagaactactgcgacaaggacaaatgcgaacaacaagaatctgcggttcaagtgaacaatgtcgtgtatcggaacatacaaggtacgagcgcaacggatgtggcgataatgtttaattgcagtgtgaaatatccatgccaaggtattgtgcttgagaatgtgaacatcaaaggaggaaaagcttcttgcaaaaatgtcaatgttaaggataaaggcaccgtttctcctaaatgcccttaattactaagttgattatgtaatatacataaatacgtattatatgtggttatagatgccatctatatccttatctacgtattgattctcgatatatatagaaaactaaggatttatgggaatatacatacaatagttgagataattgttgtcttgtatatggttcactgaagttgattgcttgtccacgaataaatgaataatgtcatttgtctaatattttgttttacttttaaaaaaaaaaaaaaaaagggcggccgctct

SEQ ID NO: 1549 - DNA, 1080 bp, Brassica napus
  Clone ID: BRANA-23APR03-CLUSTER5403_2
aaattaaaaaacaaaaacctctctgttctccccaaaaatggcacacactcaccgtcttgccgtccttctcatcctcctctccgccaccatcggcttctcctccgccgcgttggtcgaagagcagcctctggtgcttaagtaccacaacggcattctcttgaaaggaaacgtcactctcaacctcgtctggtacgggaagttcacctcaatccaacggtcaatcatcgtcgacttcatccgctctctcagctcctccgccgtcccatcaaaaggtccatccgtggcctcgtggtggaagacgacggagaagtacaaaggcggctcgtcgaagatcgtcgtcggtaaacagctcctcctcgagaactaccctctcggaaaatcgttaaagagtccttacctcagagctctctcggggaagctcaacggaggtggtgtccggtcgataaccgtcgttttaacggcgaaggacgtcgccgttgaaggattctgcatgaaccggtgcgggactcatggcgcgaaagcacgttccgttaacagcggagcttatgtctgggtgggaaactctgaaacgcagtgtgctggctactgcgcgtggccgtttcatcagccgatgtacggacctcagtctccgccgttaatcgcccctaacggcgacgtcggagtcgacggaatgatcataaacctcgcgacgctactggttaacaccgtcacgaatccgtttaaaagcggttactttaacggcgggaatcaagaagctgtctcggtatgtaccgggatgttcgggtccggttcctacccgggttacgcgggtcgggtcctcgtagacaagacaaccggggcgagttacaacgccttgggactcgccgggaggaaatatcttttgccagcgatgtgggacccgcagacttcgaagtgtaagactttggtttgactttagacggtctagaaggagacacgtggcaagagatcaatggagatggagagttgaagcttatcggagccaagaaagttgttgtagatatctatcttgtctgattgtacggaggagtttagggaggggagtgggatgtgttttctttt

SEQ ID NO: 1550 - DNA, 1137 bp, Brassica napus
  Clone ID: BRANA-23APR03-CLUSTER5425_1
aaagcgtggcccggtcttgctgctgttcttggtcctccccccctcattggagagagtaagcgagtctcttccgttcttgttcttgttgttccttccccctcattggagagagtaagcgagtctcttccgatcccagagagagagagagaagcgcttgttcttcttcaaagccaggagtctcagcagggtgggcaaagatggtcgcagaacgcttcactgtcgatttggataagccacttgtctttcaggttggtcatcttggggaagaatatcaggaatggattcatcaacctattgtatgtgttagagggtcctcgttttttccagagtgatttctgggagttcttgacccgcactgtttggtgggctatcccaacgatctggcttccagttgtctgctacgttctttcaatctccgcgaggaagggactgacatttccccagatcggtttaatagttgcctttggcgtactcacctggacactgctcgagtacacgcttcatcgtttccttttccatatagacaccaagagttactgggcaaacactgcacactatcttcttcatggatgccatcacaagcacccacaagacggccttcgtcttgttttccctcccaccgcaactgccattctcttggttccattatggaagcttctccacctcatagctactcctgctacagctcctgctatgcttggaggcattttgtttggctatgtgatgtatgatgttactcattactatctgcaccatggtcaacctaaagaaccaacctttaagcatctcaagaaataccacctgaatcatcacttcagaatccaggacaaaggatatgggatcacttcctctctctgggatagagtctttggaacacttcccggtacaaaggctgctcagaagaagctctaaaccggagatttcgttttgcctttctctcagtgtgttaaaaactcacttcttgattcatcatgtgattcaaatgactgttttaactgatgctgtatacgatctatcaccatattttgaacatatctagtggtgtgtgtaccggttttatggtgtggtcatagaaaattgaaatcatactggtttattttctattaaaaaaaaaaaaaaaaaaaaaagggcggccgc

SEQ ID NO: 1551 - DNA, 759 bp, Brassica napus
  Clone ID: BRANA-23APR03-CLUSTER5435_3
atcctctctctcatcagaagaagaagggacgaaagaagaagtatctttgttttcgctctcttctctctcctttcgatctttgacgattagaaaacgaaagtgatggctgcagttaatgggtaccaaggaaacactccggcggcgtcaaagcaatctgctcctctgactaagactgttgatagccaatctgttctcaaaaggctgcaatctgaactaatgggcttgatgatgggtggtgacccggggatatctgctttcccagaggaagacaacatattctgttggaaagggacaataacaggaagcaaagatactgtgtttgaaggaactgagtacagactctcactctctttctccaatgactatcctttcaagcctcctaagatcaagttccacactggttgcttccaccccaatgttgatgtctatggcaatatctgcttggacattcttcaggataaatggtcatctgcttatgatgtgaggacgatactactatcgattcagagccttctgggagaaccgaacatcagctcaccattgaacactcaagctgctcagctctggagcaaccaagaagagtataggaagatggttgagaagctctacaagcctcccagtgcatgatttcatgatatcataatatgattttccagaagaaagaatatgtatttcattttctttctttgtttatcatcaacagttttatctgtaacctttaccttgattacctttgattatcataatatagttttccat

SEQ ID NO: 1552 - DNA, 734 bp, Brassica napus
  Clone ID: BRANA-23APR03-CLUSTER5437_1
atgtgtcttggggtttacctcgtcatcagaccacgtgtattagtgtgtgttttgggcgaaatcgagaaagtgtaggggatcagggaagaagggggcaaaaggggcgttgaaggcgtggaggacgatagattggcaagggatgggtaaggtcctcgtcaccgatgagggtcggatagggttctctaacctccctcgcgctttcgacgaggtcaacacgtagctcccgcccaagtccagccaagagcctgaccctagtcatagggaattcaacagaaagggtataggaactggcattgttgacttgtagatggaagcttatgacagcgttgagatgcccaagtgagtcgaaaatgtgacccctgaatacaagcctaattttgatgctttgtcggtggagcagaaagaagcataaaagaagtcgctcaaggagtgtgaaaggctggagaaagaaatttcagagatccaggagataagcaaaaagctaagcacaatgactgcagatgggttcattaaaaagctcagcacaatgactgcagatgagtactttgagaaacaccagaactctgaggcgtaccccggcctccacacgaagtttgatgacgagatccgtaacgactactggggatactgatcatcatatcttttgtatctccggtctggaaatgaaactctctcctctcttttttcttttgatgtgattttgtgagagtcaatcgtaacataataaggaccac

SEQ ID NO: 1553 - DNA, 1144 bp, Brassica napus
  Clone ID: BRANA-23APR03-CLUSTER54515_1
actgtcttctgtcttcttcttcaaagccgccgtcgcctgattccaccatcatcgagggcgacggagcagctagggtttatcaatcgaccgtgaaccgtttcggtgatactattcgtcgatcttccgatttgtgtttgtttgctgagcttcttttctacactagaagatgggaagcagtccagctccgtttccggatattggcaggaaagccaaagatctcctgaacaaggattacattttcgaccagaagtttactctgacaatgctgagtgccactggaacggaattcgttgggccaggtttgcacactatataaaggtcaaaacaccattgttgatctgaaaatcgacagccactcaagtgtgtcgacgaaagtaactgtcaaaaatctcatgccatctgcaaaagctgttatcagcttcaaattacctgatcacaagtccggcaagctggatgtgcaatacgtcaatcctcatgcgacgctcaattccagcattggcctcaatccaactcctctgcttgatctgtcagcaactatcggaagccagactgttagcctcggtggcgaagttggtttcgacacagcttcctcttcactaaccaagtacaacgccggaattagtttcaacaagccagacttctctgctgctctcatgctggaggataaaggggagagtctaagagctacttacgtacacacggtgaatccaaccacatccgttggcgcagaactgatccgtcgcttcacaaatcatgccaacagtttcaccatcggaagctcatactccgtggatccttttacaacggtgaagacaagactctctaacaatgggaaagcagggatggtggtgcaaagggaatggagacccaagtctctcataactctctcagctgagtatgactcaaaggctgtgaactcttcaccgaaggttggtcttgctctcgctctcaaaccataaaagaaacaagtgctctctcagtttggaatacaatttttttcaccatgcccaaaggaatgtattttgggttattaaatcacttttgcattaatattttgttttctttaatctcattgcgtgatgtgaaagaaaagggagtgataaaaccccatttttggaaaaaaaaaaaaaaaaagggcggccgc

SEQ ID NO: 1554 - DNA, 1218 bp, Brassica napus
  Clone ID: BRANA-23APR03-CLUSTER5468_1
acacatcaagtcccaattcccaacactgtcacaaaagagaatctcgaacaatgaagctcaacgtcttcgtattactcctccttcttctagtctcaaccgcaacatgctgtccgccttcagaccgccgtgcacttctagctttccgtgcagcactccacgagccatacctcggcattttcaactcatggaccggtcaagactgctgccacaactggtacggcgtcagctgcgactcgctcactcaccgagtcgccgacatcaacctccgcggcgagtcagaagaccccatcttcgagcgagctcaccgaaccggctacatgaccggacacatcgctccggcgatatgcgacctcgcgcgtctctccgccatcaccatcgccgattggaaaggtatctccggtgagattcccacctgcatcacacgtctccctttcctccgtacgctcgatctcatcggaaaccaaatctccggcgggataccgaacgacatcggaaggttacaccggttagctgttttaaacgtagcggataaccggatatccggttcaattccaaaatcgttaaccaacctttctagcttaatgcacttagacctccgtaacaacctcatctccggcgtaatcccgccggacttcggccggttaaccatgctcagccgcgcattgctaagcgggaaccggataaccggtcgaattcccgaatcactaacccggatttaccggttagcggacgttgatctctcaggtaaccaactatacggcccgattccagcgtccctaggccgtatggcggttctcgcgacgcttaacctcgacggaaacaaattctccggtgagataccacaaactctgatgacgtcatcggtgatgaacttgaatttgagcaggaacatgttgcaagggaagataccggaagggttcggaccaaggtcttacttcactgtacttgatttgtcttataacaatctcaagggaccaatcccgagatcaatttctggtgcgtcgtttattggtcatttggatcttagccataaccatctctgcgggaggattccggtggggtctccgttcagtcaccttgaagcggcgtcgtttatgtacaacgactgtctttgcggcaaacctttgagggcttgtttgaaaaactgattttatgtaatcttcgtttattagaccttattatattttatgaaaaaaaaaaaaaaaaaagggcggccgc

SEQ ID NO: 1555 - DNA, 875 bp, Brassica napus
  Clone ID: BRANA-23APR03-CLUSTER55140_1
atcatatcacagttccagagactaaagagtgcatcatcatcatggactcgagatcttacgtgttcttctttggtttatcatctctcactctgattggtcctgcttatgatatgggttcttctttgttttgttatctctcgctgtgatttctcttgcttacgatcctgacacacttcaagatctatgcgtcgcagatcgcacttcaggaataaaagtgaacgggttcatttgtaagcctgaatcaaacatcaccgcctcagatttcttctttgcgggcatcagcaaacccgccgtcgttaacaacaccgtcggctccgccgtcacgggagctaacgtagagaagatcgctgggcttaacacgctcggagtctcccttgcgcgtatcgactacgctcccggaggtttaaacccgccgcacacgcaccctcgcgccaccgaagtaatcttcgtgttggaaggcgagcttgacgtcggattcatcacgacggcgaacaagctgttcgctaagacggttaagaaaggagaagtgttcgtcttcccgagaggactcattcattaccagaagaacaacgacaaagcgaaaccagcttcggtgatctcggctttcaacagtcagttaccgggaactcaatctatggccgccacacttttcacggcgtctccggcgattccagatcacgttttaacgacggcatttcaaatcgggacaaaagagattgaaaagataaaatctaaacttgcgccgaagaaaggctaaaattcgaggatcttattataaattgcattgttatatatttttattatttgatttttgaataaagggaaagaaaaagcttattgatcaaaaaaaaaaaaaaaaaaaaaagggcggccgc

SEQ ID NO: 1556 - DNA, 1290 bp, Brassica napus
  Clone ID: BRANA-23APR03-CLUSTER56689_1
atagaagcttttgtttgatgtcttactccacggatcctcagccccaacggcttcctctctctcgctacaaagttcactactcgtgggtatcgtctcctgtgtgcaatagcaatggctcgatctgcggttgatgagacatccgactcgggagcatttcaaagaactgcttccacattccgtaacttcgtctcaagagattctaactctcagtttccagctggaatctggaagataccatctttacatatcgtatgcttgtccatgggcttctagatgcatctcatacttgaagattataggacttgacgatgctataagcttctcgtctgctgttcccccctgtgggggagcaaaagaaagtgatgagcatatgggatgggtcttcccggattcagacaatgaggtcgaaggagctgagcctgaccatcttaatggtgctaagagtgtaagagatctctatgagattgctagtccaaactacaccgggaagtatactgttcctgttctgtgggataagaagctcaagaccgttgtgaacaatgagagcgcagagataatcaggatgttcaacaccgagttcaatcatattgcgagaaaccctgatcttgacctttacccttctcatctccaagctaaaatcgatgaagctaacgaatggatctacagtgggatcaataacggtgtctatcgatgcgggtttgcaaagaaacaagaaccttatgaggaggcagtgcagcaagtgtatgaagcattagatagatgcgaggagattcttggaaagcatcgttacatcttgcggtaacactctgactgaaacagatatcaggttgtttgtgacgcttataagatttgacgaggtttacgcggttcacttcaagtgcaacaagaaactgttaagggagtatccgaatctgttcaactacccgaaatatatatttcaagtccctggtatgagtagccccgtgaccatgaatcacatcaagcagcattactatggaagccccccttctattaacccttttgggatcatccctcatggtccaaacatcgattactcctcgcctcatgatcgacacagattctccaaatgataaaataacaagtcttttgcacttgaaatctgtcttcagaaagtttccaaataaagtttgtctttgtatgctttgagaaaaaaaaaaggttgatgtttatcatgttacagtttgtagtctcagtagttgagacaatgttggtgtgatgataataaataaacttttctcccggctaaaaaaaaaaaaaaagggcggccgc

SEQ ID NO: 1557 - DNA, 691 bp, Brassica napus
  Clone ID: BRANA-23APR03-CLUSTER56868_1
aaaaaatacacacaaaggattcaaacacctacgctgctccgattctgtcaccgccgtctaatctccaattcaacagacctttaccgcaggagcatatacagcggtctcgaagctcacggtccgctgggatgtcagctcaaatgccgctccgtcgacaggttttgcggaccggctgttgatcaatttcgccaggaattgttgaccaacgatgtacgggagtaccgtgaatccgccggcgagaaaaaatccaccgatcctacccccaccaagccttccgtccgtttccacgccgcctatgtacgcggcgctgttaactccacaggggaggtttctgtacgatttcttcttgtatagaccgacgcgacccgatgaaaaactcgatcggacaggctctgttgagttgtttgcggatgttgatgtctctgtcctcgatgaactgctggagacactcaaaaaatatcgtttgaggtccaaagtggatattgagaacgttgcagaggagttctcgtgttggcagcgttatggtaggaatctatctgaatcgtcttctgttggttggggaggtggtgttgatcgtgctggtgaatctacagctagtggtaataagtatggatggcaatggtacgaggatcctaggttggactgtcttggctacagaagcatttttccttctgatgcaaccccgccatta

SEQ ID NO: 1558 - DNA, 1257 bp, Brassica napus
  Clone ID: BRANA-23APR03-CLUSTER57435_1
agctttgagattcaaaattaccataatgtcctcgccggatcgttccgccgtcttccccctcctgatcgacatcgctttatccttcgacggagccatcctcggagtaaccctagccttaggcgccgttcgcgctgctttcaagtacgcctccacctccgccgcgttgaaaaaaatcaaagacgcccccgaagtctccgtttccgatctccgatcactgattcgggcgtccgatgaccaatccgagacgagcgatgatcaggagcgtatcgtggtggttcggggaacggtcaaagctaaggttacaggaggtgaagggagtaacaagaagaagaacaacgtgttgacctctcaggagacgggagataaagctcttatcattcatagatctcaaacttatgtgtatagtggatggaagactttgtttcagttgacaaatggtcaccggtttcttctggaaagatctttgcccaaacaaggagctgacttcatgagaatggtcccctttgttatagtggacaacactcaaccatcgcagtctagctttcttgttgttaacatggatggtgcaaggcagcctctcccgcttaccactgttggtctgattgatgttgagaagatatccaccacctggagagacttaacagctgttggcatctgtagttttaacaacggagttcctgaaatcaaatcctgccaacatcttccttacttcttatcagagatgactaaggacaagatgatattagacctcgcggagactaccagtgtaatattctggggcggtattatcatgggatgtttgtctgctggcatccttggctttgctgctgccagggcctggaatagatggaaacaacggcaccgtgaaagggaacagcaacagagaccagacgagcagagaccagagcaacccatggttgctgatgaaacagaagatgaagatgagattccggatggagcactgtgtgtgatctgtgtgacacgaaggagagttcctgcattcattccctgtggacatgtagtatgctgcagacaatgcgcctcaaccgtggagcgtgaggttaaccctaagtgccctgtttgtctccagagcattagaggatctatgcgcgtgtattactcttgatgaaatgtttaaatctgtctcacttgtgtatttgataaggtaatgctacttgtaaacttaaaagagaatctgaaaatgttataactaacaaaatagtttgatgacaaaaaaaaaaaaaaaagggcggccgc

SEQ ID NO: 1559 - DNA, 1283 bp, Brassica napus
  Clone ID: BRANA-23APR03-CLUSTER57948_1
actgcttctaaggtgcgactcctttgtctctaacgtgtgcctcttcgatctaatcctaatttcttctgttctgtgaatttctaattcaatggaaagccaaaaatgataatcttcacctcgttatcatcactgtttctaagtttttcaaatttggatggatggccaaggaagacatcctccacctcatcatctaaggcatccgattccaattccaattcccgttatgccgccgccgcctccttctgctcagcctcccttcccttccttcaacaacatgctccctccacctcaactcatggagcagaagctcgtcacgcagcacggcgaaatgcagcggctagcgatagagaatcagaggctcgccgctacgcacggcaacctacggcaagagctagcggcggcgcagcacgagctgcagatgctgcattcccagatcgggtcgatcaagtccgagggggagcaaaggatgagcggtttggcggataaagtcgcgaagatggaggccgagctgaggaagtccgaggctttgaagatggagatgcaggaggcgcgtggagaggcgcgtgggttggtggtggcgagggaggagcttatgtctaaagtgcatcagttgactcaggagcttcagaagtctcgtggagaggtgcagcaagttccggctctcatgtctgagcttgatggtttaagacaggagtatcagcagtgcagggcaacgtatgactatgagaagaagttctacaacgaccatatagagtcacttcaggctatggagaagaactacatgactatggctatggaagtacagaaacttcaagcacagttaatgaacggaagagctggtggcgcttatggtaacaacactaatgctgaaaatgacgcttctggccatcagaatggagttggttactatgatgaggcttatggtcaccagggttatgttcctcaaccagcagctggtactgcaactgcaccaaatccagcacttcccacagctcaatacccttatcaaggaggatctcagccaggatacttccctccaagacccggttactacttcccaagaggccctcctcctggttcatatgacccaactaggttacccgcaggaccacagggaggtccgttcccgcctggatcatccaagccttatggctctgctgcagcaactggtccacgcggaaacccgagtcgtagatgaagcgacccaaacagagtacatggggataataaacaaaccatgctcatccctggtgcaatgggggaattgggggggggttgggatt

SEQ ID NO: 1560 - DNA, 483 bp, Brassica napus
  Clone ID: BRANA-23APR03-CLUSTER59558_1
gtgttctagtgtgtgattgtttgttgttgtaactcgttcttcttcttttgttgttctgtgtttgtgtttgttttttctctcacctgaaaatgtcttgctgcggtggtaactgtggttgcggaagctcctgcaagtgcggcaacggctgcggaggctgcaagatgtacccagacttgagctacactgagtcaaccaccaccgagaccttggtcatgggagtggcacctgttaaggctcaatttgagggtgctgaaatgggtgtgcccgctgagaacgatggctgcaaatgtggaccaaactgctcctgcaacccctgcacttgcaagtgaggtgttgggagagcaagcttcaagcagagatagcccttaattaggaataatgataaactattaatgtgtagctaaaaacttatgtattatgtctgtgatggttttcgtgcactctggtgttttgtgttaaacaaacatccttagaataaagtgg

SEQ ID NO: 1561 - DNA, 1425 bp, Brassica napus
  Clone ID: BRANA-23APR03-CLUSTER60374_1
aaaaccccctttataagtatcgtacctcacctcccttctagcagagattctgtgcttgcgagattatcttcgatctgatcgacggcggcggcggaggatcagatccgatttaggatatgactcgccgctgctctcactgcaaccaaaacggacacaactcacgaacatgtccgaatcgtggtgttaagctcttcggtgttcgtctcaccgagggctcgatacgcaaaagtgccagtatgggtaatctcagccaccactcgggttcaggattgagtggactcgtgtcgggctctcccggtgatggccctgaccacgacggttacgcctccgaggattttgttcccggctcatcctctagccgtgagaggaagaaagggaacccatggagggaagaggagcataggatgttcttgttgggtctacagaagctggggaaaggtgattggagaggtatctccaggaactatgtgaagacgaggacgcctactcaagtcgcaagtcatgctcagaagtatttcatcagacagtccaatgtctctcgccgcaagagacgttctagtctctttgatatcattcctgacgaggccactgactctgttccggcggcaccgttgatcctggaaacggaagagtgtgagtcaatgaaatccaccaactctgttggtgttgaggcaccagaagacagcatccaaacgcagctacaaccaccaccgcctggttcattccctgtgctgtatccggcttacttctcaccattctactcattccccttcccggtatggcctgctgcggtatgataccgagcaggtgaaggaggagactcacgagattctcaggccaacagctgtgcactcaaaagctgctccgattaatgttgatcaacttcttggtatgtctaagctcagcctcaaggagtctagcctaaacggtgtatcagaacagtctctttcattgaaactcattggaggttcggtttcaaggcaatcagcgtttcatccaaatccagctagtggtggtggttcggacatgaacaccgtgattcatgctgtctaaagatctgcctgatgggacggtggtctctcagatttgtagccgtatccaagtgattcattgtcattaacatgactatacaacaacaacaatttgcagacaggtgccagggctggtctcttggttatattataaagattgttttagttaggtttgtttgaattgcttagttcagctttgtttattagggtggaaaagaaagaaagaaaaatgttatgggccttcgccttcgttttggtttagcataaacccttgatttcgttcaaagatgtattaaaactacttagcattttaggatttattacaataagtttcttatgaagatatcttattgtgtcaaaaaaaaaaaaaaaaaaaaaaaaaaagggcggccgc

SEQ ID NO: 1562 - DNA, 694 bp, Brassica napus
  unsure (1)..(694): unsure at all n locations
  Clone ID: BRANA-23APR03-CLUSTER60489_1
attgattatacgcttctcgagatctctttttttaatcatcccgcataggaacccaaaagattgaaggaagatgcattacatggatttgtttagnggngctgganacatatttagtcgaccgcgtcctagagcgatgcaggccgcgaacgctatgttacagggcaatctttctttgactccatccaaactctttgttggaggtctctcaccaactactgatgtagatatcttgaaagaagtttttggcaaatttggcaaaatcgttgatgtggtagtggtttcggaccgtgaaactggtgtatcgaagggatttggtttcgtaacatatgattccatcgatgctgctaataaggcaatgcaacagatgaatgatcaggaacttgatgggagaataattggagtgaacccagctgattcaggaggcggtggaggtggttttgcaagaaggggaggctatggtggtggccgtggtggatttggtcgaggtgggtttggtcgtggtggattcggacgtggtggctataactttgttcgttaacttggcatctaggagtgtctacttccaagatttgttagtcttctgtttcattttttcttcacatagaccattttttgtgttataacgttcactgaagctttgaataaacagatgaagcagctatagttggcaaaaaaaaaaaaaaagggcggccgc

SEQ ID NO: 1563 - DNA, 2529 bp, Brassica napus
  Clone ID: BRANA-23APR03-CLUSTER60_1
ccattatcttcctcctctcacgttctcctcttcttcttcgtagtggcggtgactcagtccgatcgagttgactcgctctctctctctctctctgtcttgtttttgataagaagctagctatggaggatgagatagatcgttcccgcgctttcgccaaggacgttaagcgtatcgttgtcaaggttgggacagcagttgttacagggaaaggtggaagattggctcttggccgcttaggagctatctgcgagcagcttgctgaattgaactcggatggttttgaggtcattttggtgtcttctggtgcggttggtcttggtcgtcagaggcttagatacagacaattagtcaacagcagctttgcagaccttcagaagccacagactgaacttgatgggaaggcttgtgctggtgttggacagagcagtctcatggcttactatgagactatgtttgaccagatggatgtgacggtggctcaaatgctggtgactgatagcagtttcagagataaggatttcaggaagcaacttagtgagacagtcaaagctatgatgaaaatgagagttattccagttttcaacgagaatgatgctataagcactcgaaaagccccttacaaggattctactggtatattttgggataatgacagcttagctgctctactggcgcttgagctgaaagctgatcttttgattcttcttagtgacgttgagggtctttacactggtcctccaagcgatcctaagtcaaagttaatccacacatacgttaaagagaaacaccaggaagagattacctttggcgagaagtccagattaggacgaggtggtatgactgcaaaagttaaagctgctgttaatgcagcttatggtggcattcctgttatcataaccagtgggtatgcagctgagaatatagctaaagttcttaaaggactgcgtgttggtaccttgttccaccaagatgcacatttgtgggctagagtcgtagatactacttctcgtgacatggcagttgctgcaagggaaagttctagaaagcttcaggctttgtcttcagaagataggaaaaacattctactagatatagccaacgctctagaagcaaatgagaaaataattaaggctgagaatgatttagatgttgctgcagcacaagaagctggatatgaagagtctttggtagctcgtttagttatgaagcctggaaagatctcaagccttgcagcttctattcgccagctagctgaaatggaagacccaattggtcgtgttctaaagaaaactgaggttgcagatggtcttattttagagaaaacctcatcaccattaggtgttcttctgattgtttttgaatcccgtcctgatgcacttgttcagatagcttcacttgcaatcaggagtggaaatggtcttctgctgaagggtggaaaagaggctcgtcgatcaaatgctatcttacacaaggtgatcactgatgcaattccgaagactgttggaggtaaactcataggacttgtgacttcgagagatgagattcctgatttgctcaagcttgatgatgttattgatcttgtgatcccaagaggcagcaacaagcttgtttctcagataaaaaactcaacgaaaatcccagtgctagggcatgcggatggtatctgtcatgtgtatgttgacaagtcttgtaaagtagacatggcaaaacgtgttgtttcagatgcaaagttagactatccagcagcctgtaacgctatggaaacccttcttgtacataaggatctagagcagaatggtgtgctaaacgagcttatatatgccctgcaagccaatggtgtcactttgtatggtgggccaaaagcaagtggtaaactgaacattccggaagtaaaatcatttcatcacgagtacagttccaaggcctgcaccgttgaaattgtagaagacgtacacggtgctatagatcatattcaccaacacgggagtgcacacactgattgcatagtgacagaagatagtgaagtggcagagatcttcctccgccaagtggacagtgctgctgttatccacaatgcaagcacaagattctgtgatggttttcgatttggacttggtgctgaggtgggaataagcacaagcaggatccatgcccgtggtccagttggagtagaaggattattgacaacgagatggataatgagaggaaaaggacaagtggtggatggagacaatggagtcgcttacactcataaggaccttcctgtcttagaaaggacaaaggcagtgcagaacgggcattagttctatctatgctaatgtcatattatattttactcttttcttatgattgaagtttattttttttctcgtttactaggatatagtgttgtggatttgcaataagtggtcttttgataatagtaaagtgtgtattagccttttcgtcatgtcaaaaagaaactcgttataagccaatgtaacctttctatttctctcaatcgcaaaaaaaaaaaaaaaaaaaaaaaaa

SEQ ID NO: 1564 - DNA, 569 bp, Brassica napus
  Clone ID: BRANA-23APR03-CLUSTER67487_2
gaaggaagaaactcatctcttgagaatctgaaaagccagagaagaactcaaaagatcttgaggatcagaaatttataatctcgaaatctgcggcagatgaacagagtgattaatcagttgtcgggaaagttaatgaaggacaagtgtgttaccggaagtggcggcggtgcagtaaaagaatcggcgtcgccccagagtccagtcgcgacatcttcagcagtgaggaggctgaacggcgatctggagacgaggcgatttggaggggcggctagcgagagactgaggcaggcggaggagtctctgaggacggttatgtttctgagctgttggggagcttgctagatctggtggtttatatcaaaacacgttcctctttctgctttgattttgagtttttattttctttgtttattttgaagatgttcgctgtgaatatttttaatctttgtgtagctgtttgagtttctgtaaatcaatgtacaaaaacgaaaagttgtgttgaagaaaatggttttgtctctccccaaaaaaaaaaaaaaaaaaaaaaaaaaaaaaaaaagggcggccgc

SEQ ID NO: 1565 - DNA, 1591 bp, Brassica napus
  unsure (1)..(1591): unsure at all n locations
  Clone ID: BRANA-23APR03-CLUSTER675_1
ggggtgggttttcttaaactgtagtgacgtccatgaataagtagtaaaggtaccaaactcatacttttncgttacacgaatataatatcataatagaaaactcaaaaacaaaataaaatttaaataacgaagctctcttccctccaaatcgtagctgcaagcagtgccttgtattttttggtataaaccatccaactcgcaatggctgctgctacttgcatctgcttgtgctcaagctgaggttgttttggtggtggttgtagccatggaggagccttccttctggtcaccaaagacacggtgccgggaggcgccgcccttggcggggagtccctggcgtagggcctccctcggtgcccctccggtttgctcggtggccggtgggacgcctccctggctcgtgggtccgcctcctgccgtgtttggtctgaactctatgcttgcgtttggatcaatcgtctcttgaaccaccttagcgagctcgagcatggtgaattcaccagggttacccaggttaaatggcccgacatgttctccttccatcaatctcatcagaccttcgaccaggtcagaaacaaactggaaacttcgtgtctgcttcccatcaccataaacagtcaaaggttctttccttagtgcctgcgcaacgaagttgctgacaacacgcccatcatcaatacacattcttggaccataggtgttgaagatcctagcaatcctgacctcaacgttggctccacggtgatagtccatggcaagcgtctctgccgtacgctttccttcgtcgtagcaactacggacacctgtttcagaccattacaaccacagtcagtcatcaaccaaagcacaaggaggatcaccgtaaacctcactagtactcgtcaggagaaacctagcaccgactctcttcgccaaaccaagcatgttcaacgtcccaaccacattcgtcttgatagtcttgacgggattgaacttgtagtgaacaggggaagcagggcaagccaaatgatagatctgatccacctcaagaagaatcggctccaccacatcgtgtcgtatgagttcgaagttagggttaccgaaatgatgcatcacgttctctttactccccgtgaagaaattgtcaacgacgatcaccgtgtctcccttcgccatcaaccgatccaccagatgcgatcccacgaaaccggcaccgccggttaccaccactctcagccctttgcgtttcagcccgagcgggattttcccgccggttgctcccatccggttcaggtactcgaggctgggcttcctctgggcctggaaggccggaaggcccggaacgtgcgactcctcctcggatctcattccgtagccggagaagggatccgagtaaggggtggattgtgtggagcgtgggaagattgtgaaaacgaccgtcgcgatcgcaatgccgacgaggacgaagaggagcctctgctcgcggagcatgtaacgcatcggacgtgccacggagaaccacggtttgatcggtttcgggtagtacgcatcggaggctggttggtccgcctcgcccacgcgtccggtttatcagctcgctcgccaatctctc

SEQ ID NO: 1566 - DNA, 1101 bp, Brassica napus
  Clone ID: BRANA-23APR03-CLUSTER692_1
atcacagcagaagaagaacaaacaacaattgaagaagaaaagctcatcacagcagaagaagaacaagcaacaattgaagaagaaaagcaccaagattttagattcttctcctccttgcgatgtcgaggtctgccgagtgttgggagttttccggcgagaggaagaggttgctcgagaagaagccgagcttctcgcagacatgtagtcggttgagtcggtatctgaaggagaagggtagcttcggagatctgagcttggggatgacttgcaatgtcgcaggagtttttggtgtgacacgtcagcagccgacgatgatgaatctcttccctgttgaagattcttcggacgtaaaacagaagaacgatgtgtttcctcggcaatcaagcttctcttcctcctcttcctctggagccaaggaagaagttgagaagatcacagagaatgaatcagtgaaggtggagtctcaatcttctgctccgttgactatattctacggtggtcaagttatggtgtttgatgattttcctgctgagaaagccaagcaagtcattgacttggctcacaagttccagttcctagtcctgtgaaaacagcagcaccagagcctatccagacccacaagtcctctttagcttgcgaactcccaattgctagaagagcttcacttcatcgtttccttgagaagagaaaggataggatttcgtcaaaggcaccgtaccagatagacggttcaaccgaagcatcttccaagcctaacacagcttggctcggttcccagtaaatctctctgaaagatccttttgttgatgctcccatcgttttactaatatatactgatttttcactcctagtgggtttgtttgttcaatgcgccgaaaaaaactcagtatatcagtatgaaactaatccttatagttttgctattttttgggtttaaagccattgtgttatatagaccttttacctctgctgttctcagatcattggcttgcaacttttgtaagaaacatcagtttcttgtttttttttggttgttgttgttgacggcaccttattaatatcatctttactttaattaaaaaaaaaaaaaaagggcggccg

SEQ ID NO: 1567 - DNA, 586 bp, Brassica napus
  Clone ID: BRANA-23APR03-CLUSTER70445_1
acaaataggtattccgcatatcaaatataaaaacaatcttaaatatcttttttgcttaagaaaataagaagaaaaaacgagccatgggtaaatgtattttggtatcctctgtcgttattgtttctctcttttctattgcatatgcaacttctggaatcggaactttctacacaacttacactccatcggcatgttacaaagatacgccagaaggagtgatgatagctgcagcgagtgatacattatgggacaatggtcgagtttgtggcaaaatgttccatgtgacatgcaccggacctcgtaaccccgtgcctcatccctgtaccggtaaaactgtgacagttaaaatcgttgaccattgtcccgctggctgtgcttctactatcgatctctcctttgaagctttttctcagatcgctaatcctgtcgctgggatcattaacattgattatacgccggcctaaatgtcgatggagttctcaaggaaaataatgctcggatctagaaaaccgtaataagtattgtattgccattagagatttgtaattgtattcaaaatactaataaaatccccgagtttcatgca

SEQ ID NO: 1568 - DNA, 799 bp, Brassica napus
  Clone ID: BRANA-23APR03-CLUSTER7081_1
gccttccaaaaaataaatatctttcttcttgaagacattatccaacatccaattattggttgcattaggagaagccaaattttctttgtgtctctaagctgtgtatcgagctacatctccttcattgccttccctatcaaccagttctctaatgcttcaatgctccctccatacaatctaccagaacttctcaggtgttaagaaaacccttgagtttccagcctatctcctttggatgttttcagtcttcaaagaaccttcgtcttcagatcagttgcgcagcaaaaccagagacggtgcagaaagtgagtgacattgtcagggaacaattagctttgtctgctgacactgcgctcactgccgagtccaagttctctgctcttggcgcggattctctcgacaccgtggagatagtgatggctttggaggaaaagtttaacataagtgtggaagaagcagatgcttagaacattactacaatacaagagtgagctgatttgattgcttgttccatacgaaaattccagaggcggctgatttgattgaggatcttgttcagaagaaacctgcgggctaagcttcttaaactctcccggctttcttttcctttagacctttcttggtttgagaacatttaattagaccgtatgtcattttgtttttcttcttctggaagttgagaatggatattgtctatgagaaaactttgattggtacgttgagattgattcattggcaaagattggttttttatgaagtatgaaaaaaaaaaaaaaaaaaaaaaaaaaagggcggccgc

SEQ ID NO: 1569 - DNA, 1332 bp, Brassica napus
  unsure (1)..(1332): unsure at all n locations
  Clone ID: BRANA-23APR03-CLUSTER7131_1
gtactcagaagcaaccactcaaaatcacaatgaagctccttcttcacctctctatcttcttcaccatactcttcatctctctcccatcttctcacagctcctcctcaaatgacaagaatgccctcctccaaatcaagaaagccttaaacaaccctccactcctctcctcctggaacccccaaaccgacttctgcaccacctggaccggcgtcgagtgcaccaacggccgcgtcaccgctctcaccatctcctccggtgaaatatccggccagatcccggcccaggtcggcgaccttcttgagctccgtacgcttgatttcagttacctaactcacctcactgggaacattccacacaccatcaccaagctcaagtacctggacctcctccggttaaagcagaccaatctctccgattatattcctgatttcatcagcgagctcaagagcgttacgtttttagacctttcgtttaaccagttcaccggtccaattcccggttcgctttctcagatgccgaagctagatgccattcagatcaacgacaataagttaaccggttctataccgaactctttcggttcttttgttggcaaggttcctaatctctacttgtttaacaataagctctcaggaaaagtaccagaatcgttgtcaaagtacgactttaacgcagtggatctgtcgggaaacagtttcaccggagatggttcgatgttcttcggacgtaacaaaacaacaatacgtgttgatctgtcgagaaacatgtttgagttcgatctctccaaggttaagttcgctaggagcatagtgtcgttggatctgagccataacaaaatcttcgggaagtttcctagagagctaaacaagctgcgtctcgagcatttcaacgttagttacaatcatctctgcggaaaaatcccaagtggtggtctccttcagacatttgaaccatctgctttctctcacaatctctgtctctgtgggaccccgcttaaggcttgttgatttggtttaatggcgtaagaagaaataagtagtatgtctttatctgtatgatgatnatgtgttaattatcacnccgcgtatcaagtgaattgttntatttaataaaattaatgctaagagtttggtaaaaaaaaaaagctatggatcgaagtatttcgtgggaaccttaaagagattgatggatgttaaagataagtgtgatcctgataatttctttaggcatgagcatagtagtcctcctgttcgagcaatgtacaattattattattgtccaaataatttgttaagcatgtaaacaccctcacgagaagaaccctatcccagt

SEQ ID NO: 1570 - DNA, 1025 bp, Brassica napus
  Clone ID: BRANA-23APR03-CLUSTER717_1
ttgcggaggtggaggcggcgagtggacggccgtcgcggcggaggctcggaaggcaagtcttgatcttccaccaaaactctatctcccaatggcttaatcgaagtatacttaggagcaaccacagaagcagctctgacaaccaaagaacggaactggctctgcttaagggtgcctggtttcaaagttccaaacttggcactcgaagctctgagtgaggctaagctcctagctgacacagtcactggtgatgctgtaagttgagtcgccgccatttctgctgtgattcaattactattgagcgaacccaatgactttcgccgcaagaagggccaacaatatcatcttccttgagaatgagatgcttcacatcgttgaactccacctcagttcctgcgtatttggagtaaataatttgtgctccagtagggacattgatgtcgattttgttcttcccaatagttcttccttcacccacagcaacgacttcacctccttgaggttttgattgagctgtggatggaagtaagatacctcccatagtcttctcctctgcctccttgatcttcaccaaaactctatctcccaatggcttaattgaagtatacttaggagcaaccacagaagcagctctgacaaccaaagaacggaactggctctgcttaagggtgcctggtttcaaagttccaaactttgcactcgaagctctgagtgaggctaagctcctagctgacacagtcactggtgatgctgtaagttgtgtcgccgccatttcttgaggataagaatatgacttgggagggtaaaaccctacgaaatgaagaagagacagaagagatacaagaaggactctaactatactcttgagacgctctccctccgacgttcagacctttatgttcaattctcgttggtaacaatgtgaagagagtgtaagaaagtgatgagaagagatcttcgtaccttgaggataagaaaaggttgtgactttggaggataaaaccctaagaggaagttgcagaagagat

SEQ ID NO: 1571 - DNA, 1288 bp, Brassica napus
  Clone ID: BRANA-23APR03-CLUSTER7272_1
aaaaacccatcaaaaacctaacctgataggtagagagaaaacttggacgctcccctcccccgaatctcgatctgagtttgcctttgcctataatctccttcctccttcctccttcaatccctaacttaattgcggcataggttatttgagattaggactcacccggatcgaatcatccgccatgtctgccgtatattgcggaagtaagagatcgtacttcgacgatactccttctcctcctccctcttcgaagcggttccgatgctattccccttccaattctccgagctggtcctcctctcctccctcatcgctcgatcagcttcgcgctgcctttcctcatcttgaactcaccgttcttgtggaggcgttggaagaacatgggagtgatttgaatgctgctatgaaaagcttgtacgctttggtatcagctgctgaggaggagaagagagctcaagaattggccgctaataaggaggctgatgcttttacagcgagtggtgatgactgggttgcgttgttagtgagggaagttacgcaatctagtggtcaagatgatgccaagttccgtgctgaaagagtcttggaggctttagagaagacgttaagagcacgtgctcacgaagaagccggtaaaaaattccaagaggagagtgtggcagtgcagcaacaagtggaagccttgatgaaagacaacacagtgctgaaacgtgctgttgctatacagcatgagcggcagaaggcgttagaagatgcgaaccaggcagctagagttttttaagcagctgattcctcagtaccaggagaaggtcagaaatttggaggtgaacaactacgcattgaaattgcaactggagcaaatggaacacggcagctctatgatgccgcaaagattcaatccggatgtcttctaaagagaaacaagtagggcagttgggggaggagaaggactatctatcaatataaacgcaacaagtagaggagagatgatcaacagaagagaaatgcttttgcattgtatttgctgtgtagagtccccaagtcgagtcagaaaaacataatgtttcctttccttgtcttttttatttattatactttggtgatgcttgtctaatcctgagggaatatcaagaatttgtgtgggtatagggctggtataagtaaactttggttctgaattttttttgttggtctctctacctttcgtcttcaccattctttgtaaattccgatcattcgataattgcccgatttcactcagtaaaaaaaaaaaaaaaagggcggccgc

SEQ ID NO: 1572 - DNA, 1273 bp, Brassica napus
  unsure (1)..(1273): unsure at all n locations
  Clone ID: BRANA-23APR03-CLUSTER7298_1
aaaaaccttcgacagtgtcggaaccttccagaaaaaaccacactcttcgtctccatcctctatatctcacctcactgtcaactcatcttcctcattcttcatcttacaatctttcaatcagaaaatggcggatcatgaccaaggcgccgtgactctctacagcggcacagccatcaccgacgccgccaagaaaaaccatcccttctccgtcaaagtcggcttagctcaagtcctccgcggcggcgccgtcgttgaagtctcctccgtaaaccaagccaagatcgccgagtccgccggcgcatgcgccgtcctcatctcggatccgccccgatccccagccaccgccggcgtccagcgcatgccggatccagccctcgtcaaagaagtgaaacgcgcggtgtccgtccccgtgatggcacgcgcgcgcgtcggtcatttcgtggaagctcagatcctggagcatctcgccgttgactacatcgacgagagcgagatcatctcggttgcagacgaaggtaacttcatcaacaagcataacttccgatctccgttcatatgcgggtgccgcgacaccggtgaggccttgaggaggatcagagaaggagccgcgatgattcggatccaaggagatgttacaagaacagggaacgttgcggagactgtgaggaacgttaggagagtgatgggtgacgttagggttctgaacaacatggatgacgatgaggttttcgcgtttgcgaagaagttgtctgcgccgtacgatctcgtggcgcagacgaagcagatggggagggttcctgttgttcagttcgcgtctggtgggatcacgactcctgctgatgcggcgttgatgatgcagttggggtgtgatggggtttttgtcggttcggaggtttttgatggggcggatccgtttaagagagtgaggagtattgttcaggctgttcagcattataatgatcctcatgtgttggctgagatgagttctgggttggagagtgcgatggagagcttgagtgtgagtggtgataggattcaaggaagtgtttgatgaaaaggttaaaaggttgggaacgtgttggagtttgaaaaaagttgtaatgttttctgttttgtcttgatatatcgtttgtgtttgtgttaattctggtgcaaaatgatgttttgttttgtttaatccnagctttgaaagatgatgttaattgttattacccnaattataaacagactntattattagatcgctttggtnaggccaaaaaaaaaaaaaaaa

SEQ ID NO: 1573 - DNA, 1556 bp, Brassica napus
  Clone ID: BRANA-23APR03-CLUSTER72997_1
aagatgtttatggaacgtgaagaatcgtagaaagagggagagaaagaagttgagtgtcctataaagcgtgaatcaaaaccgctttaaccatctctctctcgtctcggaggatctaaaacctgcatttgatttcattccaccgacggagtcatctggatctgaatcaggtttgactaaagagatggcggcggagaacgagcagcagcgaaagtcttcatcggtctccgacatgggagcttgggcaatgaatgtgatcagctccgttgggatcatcatggccaataagcagctcatgtcttcctctggtttctccttcagcttcgcaaccactctcaccggattccacttcgctctaaccgcattggttggtttcgtctcaaacgcgacggggctctccgcatccaaacacgtccctctctgggagctctctccattgtcgcccatgtctctagtctccacagccatttcaaacttcagcctcatgccgtcgtccgtcggcttttctcgaatctcgaagctgagcatgatccctgtcgtctgcgtcatggagtggatcctccacagcaaacgctactccagagaagtgaaagtggccgttgtggttgttgttgttggtgttgggatttgcactgtcactgatgtcaaagttaacgccaaaggctttatatgcgcgtgcgtcgccattttctcctcgtctttgcagcagattttaataggttccttgcagaagaaatattcgattggatctttcgagttgttgagtaaaacagcgccgattcaagcgctttcgctgctcgttgctggtccttttgttgattatctcctcagtggaaagttcatattgaactacaatatgtcttctggctgctttgtattcatccttctctcatgtgccttagctgtgttctgcaacataagccagtacctttgcattcggcgattttcagcagtatcgttccaggttataggtcacatgaagactgtgtgtatcttgacactggggtggctcctgtttgattctgcaatgacttccaaaaacgtgtcggcatgttcgttgcgattgttgggatggtgatctatagctgggccatgagttggagaaacggtctaatctgcggcaaaggctttgaacagtgtgaaacacagcttgactgaagaagagtttcaacttttgaaggaaggtgtagaaactacacagcccaaagatgttgaacttggcggttacacaaaagcttagtaagagatggatagtaaaacatagttttctggtacactttcttctgtgttaatgttaaagttgtattgttttgtgttatttaaaaccaaagggtggtggtcgaataaaagcaaagatcaaatcctcccataaaggatcataggagattagttctacgcttcgaacctatggctctttcttataaaaaacatgttttgtgttatttatatatttacccaattccatggaaattaacttcattcgtcacatgttattgtcttacagaacactcaaagaatttattcttttttaaaaaaaaaaaaaaaaaaagggcggccgc

SEQ ID NO: 1574 - DNA, 1749 bp, Brassica napus
  Clone ID: BRANA-23APR03-CLUSTER72_1
tctctccctctctctcgtcttcctccttcaaaaaaaactgaactctttttttctctctgttttttctagagagagagagagagattggaatgcgttaaaatttctctttagttttcaagttttctcgatttggatctctgagctagcttacagatttttggagaaagagacaattgttgttaagtgtggaaacgttaagaccatgggaaaaagcgaggaaccaaaggttaccaaatcagacaacaaaccatcttcaccacctgcggtattttttttttttttttttttttattaatttcagaccataactctcaagtcaatagtgttcttgtaatagagtcaaaaccagtgttatcttgatgtgttgacaggatcaaacaaatgttcatgtctaccctgattgggccgctatgcaggcttattatgggccaagagtagcaatacctccttattacaactcagctatggctgctgcatctggtcatcctcctcctccttacatgtggaatcctcagcatatgatgtcaccatatggaacaccgtatgcagcggtttaccctcatggaggaggagtctacgctcatcctggattccccatgcctcaaagtcaaaagggtgctgctttatcaactccggggacgccattgaacatagacactcctagtaaatcaacaggaaacacagagaatgggctgatgaagaagctgaaagagtttgatggacttgctatgtctctaggaaatggtaataatggtgatgaaggtaaacgctcacggaacagctcagaaacggatggttctagtgatggaagtgacgggaataccactggggctgatgaaccgaaacttaagagaaggcgagaaggaactccaaccaaagatgaggagaaacatttggttcagtcaagctcatttcggtctgtttctcagtcaagtggtgataacgttgtaaagcatagtgttcaaggaggaggtggagctatagtctctgctgctggtgtaagtgcaaattcaaacccaaccttcatgtcacaatctttagccatggttcctcctgaaacttggcttcagaacgagagagagctgaaacgggagagaaggaaacagtctaatagagaatctgcaagaaggtcaagattaaggaaacaggctgagactgaagaactggctaggaaagttgaagccttgacagcagaaaacatggcgttaagatctgagctaaaccaacttaatgagaaatctaataatctaagaggagctaatgcaaccttactggacaagctgaaaagttcagaacctgaaaagagagttaagagctcaggaaatggagacgacaagaacaagaagcaaggagacaatgagactaactctaccagcaaactgcatcaactgcttgataccaagcctcgagctgacggtgtagctgctcgctaatcataacactcttgtgtgtcgacttctacttaatttgtcgacagaaacaaagaaaaacaagtgtatgctaattccagaaaacttgttagatagtatagaagagatggagatggagatggagatgatttgatcttatatatatagattttccagagaggggtgattgttaatatggagaggctctatttttatatatggcttcctttgttgcattcagtattgacctcatgagtgtagtgtatgtatgagagacatctctcagatcggtgtttgttgctttgcttggataagaaaatcaataacaaacattttctac

SEQ ID NO: 1575 - DNA, 1552 bp, Brassica napus
  unsure (1)..(1552): unsure at all n locations
  Clone ID: BRANA-23APR03-CLUSTER7305_1
aaaaaaatatcttcttctcagtctctcaaccatccccgtcgtaaaccaatagcgagccagaggataaccccatggcgtccagctccttcgccgtccttcctctgcttaactataatagctccacgaccaatagatcttcatcttcgattcgcttcttcaacctccccaaatcgaaacaccggtctacaaaacacttattaaaccctcgttctccacaggttcttgtctccttgtcattgaaccaaccaactgatgacgaatcctcagacgccgcgcttttcctcgaatccaactcaatcgctgattacatgcggttcaagcgccgctccgacgacggcgacaacggctctagcgagctgcagactgcgatcgtcagctacaagaaacgtttcccttggattctcctaaacccttttcttcaggtagatttggtctcaacgattcatattgctgataaagagtacttcacagctcttccaaaagagcttgaaccatatgatgtatgagatggtgacatgtaaagagtctttggaaaacagaagaaacccaattgctgccaagaggctcaagacttcacgttcaagaggcttcagtatcctcggcttgatccagcggcagatggctagggtgctagctcttgattttcagctagactgtctaaattacgaagctaagaactggtaccatgctgacctcgatttcgagacattcaccttgcttcagaaggagaaaggggaaagcttctactcatttgcaagggacatgacgattagatcaacgaaagcaatgatacagccagctttggtaaccgaaggtcttgatacttggaggtcaaagcttctatgggtttcacgtgtcttccccatgcctcttgtgggtcttttccttattgtggctttctgtgctgacttcgagaatcagacggaagactatccagagctagaagcactctcacggcttgatattggtgctgctatgaaggtcttcctcgctaagagattaacatccgagctaacgcaagggacatcagagatagaggagaaatctgtgatcatcggcgagagaaaccgagcagcgaccgaagctttgaaaagagcaatagagcaaggaagcaaaagagttgntattctttacggaggaggacncatgcctgacttggggagacggcttagagaagagtttgatcttgttccttntgaggtgagatgggtaacagcttggtctatcagtaacccaggggacatggagacgacttngtttccgtttntgaggncaatggctgatgctttgcgttggccgntgaaccggtaccagaccttggcgttgctacttttttcgtcggttcttgcattggatctctgcttttgggagcttttcttggattctaccattgactggggttcacagatagcagcagagttgtacaagtttgtagataacacaaagcttgtgtgacagctatttgtaattcacacaatgatgtacaaacaataacttatagtatttaaacaagctaagtcttctntgatacgttccaaaaaaaaaaaaaaaa

SEQ ID NO: 1576 - DNA, 844 bp, Brassica napus
  unsure (1)..(844): unsure at all n locations
  Clone ID: BRANA-23APR03-CLUSTER734_6
accaccgccgaacgcaaccaacaagatgggacgaagaccagcgagatgctaccgccagatcaagggtaaaccctacccgaaatcgcgctactgcngtggtgtacccgaccccaagatccgaatctacgacgtcgggatgaagaagaagggagtcgacgagttccctttctgcgtccacctcgtctcctgggagaaggagaacgtctccagcgaggccctcgaggctgcgcgtatcgcctgcaacaagtacatggtgaaatcagctggaaaaggattagggttcaccctttccatgtgctgaggatcaacaagatgctttcgtgcgccggggctgataggctccagactggtatgagaggtgcgtttggtaaggccttggggacttgcgctagggttgcgattgggcaggtgcttttgtctgtgaggtgtaaggataaccatggggctcatgctcaggaggcgcttaggagggctaagtttaagttccctggtcgtcaaaagatcattgttagcaggaaatgggggttcactaagttcaaccgtgctgactacaccaggatgaggcagtctaagaggattgttcccgacggtgtcaatgctaagttcctgtcgaaccatggtcctttggccaaacgtcaacctggaagcgccttcatttcagccaccgaatgaagatgatatttggttttggaacctatcatctagtttctcaaatctttttgttttgtttttgttgtatcaaggatcctcctcgtatggtttcgttttgctatgacaattgctttaagttcaattatggatgtttttttaaaaaaaaaaaaaaaaaaaaaaaaagggcggccgc

SEQ ID NO: 1577 - DNA, 933 bp, Brassica napus
  Clone ID: BRANA-23APR03-CLUSTER73853_1
gagcttctcttctctgtttgagtcgtgacctgacctgagtttcgaagcgggcgccgtgtatcgtaagagtagttatggagtccatggaagctcaatctccagccgatctccttctcgtactagtacagcaattgcatttctacctggccgtggaccgtccccaattcaaaatggagacggtggtggagttactaggagtgctaggtcgtcgtccatggcttcccattgtagtctgttgcagctctcgcgatgagctcgacgccgtctgctcttccttatccactctcccttccatctcctttgctgctttgtacagtgatctgggagagagagaacgagcttcggttttagataaattccgacaagcaacaatcagctggaaccagcaccttaactctgcagtactagtagaagaaggtttggaagagagtgaaaccggagaagaagaagatgaaaagaaatctcatttggtggttgtgactgatgtttgtcttccgatgctttcatctggagagtctcctctttcctcacgagttctcatcaactacgagcttcctactaagaaggaaacttatacaaggcgtttaacatcttgcttagcttcaggtgggattgttataaacatggttgttggaggtgaagtaaccactctcaaaagccttgaagagagcagcggcattatcatcgcagagatgcccatcaatatttctgagatcttataacaatgcatggttcctacgatctgaaggactgtctatttgttcatgacttttctagagacatcaatattttgtgctgatacacataagctgcctgtctctctgctgcacttttagctattggcttgatcacttttgtccattttgacagttttattcatctcggaagaatttttcttttttagaacaaaaaaaaacggacgcgtgggtcgac

SEQ ID NO: 1578 - DNA, 973 bp, Brassica napus
  Clone ID: BRANA-23APR03-CLUSTER73874_1
accaagtccaattcctcaactttgctaaacttacaagagcttctctccaaaaatggatggtaagaaaacacaaggacaagggtatctgaaaaagaaggctagtgtgtcttaccttgtggaagaagaattggagaatgatacagatggagaggaggaagagaagaggaaaggtgtgaccgataggtttaaaggatctagcggcagcaatgatcgtggctcatcacggctttgccaagtagatagatgcacagctgatctgaaagaagctaaacagtatcaccggaggcacaaagtgtgtgaagttcatgcaaaggcatcttctgtctatctcacaggcgttaaacaacggttctgtcaacaatgcagcaggttccatgagctcctagagtttgatgaagctaaaaaaagttgccggaagcgcttagctggacacaacgagaggcggaggaagagctccggtgaaagtattggagaagggtcaggtggtcgaagaggaataacagctcagatgatccagaatcaagaaagatcaagggtagagatgacacttcctatgtcaaacacatcattcaagcgaccacagattaaatagagaagctgtctgctctctctcttctgtcattataaaattctcttagaatctgaaattgtggtatccatcaatgtcaaaaaagaaacagctgagtcatggtattgactcctcctggtatagataaataactaataaatacccctcttctatctatgtatcgttggggggttacctatccccaaatgctaagactttggcttaaccttgagtcgaaataagtctactgtgtcatgtatgttttcgaaaatgtatgatgtgttcccctaattggtaaaaggttttccataaaaaaaaaaaaaaaaaaaaaaaaaaaaaaaaaaaaaaaaaaaaaaaaaaaaaaaaaaaaaaaaaaaaaaaaaaaaaaaaaaaaagggcggccgc

SEQ ID NO: 1579 - DNA, 998 bp, Brassica napus
  Clone ID: BRANA-23APR03-CLUSTER7411_1
aaccctttacgctgtcccgagaaagacactctctcttctcttcctcttttcttttacaagctctctcattctctactctgtctttttttgttctctctcaatcataacaatccttttttttttgaggaagagatgggaaactgtcaggcggttgatgcggcggcgttagttctacaacatcccgacggaaaaatcgatagatattacggtcctgtctcagtcgccgaaatcatgcgtatgcatcctggtcactacgtttctcttattattcctttgccggaggcagacattccggcaaagacgacggcgaaggaagaagatggtaagagtcagaaaagggtggtgaagttcacgcgcgtgaaacttctccgaccaacagagaatctcgtactcggtcatgcttaccgtctcatcacttcacaagaggttatgaaagttataagagcgaagaagtatgcgaagacaaagaagcatcagaatgaaacgacgactagagagaagaaaaagccatcgctcgagaagaaggttgatggagtatccgacaagcatcagaatctggaaacaaatgatgagaagcaacgtgcagtgttaacgagctcaggttcgtcgaaatcaaaaacatggaggccatcattgcagagcatctctgaagctaagagttgatgtttattttagtatttacttaaggaacaaaaacaaaatctctgtgtgaaagaaaaaaaaatctctgtgtgagatcatcagaagatggaatcttcaagacaaagagatataaattcttctcttttacgttcttttctgattttcttatagagattaaaaactgagtccctttttattttgtctcgccaatgtatataagctctcaagatgggatcgattgaaaaaggaattgtaaaacagatgatttgttggtgtttagaaaaaaaagacagatttattttaaaaaaaaaaaaaaaaaaaaaaaaaaaaaaaaaaaaaaaaaaaagggcggccgc

SEQ ID NO: 1580 - DNA, 993 bp, Brassica napus
  Clone ID: BRANA-23APR03-CLUSTER7441_2
ctctttgtagagaagatccgagaaggtgaatatcaatcagaacatggcgaaagaagacaaccacgaagctcaacgatgcgagtgcgaggatcatgaggaatcgagtcctctcttgcaagtgaacgaaagcaagatctgctcaaaaggggacaccaagacggcggaggaatacggctggacggcggatggattgccggtgagccaagggagcgtgatcggcgagccgatcgggagaaaccaatggagttccggtcttttttcctgtctcggccgaaacgatgagttctgcagcagcgatctcgaagtttgtctccttggaagtgtggctccatgtgtgttgtatggaagcaatgcagagaggcttgggtctgctcctgcaacgttttcgaatcactgcttgacgtatttagggttgtactttgttggcaactctctgtttggatggaactgccttgctccatggttctcttattctagccgctctgccattcgcagaaggtttaaccttgagggaagctttgaggcgatgaacaggtcgtgtggttgctgcggtagctgcatagaggatgagatgcaaagggaacatatggagacgacttgtgactttgtgacgcatgtcctttgccatacatgtgcactttgccaagaaggccgtgagattcgcaggaaggttcttcacccgggtttcaatgctcagtccactgtggttgtgcttccaccaagtgaacaaaccatgggacgtaagtaagtgaaaagcttgcgttgagtcatgtgtcctaaataacatttgtaatacgcaaggtggactatgatgttgtctcttgcttgcttttatcgcgtgttcttttcattttttttgggtctttcttcaatgcatgcaaacatatgtatatctttattgttacgtgcttggttttggatatggtcttgtaatattcaataaagtttcgcaatttgtaactcaaaaaaaaaaaaaaaaaaaagggcggccgc

SEQ ID NO: 1581 - DNA, 771 bp, Brassica napus
  unsure (1)..(771): unsure at all n locations
  Clone ID: BRANA-23APR03-CLUSTER7482_1
agaaagtgtattcgactggtactccccactcgcggccgtgctttctctttttctcttcagtcatctttgtttttgtgcttttcatatcttaaagcaaatctgatttcaaaaggaatcaccgacgaaagaaaagaaaggaaaaagaagaatgagtgaggggaggataaagaagagtgtgaacggaggagcaccggcgcaaacaaatccggatgatcggagatctagtgttgaagcatcttctcaaggggcgggggcggggaagcagcgagctgtgataaaaagtgctgatatgaaggaggatatgcagaaggaggctatcgatatcgctatcaccgcatttgagaagaacagtgtggagaaggatatagctgagaatataaaaaaggagtttgacaagaaacatggtgctacttggcattgcattgttggtcgcaactttggttcttacgtaacccacgagactaaccatttcgtttacttttacctcgaccaaaaagctgttctgctcttcaagtccggttaagaattccgaaaccaagaaagctcctcagatgatcgatttattgtcatcacgttgtagttagttccttccttgtgttctacgcgtatgtgtatgtgttgctttgtaaggctttcaccaacaacactttaaactgtatgtatattcgattttaaaactcagtttccagaaaaccggaatttccggtttgtgttaaataaaaaaaaaaannnnnnnnnnnnnnnnnnnnnnnnnnnnnnnnnnnnnnnnnn

SEQ ID NO: 1582 - DNA, 1316 bp, Brassica napus
  Clone ID: BRANA-23APR03-CLUSTER7509_1
acgaatatagagaatcaaacagaaacgagtagtgtgagaaatagcaatggcaatactgaatttcacaccagcctagaggtttacagaatcaaactgatacgagtagtttaagagatagcaatggccatcctgaatttcacaccttcctcaatgttcccggtgaccatagattcagctcgaggaacaagagttagaggttctgtcatcaaaatgccgatgagtctcaatactacggatccccatcctcctgcttcacctggtttcagcttatgcacgtgctgaagaaagcattgcctaggagtcgctacaacgccgtttcctccaatctctcctatctacgctgctccatccactgctccatccacagctcaaaactcaacggaagttttgaactaatttcatcctcataatcattattggtatgttgagatctatggttattataggggcgcagggatggaaaaatatgagaaagatgctgatttgtacaggaaagaagatccttttttggtaggtggtaaagaacctgatccgaacatcaagtactacaacaatattccaaacgtctctgttcttggtgtggatccaaaccctaagatggaaagtcacgcactcaaatccgctatagaagcaggagtgaaatccgaaaacttcaagttcattcacgcggtcgcagaatctatgccattagaagatgcatcagttgatgcagttgttggaagtcttgtgatgtgttctgtctcggatatccctcaaacactcaaagagataaaacggatcctaaaaccaggagggctttacctcttcgtggaacatgttgcagcagaagatggaacatttctaaggatggtgcagaatgttttggatccattacaacaagttgtagccgacggatgtcatctaacgaggaacacagaagactaccttttagaagctgggttcaaaggtggtgtagatatcaacaaggtctctctttctgccttttaccacttaagccctcatctttatggagttgcttataattaaaaaaaaaaaaaaagggcggccgctgggaaatatctgaactcagcagctcatctttggactgcacacaaggctttctttcatggttgaaaatatcaacgttttcaactctgtttctctatatctgcctttgatcctaaactatcgactcaatggattgagtctaagcgtttatgatgttgtgtttggaactgaataatgcttcataagcagaaaataatgtataattatcagaaagtttggaactctgtcttctactaataaaaaaaaaaggggattaatggaaaaacaaa

SEQ ID NO: 1583 - DNA, 1120 bp, Brassica napus
  Clone ID: BRANA-23APR03-CLUSTER75115_1
atttttagggactttttgtaacacactctctcttcttctgctaaaattccccaactctacttgcaggaaacagagaaaataggagaaaatgtatgcagatacagggctagggttccgattcatgcagggttgttctccagaaatccatcagttcgaagacctctttaaaccctacaagctctctgatcaaacgatcagtcttgttgaggcgtgtgagtatggtttcggagaagagagtgacctactcaaagcccctgagccgatcattgaagaaccaatgctagccgttgaccctctctctcaagagattgttgaactcagtgatctcgggtcgttgcagagtgaccaacagcttatagaaaaggctttctacgagtgtgaacaggagctcctagtgaaatcagccatggagtctccgctgctctccgaggtactagacaggaagaacgtctctcaagcggcggaaatggacagtagtagcgtagttgtctctgatgtcccagttcctaagagcgtgagctcggggagcctgacatcgatggatatagcacagcacgaggaggcggtgattcagaggttcttccctccagtggataatggaatgagaagagcctttagcgaaagcgatatacagacactggggactagaaacgcgggtcaggttcagtctcaactggatagaataatcgtaagttgcacctctgaggaccgtcgtgagaagctttctcgatacagggacaagaagagcaggaggaatttcgggcgtaaaatcaagtatgcttgcaggaagacacttgcagacagtcaaccgaggatccgaggaaggtttgcaaaaacagaggagatgcagaaatgagaggattgatttagttaggtacctgaagatgagcaagaagaacagtttgatgaagtgtttttgtatataaaggtttgtctgaataagcctctaaggagtaggaaggaaaacaagtgatatgcttatctatgtttagatcttatgaatctcactcagtctctaaaactctaaatttataagctgcttgatgttcctttataaggtttggcggtatatattaacagttgacgtaaaaaaaaaaaaaaaaaaaaaaagggcggccgc

SEQ ID NO: 1584 - DNA, 988 bp, Brassica napus
  Clone ID: BRANA-23APR03-CLUSTER7512_1
agatcccagacagttgactttctccgttgttgtcggatttacatcttctagcatacaaagtgttcgacgaaattcctctgagagctccttaaaactggctgataattcttaccatgaaactgagacgaatcctcggttctgtttcaagtctcgctgcataaaagctctcttcgtcttcctcctcgtattcttccggttgcccatctaggcagattttcaccgcttcgcaacgaaatgccggaggcaaccactcagaagcgttacctgggaagcacatcgaatgggcatcgcttggttcagtcagaaactcgaggttcgcatctgggttctcaccgttgaagccgaaaccgttggattcgatcatggatttggagagagccaagactaaatctcccgaggagctcacttcgatctgggacgattatcatttgggacgtggtaggttgggtttgatatgtaaggtttttctattttgttgtttggtgaattcattagcaaattgccgttgggacgagggcatattgttgtaaagatgaaagctcagctttatagatagttaaagcaacgagcagccgagtgttgaagcgcctcacatgattttcactggtctcgaagactacaaagcaagaggaacacaagcggctccttacctgactagcaccttctacactgagctttcagagacaaaagacttggtgtttatccgaggcgatgttgtgttcacaagcaaactcacagacgaggaggcgaaatggatcatggagacatctcagtcgttttagttgaacgacacgctgtacaagctgcttgagaggtttaataaacacactcatgtgttgagttcaaggatgtgttacaagctctggatatgcctattctgtgatatgctaaatcaagaaagaaaatatacacttttctgtattagaattggttttgtatgggaaataaaacaacttcatcatcaaaaaaaaaaaaaaagggcggccgc

SEQ ID NO: 1585 - DNA, 972 bp, Brassica napus
  Clone ID: BRANA-23APR03-CLUSTER7524_1
agcttctctcttcttcttctgcaaatccaaaatggaaccatcactaaaacccaatcctttcctctccttctcctctttcctccacacccactgtaatcgcttcgcctccgacctctccgcccgtttcgaagacaccaaacgcttcgccgaatccctaaccactcgacgtttctctcctccgcccttcgcctccgtctctcagtaccccaagccttccgctggaacctcaactgctactttgaacccatctcacgtcgctaaagctctcgctggaacctccgtgtttacggtcagcaacaccaataacgagttcgttctcatctcggatcctaccggcgacaagtctatcggtttgctctgtttccgccaagaggatgccgaagcttttctcgctcaggcgcgcctccggagaagagagttgaaagccaatgctaaggttgttcccatcaatctggaccaggtgtacttgttaaaagttgaggggatttcttttcgcttcttgccagacccaatccaaataaagaacgctatggagctcaaatcttcgagtagtaagaatgggtttgatggagttccggtattccagtctgagcttcttgttgtgaggaaaaagaataaacgttactgccctgtatatttcagtaaggaagatatagagaaggaactttcaaagtatacaagagcgtcaagagcagatcaacaaattatggttgggagtttggaagatgtcttgaggaaaatggagaggagcgagaagaattcaggttgggaagatgtaatattcattccaccaggaagaagttatgcacaacacatgcaggaggtgatcaaagagtaaacaaagatgagagacactgtatgtagttttcatttgataaaataaaaacaacttgtcttgagattttgcaatattatcattgcccaaagagctcaacgcactttcagttaaaaaaaaaaaaaaagggcggccgc

SEQ ID NO: 1586 - DNA, 1324 bp, Brassica napus
  unsure (1)..(1324): unsure at all n locations
  Clone ID: BRANA-23APR03-CLUSTER7550_1
aaagaactacaatctcacaaaatatacttgaatcctgaccgaactcgtctcccgatctctcagatttttccacaacctttcctctcctttgaacttcacaagactcgaaaatggcagaaacgatcggcgctgagctcgtcgaactctgccgcctcagccatcgtcgctcgtcgctgccgaccgctcccatcccgcatccgccacaagccccaacctccagctaccacactacaccacctcccaccacccgccgcgctccgtgccacatcccaaccgcccgtcgaacctcgaatcctactacggacaagagacgccattctccgtcatccccgccaaagcggtggtagccaggacccccgccaacaacacccagacctcagcctccataaccgtcaatccccagatcccatcctccgcgatccactcccttcacctccacggcgtccagaagctcctcttcctcggatcctcctgcatctaccccaagttcgctccccagcccatccccgaatcggctctcttaaccggcccgctcgaaccgaccaacgagtggtacgcgatcgcgaagatcgcggggatcaagacctgccaggcgtataggatacaatacaaatgggacgcgagctcggggatgccgacgaatctgtacggacctaacgataattttcaccctcagaactcgcacgtgttgcctgcgcttatgaggaggtttcacgaggcgaaagtgagtggagctgaggaggttgtggtgtgggggagtgggagtccgttgagggagtttttgcacgtggatgatttggctgacgcgtgtgtgttcttgttggagaggtacagtgggttggagcatgtgaatatagggagtgggcaagaggtgacgattaaggagttggctgagttggtgaaagaggttgttgggtttgaagggaagcttgggtgggatagtacgaagcctgatgggacgccgaggaagctgatggatagctcgaagctcgcgtctttggggtggacgcctaaggtttntttgananatggtnttcgccagacttatgagtggtacttggagaatgtttgtgcagacaanaagtgatgtatgcgttntcacatgactcacaggtcaatcggctttgtcnctacaaggtgatttatctatctttgaggtttaaganctgcttcttttttttaatntacatttggttgttttnttgnacctgaggaacttacattatccgacatgatcatgtttgatgcatcataaatccatgaacaagatatgctgtattatttagttttnttttataaaagtgtttnaaaaaaaaaaaaaaaa

SEQ ID NO: 1587 - DNA, 838 bp, Brassica napus
  Clone ID: BRANA-23APR03-CLUSTER7554_2
cactcctcttcttcgtgcttcttctttttctctcattctctctctgtagatttctacactgaaaatcaagtttctgacaaaatggaagcaaaccagttaaacggtttgtctacgcttgttgttattctactactgtcgctgacttcgacagtgacatccaaggacgaggttgtttcctgtacaatgtgttcttcctgcgacaatccttgtaatcccgtccaatcatatcctcctcctccgcctccttctcgtccaccaccgtctccatcaaccaccaccgcatgtcctccgcctccttctcctcctagctccggcggtggtggtggtagctcttactattatcctcctccttctcagtccggtggcggcaaataccctcctcctagctccggcggtggtggtggtagctcttactattatcctcctccttctcagtccggtggtcaaggttattactatcctccaccatattcaggaaactatcctacaccgcctccgccaaatccgatcgttccttacttcccgttttactatcatacgccccccccaggttttggttcagaccggtttatgggttcaagttcaataatgtttgctcttttccccatgttcctctgtttagtttaccggtaaaatcgtcggagttccccggaaaaaacgaagaagtcggaacaattaggcagatcggtagatctcccaaagccctttgagggttgtagacaaaattgtttatgaaaaccagatgttgggtcaaaaaaaaaaaaaaaaaaaaaaaaaaaaaaaaaaaaaaaaaaaaaaaaaaaaaaaaaaaaaaaaaaaaaaaaaaaagggcggccgc

SEQ ID NO: 1588 - DNA, 1512 bp, Brassica napus
  Clone ID: BRANA-23APR03-CLUSTER7559_1
tctctaccattattctaacaacagtgaaacacgaagaagagaacaaacagacgcaaaaatggcgactctttcgtcatcctctctattttcttcttctctttttcttctatgcaaatctacattctctccatagagaactgacttcatctctctctcccctcgcaaagctctctccccatccacctcgccggcgattctctctctctccgtaaaacacaatcgcgaaagaaactctttcaaagtgaaatcggtagctagtcccgcggagacggcgtcggagttcgatgagatggtctccgggacgaagagaaagtattatatgatgggagggaaaggaggagtggggaaaactagctgcgcagcttctttggctgggaggtttgctaacaatggtcacccaactcttgttgtctccactgatccagctcattccttgagtgactcctttgctcaggacttgactggaggaattcttgtgcggaatgattgagcttaagctcctttgtttgctcttgaaataaaccctgagaaggctcgagaagagtttcgcagcgcctctcaggcgaatggagggactggggttaaagattttatggatggtatgggacttggcatgcttgttgaacagttgggggaacttaaacttggtgagttgcttgacacaccacctcctggattggatgaagccattgccatttctaaagtcattcagtttttggaatcacctgagtataacatgttcaccaggatcgtgtttgacactgcaccaacgggtcatacgctgaggctactctccttaccagacttccttgacgcctccataggtaaaatcttgaagcttaggcagaaaataacctcagctacctcagcaatcaaatcagtctttgggaaagaagataacaagcctgatgctgctgacaaattggaacggctaagagagaggatggttaaagttagagagctttttcgtgacacagagtcaacagagttcgtcattgtcaccatccccacggtaatggctgtcagcgagtcttctagattaagtgcttcattgaagaaagaaagtgtccccgtcaaaagacttgttgttaatcagattctccctccatcctcctctgactgcaaattttgttccataaaaagaaaggaccaaatgcgagctcttgatatgatcagggaggattcagaactctcaggcttgacattaatgcaggctccgcttgtagacatggagatcagaggcgttcctgctctgcgcttcttgggagatatcatttggaaatgagaagaagaagaagcaaagttcagttgtattgagatagtagtgttgtttactacaacttacattacatagttttggaataaatattgcaattcttggggaccaaaagcttcaagatatttacaatagttatgcttagaagaaaatatttatagaacaatgtttatgacactctaattagccataaaaatgaacttggaaacaaaaaaaaaaaaaaaaagggcggccgc

SEQ ID NO: 1589 - DNA, 1667 bp, Brassica napus
  Clone ID: BRANA-23APR03-CLUSTER7620_2
acactcactgtctttttatctcacttttctatctctcctctgttctaattctctcggaccatagcaaacactctgatcagcttcggctccaatggcggctcttccgacatggattttagctatgatgtgtctactcttcttcgtcggagcaatggagaacagtacgcacgacaagatctcatctctctccagttccgacgaaaatgaatggaacacgcatgcagtgacaaatccagatgaagtagcggacgaagttatcaccttggctgaaatgagtgtaagaaaccataccgagaggaggaagctaggttactttgcttgcggaacaggcaaccccatcgacgactgttggagatgcgatgccaaatggccacaagaaccgcaaacgcctagcggactgtgtattcaagcgttttcagaagacgcgatcggtgggcgagacgagcctgggcgtttctatgtaggaaccaaaccaaatcaccacggcccggttaaccccaggcagggtacactacgtcacgccgtgatccaagaccgaccgctatggatcgttttcaaacgcgacatggtgattcagctgaaacaagagctgatcgtcaacagcttcaaaacgatcgacggacgcggcgcaaacgttcacatcgctaacggcggttgcatcacgattcagtacgtgacgaacgtcatcgtgcatgggttgcatattcatgactgtagaccgacgggtaacgctatggtgagaagctcagagacgcactttgggtggaggacgatggcggatggtgacgcgatttcgatctttggatcgagtcatgtttggattgatcacaactcgttgtctcattgcgctgatgggcttgtggatgcggtaatgggctcgacggctattaccatctctaacaaccatatgactcatcacaacgaggttatgttgctcggacatagtgattcttacacaagggataaagccatgcaagttactattgcttataaccattttggtgtcggacttattcaaagaatgccgaggtgccgacacgggtatttccatgtcgtgaacaatgactacactcactgggaaatgtacgcgattggtggaagcgcagacccgacaatcaacagtcaaggaaaccgttacgccgccccgaagaatccctttgctaaagaggtgactaagagagtggacacaccggctagtcattggaaaggatggaactggagaacggaaggagatttgcttcagaacggagcttacttcactgcttcgggagccgcttcatctggtagctacgcacgagcctctagcctcgcagctaaatcttcttcattggtcgcaaccattactaacgacgctggagctctaccttgtcgtagaggacgtcagtgtacctcatagttgtttttaaacctcctcccaacaccatttaccaccaaaattcaaaatcatcttcaattatatttagacaaaagtgtacattttcacacatttgtcatttaaaaaagccaattatcttttttttttaaaaaaaaaaaaagggcgggtgttttgtatcgatttttctcaacctcgggtttgcttgcttcaaccgcaagttaacacaagtaaagggggaaaaacaacctttcatgtaaaagagaaagtcccgaagtgttgttggttctgtctg

SEQ ID NO: 1590 - DNA, 709 bp, Brassica napus
  unsure (1)..(709): unsure at all n locations
  Clone ID: BRANA-23APR03-CLUSTER763_17
aaaacttctctctctctctctctctctctctcgttcagatcttttcgcatcaagctcgaaaggatcagtagctgaaggagaaaatggggctttcatttggaaagcttttcagcaagctntttgcgaagaaggagatgcgtatccttatggttggtcttgatgctgctggtaagaccaccattctttacaagctcaagcttggtgagatcgttaccactatccccaccattggttttaatgtggaaacagttgaatacaaaaacatcagcttcactgtgtgggatgtcgggggtcaagacaagatccgtcccttgtggaggcactacttccagaacactcaaggtctgatcttcgtggtcgatagcaatgacagagatcgtgttgttgaagccagagatgaacttcacaggatgttaaacgaggatgagcttcgtgatgcagtacttcttgtgtttgctaacaagcaggatcttccaaatgcaatgaatgctgctgagataactgataagcttggactccactctctccggcagcgtcattggtacatccagagcacgtgcgccaccaccggtgagggactgtacgaaggtctggactggctctccaacaacattgctaacatagcttgagctttgtgagacgaaagctttggcttctgggagaagcattatctttgctttttgttcaaaaccttttactctcttttttt

SEQ ID NO: 1591 - DNA, 1457 bp, Brassica napus
  Clone ID: BRANA-23APR03-CLUSTER76447_1
attaaacaaaaaaaaaaactcaattttttttgtttgtgtagccgagaaaatttccaatgttcccggtcacaagtcgccgccacttcacatcctccctatatatcctccgttcatcttctccacacaaccatctacgtcctctactctccctcctcttcctcccttccgtccgctcctccaaatccaaatccaaatcctcctcttcaaccaacaaacacaaccaacaacctcctcctccaatggccgcgtgcatcgacacgtgccgaaccggtaaaccacagatctcacgtgactcaaaccggtcccacgacgacgaatccggttttcgttactccaattactaccgcccctccggttatcatcatccaacaacccagaccaaaaccatccacacccgtcctctcatcgaagacctcccaaacgacgacgtatgggccaagatccgacaagaagccagatccgacatcgagagagaaccaatcgtctccggctactaccacgcctcgatcgtctcgcaacgctccctcgaagccgccttagccaacacgctctccgtcaagctcagcaacctaaacctcccgagcaacacgctcttcgatctcttcaacggcgtcctcgaacagaaccctaagatcgtcgagtccgttaagcaagacctcttagccgtcaaggaacgtgacccggcctgcatcagctacgtccactgcttcctccacttcaaaggctttttagcctgccaggcccatcgaatagcccacgagctttgggcccaaaaccgaaaggttcttgctctgctgatccagaacagagtctccgaagccttcgccgttgatttccaccccggggccaagatcgggacggggattttgctcgaccacgcgacggcgattgtgatcggagagacggcggtggtgggggataatgtttcgattcttcataacgtgacgcttggaggcacggggaagcagtgtggggataggcacccgaagattggggacggggtgttgatcggagctgggacgtgtattcttgggaatattacgattggtgaaggggcgaagattggggctggctcggtggtgttgaaggatgtgccgccgaggacgacggctgtggggaatccggcgaggttgcttggtgggaaagataatccgaagaagcatgataaggatcctggtctgactatggaccaaacctcgcatatatccgagtggtcggattatgttatttaaagtgttttgtgttttgttgtttattccataatcagatcatttgtctttgtaaggtattgtctgatttaaggatttgaaactaaactcggaaactcttaaacgatgtgtagtttgagtttcatgtggttcgtttctgattagcagagactatgtttagtatgtatgtttgttgggaataaactgaaagtttatcatttaaaaaaaaaaaaaaaaaagggcggccgc

SEQ ID NO: 1592 - DNA, 1348 bp, Brassica napus
  unsure (1)..(1348): unsure at all n locations
  Clone ID: BRANA-23APR03-CLUSTER7670_1
ctactcttgatcgcttcgttactcaaaagccctaacattgattctcgcgatttgataaaaaccctaacattgattctagcgatttgatcaacaatggatgactcttcgaccatcgctcgcaagacgtgggagctcgagaacaacatcctcaccgtagagcaaccggattcgtcctcctcggatggaatattctactacgacgaagcttcccagaccaaggtccagcaggagaagccgtgggccaccgatcccaactacttcaagcgcgtccaaatctcggccctcgcgctcctcaagatggtcgtacacgcgcgctccggcgggacgatcgagatcatgggtcttatgcaggggaagaccgagggggataccatcatcgtcatggacgctttcgctttgcctgtggaaggaaccgagactagggttaatgctcaggctgatgcgtatgagtacatggttgagtactctcagaccaacaagctggctgggagattggagaatgttgtgggatggtatcactctcaccctgggtatggatgctggctctcgggtattgatgtctcgacacagatgcttaaccaacagtaccaggagcctttcttggctgttgttattgatccgacgaggactgtttcggctggtaaggttgagattggggcgttcaggacttatccggaggggcataagatctctgatgatcatgtttctgagtatcagactattcctttgaacaagattgaggattttggtgttcattgcaaacagtactattcgttggacatcacttacttcaagtcatctcttgatagccaccttctggatctcctttggaacaagtactgggtgaacactctttcttcttccccactgctcggcaatggagactatgttgccggacagatatcagacttggctgagaagcttgagcaagccgagagtcagctggcgcactcccggtttggaggaataccggccagtcttcacaggaagaaagaggatgagcctccacttgctaagataactcgggacagtgcaaagataacggtggagcaggtccatggattaatgtcacaggttatcaaagacatattgttcaactcagcacgtcagtccgacaaaactcccagcgacccgtcagatccanagccgatgattacatnttaaagttgttgttcttttgttgtcttgcgcaactgcagtggactttgcttttatcctggtttatgaggcaaatatgcacactttgttattcatataatttccctccagtgtagtatttgctttagacaaaccttttttcggaanagattttattaaaatgacgttaacatgaaaaaaaaaaaaaaaa

SEQ ID NO: 1593 - DNA, 1185 bp, Brassica napus
  Clone ID: BRANA-23APR03-CLUSTER7705_1
aatacggcatcatcattaagatccctaaattccaggaagagaaaagatagagagtgaacgagaagctccattatttgttaaaagttacaaaagctttcagagtccgaacacgcttagaaaatttgtgcttcgaagcctcgcaaaaggggtctgtctgtctgtctgtctctctgttatttagggggctattaacttctttctatcgcaagtctgaaaaattgaagcagagagtagagatgtgtagcttgtcggcgagtctgctgttaccgacaaagctgaaaccagcttattccgacaaccgaagtaacagcaacagctcactctttctcgccaatagaagacgacccaagaggaagaaccaatcgattgttcccatggcaagattgtttggaccggctattttcgaatcatccaagttgaaagtattgtttctaggggttgacgagaagaagcctccaagaacgcttccaaggacttacactctcactcacagtgacattactgctaaactaactttagctatttctcactccgttaacaattctcagttgcaaggatgggcaaataggctatacagagatgaagtggtagcagaatggaagaaagttaaaggggacatgtcgcttcacgtccactgccacataagcggtggccatttcctcttagatctcttcccaaagttacgatactacatcttttccaaagaactacctgttgtgttgaaggctattgttcacggagacggcaacttgttgaacaactatcccgatttacaagagtctcttgtttgggtctatttccattccaatgttgatgagttcaacagagtcgagtgttggggtccgctttgggaagctacttcgcctgatggtcacaggactcaaactcttcctgagactcggtgcaaggatgaatgcagttgttgtttcccgcaggttagctcgattccgtggtctcatagtcttagtaacgaagggtgtggctggctactctgggactcaaaccgagggaatgcctactcctaatccggagaaactctagtgattcaaccgacataatacaagtctggtttggtttggtgtacgtaatgtggtataggaaagtaacgattatttgtatgttgaatagtattaaattaagttaaacatgtttaattattaaaaaaaaaaaaaaaagggcggccgc

SEQ ID NO: 1594 - DNA, 824 bp, Brassica napus
  Clone ID: BRANA-23APR03-CLUSTER7755_1
gattaaaacatttatatttattttcctctcttctttccttatagaatcagttcttcccttttgttctctctcgttctcacatctcctcctctccttcatatattctccatcttctgctagctaaggaaacaagaatggtggatctcgaaagaaaagtgtgttgcatgtgtggtgatgtgggtttcttcgacaagctctttcattgcagcaagtgccttaatcgctttcaacactcgtactgtagtagctattacaaagagcaaggtggtccaattaagatctgcgattggtgtcagtttgaagcgaagagtcgaacaggagcaaagcacggtgttagcgttggatcgtctaagagatcgtaccggtcggaatattcttcagccaaccagatcaaaaaccaagagattaaccagattactgcaagtagtagtatacctccagtagccgacaagggtaaaactagtgtaccttctcctagaacggccactcggaggtacaagcttgacccacgcgtccggtgttagtaatgttttcttaaacaaccaagagttgagagacttatagctagagtgttaattaggaactgagatgataataagacgcattaatgtaagatacaattagggatgtcgtagatgttgctataagtgtgagaagcaatgtaacgtacctgcggagatatgtatgttatggatatgatgatgttagtgagtgttttaaataaattttatgtatctttgagttgaatgattggttaattagcaataaattttgtgtgtttgttgttaaaaaaaaaaaaaaaaaaaaaaaaaaagggcggccgc

SEQ ID NO: 1595 - DNA, 1238 bp, Brassica napus
  Clone ID: BRANA-23APR03-CLUSTER7763_1
ctcttcgattcagctcatcctcattactttcctcaatctctcgtttatcctttcaaaccctaacctctctctctctcggtagcaatcgaatcttcttcacttcaattcaattcaattcatgtcgacgatgtcgggtattcaaggccagatcctcgaggtcactgtggttggttgccagaaactgaaagacacggaatggttctcgaggcaagatccatacgttgtcctcgagtatagcggcactaggcaccgtacccgaacctgcacagatggtgggaagaacgcagtgtttcaagagaagtttatgttcactttgcttgaaggacttagggatcttaaagttgctgtttggaatagtaacactctctccactgatgacttcattggcaatgctacgattcagttgcagaaggttctttctcaaggatacgacgactgtacctggactcttcagaccaaaactggcagatttgcgggagaagtaagactaatactgcattatgcaggcgcaaagaaacaaaattacgggtctgcgccatcagcaccaccatatgcccctcaagtacctcaatactcagcaccgcctgctccatctccatattcatcaccaccatacgctggaccatctccgtacccacaaggacaatactctcagccgcaatcggcatacccaccagtttcagcttatcctcctcagccgtctgcgtatcctcctcctccctcaactgcgtatcctcccgctccttcagcttaccctccaggcccttcggcgtaccctccaggcccttcggcgttccctcctcctccgccatcctcagcagcttaccctcctcctccataccctcctcaaccatcaccatattacccacaaggtccatatccaggacaataccctccgcctccgtactaaagctccggcgtttagaattgacaggaaaatggttatgatgcatagatcataatactagccgatgctattcctaaacttgtgacgatttttttgttctttcttttaatcttccctgtgcttttgttggcctttgcgaaatgtagcttaatggttagttttatgcgatggtcagtgagactcattggggaagtttagatatgttcatattaagccagcttgcaaatttatgttgcagaataatcgaattatttacctttaaaaaaaaaaaaaatagtggagggcggcaaaaaaaaaaaaaaaaaaaaaaaaaaaaaaaaagggcggccgc

SEQ ID NO: 1596 - DNA, 1202 bp, Brassica napus
  Clone ID: BRANA-23APR03-CLUSTER7800_1
aactataattttttattaaagtctcttttgctctctcctttactttggtcgttcacaatgaaaggaggcaccgtctcgtttctcttcgttcttctcatctccaccttcacctccatcttctgcttccgtgatgggatgttaccaaacggcgattttgagctaggaccaaaaccagcggacatgaaaggaacacaagtgataaagaagaacgctattccaagctgggagcttacaggcttcgtcgaatacataaaatccggtcaaaaacaaggagacatgctcctagtagtccctgccggaaaattcgccgtccggctaggaaacgaagcatcgatcaaacagagacttaacgtgaccaaaggaatgtattactcgctcacgttcagtgccgcaaggacttgtgctcaagacgaacggctcaacatatcggtggcccctgactcgggcgtcattcctatacagactgtgtacagtagcagtgggatgggacctatacgcttgggccgtttcacgctgatagatggtgtgcacaggagagctctttaccctcctagaccaacaaacaagaacattttgaagaacggaggatttgaagaaggtccactagtactacccggctcgaccacaggagttttaatcccaccgttcatagaagacgaccactctcctttacccggttggatggtggagtctctcaaagccgtcaagtacgtagacacagaacacttctcaatcccgcaaggtcgccgagccattgagctagtggctggcaaagagagcgccatcgctcaagttgctaggaccatcatcgggaagacttacgtcctttcgtttgccgttggagacgccaacaacgcttgcaaaggatcgatggtggttgaggcttttgcgggaagagacacgcttaaggtaccttacgagtcgcgtggcactggagggtttaaacgagcttctatcaggttcgtggcggtttcgacaagaactagagttatgttttacagcactttctatgccatgaggagcgatgatttctcctctttgtgtggacctgtgattgacgatgtcaagcttttaagcgttcgtaagcggtagatgaatggaatcttactacaagaaatgaaactgtgcgggttttactttgataatatatcgtctttttggtgtgttaaaaaaaaaaaaaaaaaaaaaaaaagggcggccgc

SEQ ID NO: 1597 - DNA, 1114 bp, Brassica napus
  Clone ID: BRANA-23APR03-CLUSTER7811_1
tatttattctcttctccgtttctcattgactagtcagaccaaaagagtttttgggattttcttgtgggtttcaagctgaataagcagaaaacaaagaataagggtttttgcctgcggagattatggaggggaacaatggcggaagcgcaaaagctcgtggaattgatcatgaagaagagagcggagaggatccattgtcaagataaatcttcttcttctgtttcagataaagaaaagaaagcatcgtctatcaagacgaagatctaccgcctctttggaagagaagagcctgtacacaatgtcttgggtggcggagagcgtgccgactttcttctatggtggaacaagaagttatctggaggcgtgttgggtgcttcaactctctcctggatcttattctagttactctattacaatcttctcattctcttcggtcacgtctcgatacttgctctcgctgtgttgttcttgtggtctagtgctactaccttcattcacaagacgcctcctcatattcctgaagtgcacatccccgaggatgttgttctccagcttgcctctgggctcaggattgaaatcaatcgtggttttactcttcttaggaacattgcattaggaagagatctcaagaagtttcttatggttgttgctgggttgtgggttttgtccaaagttggtagctcatgcaacttcttgaccttgatctatatcgcaactgttcttctcttcactgttcccgtgctttacgaaaagtatgaggataaagtagatcactttggtgaaaaggcaatgaaggagatcaagaagcaatacgcggtgcttgatgagaaggttttgagcaaggtgatgagcaaaatccccagaggagccttcaacaagaagaaggattagaagtttctctcagcatcatcatcatcatctgagtcttccagattgatagataaatctcgaagcattgtgtttttacttgttattggaagctatcttgatttaataaaccctttagtctcactctgtggattttattcggggttttaaccaaagtttacacaacatatgaatttgaatgaacattattattgttgattaaaaaaaaaaaaaaaagggcggccgc

SEQ ID NO: 1598 - DNA, 699 bp, Brassica napus
  unsure (1)..(699): unsure at all n locations
  Clone ID: BRANA-23APR03-CLUSTER7866_2
gaattttgaaaccaaagtcgaagactttgagcgatcagaacaaaagatgctcaagagcgagccatctctctcaatctactgcgaatctgggctcnggnncagaagacacggcgactggaaccgatgagaatttggatagannggtctcgattggcgactcggttgaagccgacttcagctttgctaagcacggcagcagcagcatcgatgccttgtcgatcaaggaagaggatgagattgagcgaccaccgagtcctcctatgcatttagctgcagggcttgggattgacaagttcgatctctacggtggtgagatcaaattcgatttgccgagtttggatgatgagaggtgtggtgattactacaagaggatgctcgaggagtatccgttgcatcctttgcttctcaggaactatgctaacttcttggagtacaaaggagattttagtggagcagaagagtattatcacaagtgtactgtggttgagcctagtgatgggctagctttagctaactatggtagattggtgatgaagcttcaccaggatgaagctaaagcgttgagctactttgaacgcgctgttcaagcatctcctgaggataggttctgttgtaacattcacaattggttatttactcaaccttagtgtgtgtgtttttcttcttgtttttttcagcaatgttcttggagcatatgct

SEQ ID NO: 1599 - DNA, 1154 bp, Brassica napus
  Clone ID: BRANA-23APR03-CLUSTER7877_2
aaaacaaagccctatctccacacgaaaacagaggctctctctctctcttcacattatcttctcggagtcttaacagagccaaagagggatttgaagatggcgagtactacgttggatgtatcgagagcagagctggctctagtggttatgtatctgaacaaagcagaggcaagggataagctatgcagagctatacagtatggttccaagttcttgagcggtggacagcctggtactgctcaaaccgttgataaatccactagcttagccaggaaagtcttccgtcttttcaagtttgttaatgatctgcatggccttatcagtcctgtccctaaagggactccgcttcctcttgttttacttggaaagtccaagaacgcacttttgtctacattcttgttcttggatcaaattgtctggcttgggagatcaggaatctataagaacaaggagcgagctgagttacttggacgtatatcgcttttctgctggatgggatcttctgtctgtactactttagttgagattggtgagattggaaggctgtcttcatccatgaagaagatcgaaaaggggcttaagaatggcaacaagtatcaagatgaggagtatcgtgctaagattaaacaatcgaacgagaggagtcttgctttgatcaaagcagcaatggacattgttgtagctgctggtcttcttcagttatatccaaagaagatcactcctcgtgtcaccggagcttttgggttcatcacctccctcatttcttgctaccagttgcttccgtcacgacccaagatcaaggcgccttgaaaagcttgtggaagaaagctggccttctggagaaaggcatttcagaatgtttctgttggttcttttgagtaatgtgctgctgttataagcccttgtataaaaatatacttatctgcaggcaaaaatcaaacttagttgtggcacgtttccatgtatctcaaatcatcattggtctgattctaaaatttaattcgttgacatggctttcagtcaatgatcccacgtcttgtcatgtgagcgcgaagttgtctttgtaattgcatgtaattacaacgtattatatatatccctttgtaaaaaaaaaaaaaaaaaaaaaaaaaaaaaaaaaaaaaaagggcggccgc

SEQ ID NO: 1600 - DNA, 1476 bp, Brassica napus
  Clone ID: BRANA-23APR03-CLUSTER7893_1
ataatctctcaaagagagaaaaacaaaacacacaaaaaaaaatggcgtctcttctgggaacgtcttcaatacgtgcgtctccttctctctcgtcttcttcttcctcaacaccttcgatctctcccatttgcttcaggccagggagaatctgtggaagagcgtcaaatgcaggaatccaaataaggccaaagaagaacaggtctcgtcaccatgtctctgtcatgaatgtagccacagaaatcaactccactgaacaacaagtagggaagtttgattcaaagaagagtgcgaggccagtttatccatttgcagctatagtaggccaagatgagatgaagctatgtttctcgttgaatgtgattgatcccaagatcggggttgtgatgatgatgggagacattggtaccgagaacgccggtatgatgataatcggagtcagaggaaccgggaagtccacaactgtcaggtccttcgtcgatctttctgacccgttagacgtggagttcgtgggcgttgacaactctgacccgttagatcctgagttcatgggtgttgaggtgagagagagagtggaaagaggagagcaggttcctgttgtcgcgactaagatcaacatggttgatcttcctttaggtgcaactgaagatagagtttgtggaactatcgatatcgagaaggctttaactgaaggtgtgaaagcctttgagcctggcttgttggctaaagccaatagagggatactctacgttgatgaagtcaatctcttggatgatcatttggtcgatgtgcttcttgattcagctgcttctggttggaacacggttgagagagaagggatttcgatttctcacccggcgaggtttatcttgattggctctgggaatcctgaggagggagagcttaggccacagcttcttgatcggtttggtatgcatgcgcaagtagggacggttagagatgctgatctacgcgtcaagatcgttgaagagagggctcggtttgatagtaacccacaggattttcgtgagacttacaagacggagcaggacaagcttcaagaccagatttcaaatgctagaagcaatctttcctcggttcagattgatagggagctgaaggtgaagatctctaaggtgtgttctgagctcaatgttgatgggttgagaggagacattgtgactaacagagcagcgaaagcacttgcagctctcaaaggaaaagatcgagtcactgctgatgatgttgcaaccgttatccctaactgcttgaggcaccgtctcaggaaggatccattggagtctattgattcaggagttcttgtttctgagaagttcgctgaggttttcagctgaataaggagatgagagtctgttgtcattttcttaacttttgtaaactgtgagaagaaccagaaaactataaacaggcaaatctgattctatgctttcttcaaaaaaaaaaaaaaagggcggccgc

SEQ ID NO: 1601 - DNA, 1322 bp, Brassica napus
  Clone ID: BRANA-23APR03-CLUSTER7919_2
aactaaccacacacaacaccatttgcacaaacacttctgccttctctttgtttttaaaatgagagggatgaagagtcttaccatttgggctatctttgctgctgtactctaccaccaaagaccacacaacaccactcacaaatcctgctttctctgtgttattcagtgagtttcttgaaatgagagggatgaagagtctaaccatttgggctctctttgctgctttactctcccagcagctatttgcttccgttacttccataaggttcgaggacgagaaaacatactacactcctccctctggaggacacggcggttacactcccactcctaactgtggaagtccaccttacgacccaactccttcaactccatctcacactccaactccttcaactccatctcacactccaaccccacacacaccaactcaccacacgcctccctgtaactgtgggacaccaccacacgatccttccacaccttcacacccttccacaccatcacacccttcgacgccttcgcacccttcaacgcctccttctggtggatactacacatctcctccaccaagtactccagtcgttgtgactccaccaacacccatcatagcatgatgatgatcccagtcacagccagttctgggaggaacccctttcttcttctggtggatattactcatctcctccaccaagtactccagtcgttgagactccaccaacacctattgttgacccaggcacacccatcattggagaaaccccacctactccttcttctggtggatattactcatctcctccaccaagtactccagtcattgagactccaccaacacccattgttgacccaggcacacccatcattggaggaaccccaccaactcctttcattgaccctggcactcctggaacccccttccttcctgctccttttccaccaatcactggaacatgcgattactggagaaaccaccctacattgatatggggtcttcttggctggtggggcactgttggaggagcttttggtgcagtcagtattcccagtagcattccagggtttgatcctcacatgaaccttcttcaggctctttccaacacccgcaccgatgccattggatctctctaccgtgaaggcacagcgtcttggttaaactcaatggtcaacaatcagttccctttcacaacctctcaagtcagagaccagtttctggcaggactttcctcaaccaaggcagccacaaaacaggcccagaccttcaagcttgccaatgaaggtcgtcttaagcctagaatctgaaaagaagagagtttcatttc

SEQ ID NO: 1602 - DNA, 781 bp, Brassica napus
  Clone ID: BRANA-23APR03-CLUSTER79315_1
agaattatataatacatgcatacaaacatacgctgcacattctcctcctaatctgctccctcacctcgttcctcgcgctctctcttcttctttctttccttgagaaacaaacaaacactaacaatctatttactgtctgatccctccgatagtacgatggtgtcgatcgagatgtctggccacggcgagccaggaccgccgccttcgaccgccgagcctcgggctcggctagcttcctcccctcccttcgccctccctccatccacggaccggatgcaacgcccggccgtttcttcgtcactccttcggctcccatgcatgtcttcttgtcctccgcttctctgtccgcgaatccgcagctcgattcgtcgtctgcttccggcgactttgacttctattcctcgtctcggttctcttgctgcagcggtcctctcggcggcgtgccggcggcggcccctctggtcgtctctccgacggtcagctcgagccaatgaagctcccttcgccactccaggacccttggggctctgcgccgattctagatcgggaaaccgacgaagaagacgacgggaaacgagacggtaggcgcgggagggatctgaagctgagagcagatctgttcaccgccgagacagatctctctctccgctccgaaacgcagcgtttcagtggaacgaagaggaagaggaagaggaaaaaggactcgccggggagtgtatacggaagctacaagaagattacgaagaggacgaagctaagattaatgaaaacgtgacgtcag

SEQ ID NO: 1603 - DNA, 754 bp, Brassica napus
  Clone ID: BRANA-23APR03-CLUSTER7957_2
aagaagatttgttcaggcacacgctaaaacacaaaaacaaaaccttccaagaacatatcattttgttatttatatttagaaaatggatctcgatttattacaagatcttcccatgttgaacttcccatcacccatcaagatcctatccaacaacagagatgctgacggcggcggcggcggttgcaccacgcccacttcctccgaccacaagattcctccctcctccgccactactcctcctcctccgccgcagaaacgccgtgcacttccgccgcccctcgtctacagatcttgcaagaggaagtgcacggcgtttctgtggcggaggaggatatggaggcggagtcgacccacgcgtccgagctggtggtggatttggtaaaggcattggtggtggaggaggtttgggaggcggtggccatcactgacgagtgaaacagagagattaattattaatacggttattcgtacgttgttgttacgtaattaaatgaaacagagagattaattattacaataaaatgataattagcaattgtgtatgccacttctgttttgttttggtattgtatgctattttttcatgttatgctttggttggtttcaagtttggttattaaaatggtcgatttgtgtgtcttttgtcaacaggtactgagtggttgtttccaaactattatatgtttacctttgtattaatgacgagattcatcttataaactgtcaaaaaaaaaaaaaaaaaaagggcggccgc

SEQ ID NO: 1604 - DNA, 1235 bp, Brassica napus
  unsure (1)..(1235): unsure at all n locations
  Clone ID: BRANA-23APR03-CLUSTER7977_1
atacacaacacaagacttcgaataatgtccgaaccatctccagtctctgatccttacgctcacataggcatcgtaaagaacccagatggctccatcactcgcgaccccaccagattcccgtacgcctcagccacacatacacaacacaagacttcgaataatgtccgaaccatctccagtctctgatccttacgctcacataggcatcgtaaagaacccagatggctccatcactcgcgaccccaccagattcccgtacgcctcagccacacctgacccctccccggtaaacaccgtcgtatccaaagacatcaccgtgagccactcaaactccacgtggatgcgtctctacgtccccgttaccgcactaaacgacggcgtttcgtctaaaaaactccctctcgtcgtctactaccacggcggaggcttcgtcatctgcagcgtcgacttcaaacccttccacgacttctgcaaccgtatggcgcgtgagctcaacgcggtcgtcgcgtcgccttcctaccggctggctccggagcacagactcccggcggcgtacgacgacggagtggacgctctgaggtttattagaacctcagacgacgagtggatcaagtctcacgctgatctctccaacgtgttcctcatggggacaagcgctggtggtaacttggcctacaacgtcgggctcagatccgccttggcggacctgagtcccgtacgtatccgtggactggtcttacaccatccgttcttcggcggcgaggagcggtgcgagtccgagatcagacttgagcacgatcaggtttttccgcctactgccggagacgtttgctgggagctttgtctccctgtcggagctaaccgggatcacgagtattctaatctgacggtgggagatggaccggtgaatatggagatgatcggacggttgggatggaaggtggtggtgagtggaggaggaggagatccgatgatagataggcagagagatgtggcgaagctgatgaaggagaagggagttgatgtggtggagcgttttactgacggcgttgttcacggtgctgagctcggtgatccgaccaagagtacaactctgtttgcttccatcagaaatntcatttactcttagaggccagcccaatatgttaggcccatttaaaggttaccttaatgtattggtttgtggaaaagttataaataagaaaaatattagacaccaaaaaaaaaaaaaaagc

SEQ ID NO: 1605 - DNA, 652 bp, Brassica napus
  Clone ID: BRANA-23APR03-CLUSTER8004_1
atcaaatttgattttcttttttcaattattttctttcgatcgtttttcttcatcaagaatctctcaattcttccccacgcttcttcagattttctttgttatcagatagctcaaatcgatggctagccctcgactaccgacgtcaccatggttcccgcaggcgaattctcaagcagcgtagccccatcgtagtcttccaccaagaaggtggacgagcttggaagttaagaagtggggcgtcgtggctctcagggctggggcatatcgttgtttgataattgctgccatctgcagaaaccacatcatggaatttgatgtattagaatgtcaggctaatcaggcctgtgcgacgaggggaggaatgcactgttgcttctgtgggtgtttgcaaccacgccttccactttcactgtcatcagcagatggattaagactcagtcaagtttgtccattggataatcagtgacagtgggaggttccagaagtatggtcactaaaacccaccagcaaatcatttggttggcgcatatgagatgctgatattgctcaaagttctttgttttttttcttttttctggttgtctcaaagttgtcaaaacagagattactctgttgatattactcttcactgaacctattaggttttgctttg

SEQ ID NO: 1606 - DNA, 756 bp, Brassica napus
  Clone ID: BRANA-23APR03-CLUSTER8039_1
atcttaagacttaagattacagaggcgatggcgattaacggcgaagatcgcatctccggcgaacgcccgatcatcatggtcaccaacgacgacgggatagacgcgcctggtctccgttctctcgttcgcgtcctcgtctccaccaacctctacgacgtccgcgtctgcgctcccgattcggagaagtctgctgttagtcacagtatcatatggagtagacctctcactgcacaccgtgttgagattgaaggagctgaggcctatgctgtttctggaacccctgcggattgcactgggttgggcttatcggaagcgctcttcccttctcttcctgacctggttcttagtggtataaacgttggtagcaactgtggctacaacatcgtctactctggaactgttgctggtgctcgtgaagccttcatttatgatgtgccttctgcctccatatcttatgattggaaacgtggagacatcaatgttaatgattttggtctctctgcccaagcttgcttgcctattatcaacagcatgctcagtgccatcaagaacaaaactcacccaacaaactgctttctgaatatcgatttgccgactggtattgctaaccataagggatacaagttaactacacaaggtaaaagcttgtgtaaaatgggatggagacaagtggaggaggaagcacaaggtgcgaagatgctggcaacgatgttaatggaaacagaatcaggagtaggcttagacaacaacgacaca

SEQ ID NO: 1607 - DNA, 1333 bp, Brassica napus
  Clone ID: BRANA-23APR03-CLUSTER8082_1
atatccttttgtggtgtagacacttcaacggaataaaagtctcggaacgctcttcttctcaacatcaacgacaggaagcagaaccagcaacatcgtcaagaagaaaatgtgtctgaactacagaggaagaaagttcatccctcttactgctaagagtgagaagaactagtgctcaacgttgcctctgaatgtgagcacaacactctcccaatctcgccaccgaagctgcctacctaacggttcaatcaatcttcttgaggaactctcctattggattatcaaaaatgcttatcaattccgagctccgtacgtggcccccccagtttcctttagctgtctccctgtgatctcctggcaccttcctttgtttgatctgccccctcccctggttttccctttctttccccttggccctttctttggtgcggacttgcttccccaccggctcctttgagaggatggaggaggaaggtgatgtagctactgctttcaccatggctaggattgtctctaacattcctatctcgcgtggtggtccgactagtgtagtcatctacgacattcacgctcttcaggaaaggttttactttgctgatcaggttcttcctttgtttgagactgggatccctttgctgacgaagcgtcttcaggtcgacccacgcgtccggaaaattatagttgcatttccagatgatggagcctggaagcgtttccacaagctgttggaccagtatcccacggtggtgtgcacaaaggttcgtgaaggtgataagagaatagtgaggctgaaggaaggaaaccctgctggttgtcacgttgttattgtggatgatcttgtgcagtctgggggtacactcattgaatgtcagaaagtattggcagctcatggagctgcgaaggtgagtgcgtatgtaactcatggtgtcttcccaaagagctcctgggagcgtttcactcacaagaacaacggatcagaagaagcgtttgcatacttttggatcacggattcttgtccacagactgtgaagtccataggaaacaaggctcctttcgaagtcttgagccttgcgggatctattgctggtgctctgcagatttgaagcaaatagagataaaagcctagtccttgctggtcctggtggtttcgccttggtgttgtactcttaagagatgttacctagatgatcaatttgtgaaataatcatatcacttttgctgagagacagattgttgaaacctcgtatgctgttcttgacttatgttgattggtctttgttttgcaacaaaataaattgttaagttcattaaaaaaaaaaaaaaaaagggcggccgc

SEQ ID NO: 1608 - DNA, 1242 bp, Brassica napus
  unsure (1)..(1242): unsure at all n locations
  Clone ID: BRANA-23APR03-CLUSTER8146_1
aaaaaccctgagcaaagccccaatgccttaatcaaataaaatcttctctttctctctagaactcctggaaaccctgatcaaagctccaatgacatcatctcaaggagacatggatcttgaggagtgggagttactcccaaaaagctatttaaaggatcttgatcataaaagatttcattttctcacattaatgtcaaacaaataaaatcttctctttctctcttgaactcctggaaaccctgatcaaagctccaatgacatcatctcaaggagacatggatcttgaggagtgggagttactccccaaaagctatttcaaggatcttgatcttgatcatgacgaggatcatcaagaagccatgatactggattgcttcctctccccatctactcaagatcctctccacaagatagagtctcctccaatatccatagttgtcctcacaaagcccctccaagtccccatggcttgggaaccagtgttggatcacgagaacaagaatatccccgatcttgacccggatccaacacagacccttttgatggagtctgttctgtcaccaagcgtatccttcaagaaaacgaaggaaactgaatttgccgacatgaaaattgacccaccagcgtggatcacgagtcctgtgccttcgatagatgctgcgagttgcgaaggaagcgttgacttgcgagtgaagaaagagaatgatgatgtgacgagtggacatggtggtgagaaactgaacttatggaagattggtcttaatgggatcggagctgtttgctcttttggcgttgcagcagcagctgctacagtatgtgtcttgttcctcggacacaacaacatcaaagtttgtaagaacaagaaccataagcttaggttccagatttactccgatgaccataagaggatgaatgaagctgtgaatcatgcaacaaaggttaatgaagcaatctttgcaatgaaatgtgttcctgtcgtaagagctcaaatatcttttggaggttactacgatggactttgaatcccaaccgtccaaaattctctttcgaatcaagggatgagatcgagtctaccctcatctaccagcttcataagttcaacgngcatgcatggtcattgtcaanacattttgtaaattttgttaaaatccaatctgttgatagatcattgtaaaatttcatgtaatattttaatcgttgtgaaanaacttaaanatntttttgtgaaaaaaaaaaaaaaaa

SEQ ID NO: 1609 - DNA, 1074 bp, Brassica napus
  Clone ID: BRANA-23APR03-CLUSTER8169_1
atgccaatcaaaaaaatgaggaaaatcaaaaaatgaggaatgtgatgattcatcatcgagttttctcctcccgcacaaagcccctctctatccccccctctctccctcctccccacctccatctctcctacaccgccgcatcagccgcatcatcaattgaatatccttctccaaatcactctccctcactcccccccacctcccattcttccatctctccgccgcagcttcctctcccaaccgagcggttccctgcatggcagacgaccccccactcccccaaccgccgaatcgaagcggagatggttccgtctccgcccctcctcctccttctcccgcttcctccgccatagattttctctcgctctgctctcgcctcaagacaacgccaagagctggatgggttaagagagatgtgaagaatccagaatcaatagcggatcacatgtaccggatgggtcttatggcgttagtttcttcagatatccccggtgttaacagagacaaatgcatgaaaatggcaattgttcacgacattgcagaagccattgtaggggatattacaccttcttgcggggtctctaaagaagagaaaaaccgaagagagagcgaagcacttgaacacatgtgcaaactcttgggtggaggagaaagagctgaagaaatcgctgagctgtggagagaatacgaagcgaacgcatcaccagaagccaaacttgttaaagatttcgataagcttgagatgatactacaggctttggagtatgaacaagagcaaggtaaagatttagaagagtttttccaatcaactgcagggaagtttcagactgatattggcaaagcttgggcgttggagattgcttcaagaaaaagaaagcggcaatagttagttctcacttgagctaaatactctctttacgctcaactttaatcattttaagagacttaaatgtggatctacaacttaagggtaactcttgttgctaaaaacttgaagcctaaaattctttaaaaaaaaaaaaaaaaaaaaaaaaaaaaaaaaaaaaaaaaaaaaaaaaaaaaaaaggcggccgc

SEQ ID NO: 1610 - DNA, 989 bp, Brassica napus
  Clone ID: BRANA-23APR03-CLUSTER82451_1
aatccttttttccatttctttctctaaattcaaaatttcatattttcaatctttgattctcagaagattcactcaatcttttaatttttctatttttaactctttaaactatctaagattttgcaagttatggcattgccaaacggagaatttgagattagtttcagtcacggtaagcttcacggcagtgatgaagaagtggtaaggttagggtttgtgaggttcagtcgatttttgcgtcttctttctcaaaattctgttttcgaaatcgaaccatgaaaccgtttcgaattcctatctacttgattcgccgccggtgaaaatgccgttgaagagatctaagacagaacccaatagttctgttcttgagtctctgcatcaagatattttgtttctcagattcgggtcctttgtcatgttgatcacgatgacctagagagactcaaacgtgtctctaaaacaattagaaatgctgtattagaggcaaagaagtcacattttgattatagcacaccaagaaagactctgccttttcgagacccaacatcgatcctcgagcaagattcgagtttgagtgatcaagatgatgcaatggaccctcctaatgcacccgttcgaaggaggaagattaaccgtgaggcagacttgtctaagatctctatggttttgtttaagtgaagaagaaagataacaagaaagaaaatgattagccgctaatttgtgcagacatgtgaagacaagcactagaacaagactagagtgttttgcatttgcttcagtttattatcagtgaagctctttataaaatgtttattatattcactggtcatgtgaatataacaattatttgcggattttgtaaggtttaaaaatattattttgtgaatagttctttcggttgtgattcagagtatcctaagtatttgttttgtccttttcagtagaaattattaagattctgtttaaaaaaaaaaaaaaagggcggccgc

SEQ ID NO: 1611 - DNA, 1488 bp, Brassica napus
  Clone ID: BRANA-23APR03-CLUSTER826_1
acaggtctaaatgttcttcttcactgcgcaccacactaaccccctagtggcataatccatatatcaactatggcgtctgcctcttccttgcttagatggaatccgcctttcacacacacgcgactgcgtcagaatcgcaccactcttttcttctcaagctccaccacaacgcgaattaaatacgttccctacgcaaatcgacttggaaatatatacaatccgcttcgggaccttaacagaatccatttgaccaaagtgcgaatcagatcgacaaaaccaaggaatctctgaagaatcccgctaaagccgcggttgtgctggtgctgcttttgtttcattatcttaattagccctttgctgcgtcgggtgggagaggcggcggtatctccttttagtcacgatcgacttcctcttcttcttcttcgtcttattctgtgccgagaacattggatccgagtagtagttcgaggtattcgtcttcttattctgggccgtgtacattgagtggaagtagtagtacgaggtactcggctccgtactatggaccgtctccgttcagtggaggtctctatgttggccctgcggttggatttggattcggaggtgggttttcgagcttctctccgattctggttggtcttgcagcctttattgtggtttctggattcctgtcagaccgccgttcacagggttccactttaaccgctactcagaaaactagcgtcattaaactacaggtgggggttgcttggtttggggaggaccctacaacaagatttcaatcgtcttgctgaaaatgctgatacttccacatcggagggtctcgcctatgttttaaccgatgcaacattagctttgctgaggcacccggactattgcatctcttgttattcatcagttgatgtgagacggagtatagaagacggagagaaacgatttaatcaactctccattgaagaacgggggaaattcgatgaggagacgcttgttaacgtgaacagcattaagagacaaagctcaaagattcggacagctagcggtttcagcaatgaatatattgtggtaaccatcttggtggctgcagagggtacacataaactccagccaataaatggaactgcggatatgaaggaagccttacagaaaattgggtcgatacctagaaacaaaataatggcagtagaagtactgtggacaccgcagaatgagaaggacactttgtcagaaaggaagctacttgaagattacccactcttgaggcctttgtaaatttgactctcataaacgtcgaacccttcgtacttgtttgcctctctgtctagttctgttataataatgcattgacaaataccatagcccggtttgaacaaatttcctggtttacctgttatttactaagttttgatatttgcagtaggatatgttgtaaacttgtaaatactattcaaaacaacattgtacaaaaaaaaaaaaaaaaagggcggccgc

SEQ ID NO: 1612 - DNA, 655 bp, Brassica napus
  unsure (1)..(655): unsure at all n locations
  Clone ID: BRANA-23APR03-CLUSTER82784_1
ctgcgtcactttacccagaaagctacagaaagaagaagaagaagaacnagaagaaggaatcgactatcgagcatgagggcgaccaagtctccgatccacgccgtgtcgacatgggtgaggagacagcctccaaaggtgaaagttttccttgcagttgcgtcgggcataacggctcttgttctgctgaagttcatcgttcacgatcacgacaatcttttcgtcgccgccgaatctgttcattccattggaatctctcttcttatctataaactcaccaaggaaaagacttgtgctggattgtcattgaaatcacaggagctaacagcaacatttctggctgtgaggctttactgcagcttggttatggaatacgacatacataccattcttgacttggctactttggctgcgacactatgggttatttttatgatccgttataagttaaaggctagttacatggaagacaaagacacccttcctctgtattatgtcgtaagtgtgtctatatggtattcttttcagcatcgttaacaatgttttatcttccttctttggttccttgctggctactcatgttgattatatatagcctctaaaaaaagtcttagattaaaaaatatttctttgttcttacagcttgtgccctgtgctg

SEQ ID NO: 1613 - DNA, 1363 bp, Brassica napus
  Clone ID: BRANA-23APR03-CLUSTER8302_1
catccaaatatcgtgtggacttgtgaaacttacgtaatcagaggagaaagaagagagtcacagagatcgtcacccatggctacgctcttcaccacaaccacctctcgtcctttctccgcaaatcctagcaagaccttctctccttctctctccctaaagcctaatgctctctctttctcactaacccaccaccgtcctcccaggcctctccggttttccaaaatccgatcttctctgccctccgaatcagactccgaaccggaaggtgggtattcaaatcacagacgaatggggcgagcaaccggctgaaccggaatctcagccggataacgctgcgtctgccgtttcagacgaatggggacgagaaatccgaacccgtacccgaggagtccgtgttcgggttagcggaacctcctactcagacgaacgagggcgaggagaaggaaagataatggtggtggatggttgatgaaaggagtgcaactaaggatgtgtatctgtaatacggtgtacggaactgaactagggttccaagctggatctgaaatccgcgcggaggttttggagatcgtgaatcagttggaagctctcaatcccactcaggctccggttgagaatccggagctcctcgacggcaattgggttttgctgtacactgccttctctgagttgcttcctctactagctgcgggttcgacacctttgttgaaggtgaagagtataagtcagtctatagacacaaagagtctctctatagacaactccactactctctccagcccctttgcagacttctccttcagtgctactgcttcttttgaagttcgaaccccttcaagaattgaggtttctttcaaagaaggtacgctgaaacctccagagatcaagtcaagtgtggatctcccggagagcgtgggtgtctttgggcaggaggttaacctctcgttcctgaagcagtctttgaaccctttgcaagatgtggcagctaacatttcacgggcaatctctggtcagccacctctcaagcttccgtttccagggaaccgtggcagctcttggctattgaccacttatctcgacaaggatctcaggatttcgagaggagacggtgggcttttcgtgcttgctagagaaggaagctctctgcttgagctctgaaatgtttgacgaggtatatatagcgagcaggcttcttgtaaaaacaatactcactagagggatcatcataataatgctgaatgcaaactattggaccagtttggtttcccttaaatactcttaaattgtaatcttgtactcatttgcttgtcacaagattagtaaagagagagttctagcaaaaaaaaaaaaaaagggcggccgc

SEQ ID NO: 1614 - DNA, 1571 bp, Brassica napus
  unsure (1)..(1571): unsure at all n locations
  Clone ID: BRANA-23APR03-CLUSTER8361_1
atctcatcgatagtgataacgttccagttttgtaagggggcgttgtgatttctacgactttaatcttattgtctttaatctcattaaatcagacgcccactatgatagcttcagctgcgttgttcagtcgacgatttcgtgtataaataggttcgtatctcacttctgcgaatcgtggtgaagattccgccggcagtggaaagctcctggaaagatgtctccagcggaggctgcggttttgtaatggctacctcagaatccgggaagctgatcacatgcggctcgacagatgatctaggtcaaagctatcgtcacatcgttctaggagactcccgagccgtttcctctgcctccggaggtttgtgtacagaaagctgaagctggatgggatcattgtgtggcggtaacatagagccatgaagtttatacatggggatggacggaatgtatacccacaggaagagtgtttggacaagtggaaggagattcgtgcgaaatgaacacctccttctctgcagagcaaggtaaatctcttttgcatgttaaaatatctcatgtaatgactggtcttatatctcatgttccaagtgcttccagaagtttcaacgcaggttctcatcttccacatgtgcatcatgtaatgatgtaacattgttgggattgtaaggtagtccatgttgaacacatttccattcactctctctaagtaatttaaagccaatcttactcccatatgtcataacaagttattgggtgaaaatggcattctctgatgcatatgactctgctatgtttgtgggtattaatggtgagatgaacaaactgacaagcctttctgctgctgcagtttctcaagcgatggttgcggatactaattccctttcttctctctttgttgctttattagagaccttagtccatgtacttaaacctatttgacatataagacgcagggatggcaaaccacataaccttaaccttccatgccaagctctctaagttcagacttttcatcaaaccataaatcattcaccctagccctgatattagatcagaaccaacgccaattcctacttttgatggacatgtaggtaatgacaactcgggcaatgatatgcaaggttctggagctgttaaaaaaacttacaccactgatggtgtaaagtgtgaacagttgtgtcgctttgaacatcgttggcagtggtactattgctattattacatagtataagttagtgaaaaccatgtaatggttaatcttcaagagtataggagttttgaacactgttgtggactttagctgatgctctactaccactttttaaaaacaatcctctaaatacaagtattctacctctttcggccatgctaattattgcttctgattctttttccttctcgattttttgtacacagaatggcaaatacgtttgctcttttttanaaatgtccagtgcttataagtgcttttatttaaaaaaaaaacttttgtacgttgccaggcaaactatgtacttttnttaaaagtgtcaatgtgatttcagattttntaaaaaaaaaaaaaaaaaagc

SEQ ID NO: 1615 - DNA, 752 bp, Brassica napus
  Clone ID: BRANA-23APR03-CLUSTER8441_1
aagtcgctttgatccaagctcttatctcgattcgaagtgaggaaaagaacaaatcggaaaagatcgaagtaactcaaaaacaacttttgtctcgcgaaaaaaagatatgaagaatggagtgcgtgttcggtctcgtcggtaatggattcgctatcgtggcggcggatacgtcggcggttcacagcatccttgtacacaagaacaacgaggacaagatcatgccccttgactcacacaagctcatcgccgcaagcggcgagcctggtgaccgggttcagtttacggagtatgtacagaagaatgtgtcactgtatcagttccgaaacgggatccctttgactaccgctgctgctgccaacttcactcgcggtgagctcgccactgctttgagaaagaatccctactctgtgaacatcctgatggctggctacgacaaagaagcaggcgcatctctatactacattgactacattgcaactcttcacaaggttgacaagggcgcattcggttacggctcatacttctccctctccactatggacaggcacttccgcagcgacatgtctgttgaagaagccatcgaattggtcgacaaatgcatacttgagatcaggtcgaggctggtcatcgcaccaccaaactttgtgatcaagatcgtcgacaggatggagctcgcgagcacgcttggcgtcagtctgtgcaagatgtcaccactgctgctggctaaggctcttatgtttggtctttttact

SEQ ID NO: 1616 - DNA, 1200 bp, Brassica napus
  Clone ID: BRANA-23APR03-CLUSTER84471_1
accaccaccacccctagcttgtctttcaatggataccatgagagataagcccataaaattctcatcttctgttttctgtttgatcattttattatcggtgtataactctacggcggagctacgacggttggttcaaccaccaaaatccgatggtacactcagttttctcgttgtcggcgactggggaagaagaggttcttataatcagtctcaagtagctcgtcagatgggaaaaacaggaatgaatttaaatatcgatttcgtcatttcgactggagataacttttacgatgacggaataacaagtccatatgattgtcaatttcaagattcttttaccaatatttacacagcacccagcttacaaaagccatggtataatgtattaggaaatcatgattatagaggtaacgtcgatgcacaaatcagcccgatactgaaggatttggactgtcgatgggtttgtttaagatcttacgttgttaatgccgatatcgtcgatattttcttcatagacacaacaccgttcgtagataaatattttgatgaaccaaaggaccatgtttatgattggagcggcgtattaccaagaaacaagtatcttaacaatctcttagcggatctcgatgtatcgtttcaagaatcagtggcaaaatggaaagtagtggtaggtcaccacacaatcaaaagtgcaggtcatcacggtatcacgaaagagcttgaaaagcaactcttacctatccttgaggctaatgaagtggatatctacataaacgggcatgatcattgcttggagcacataagcagcattaacagtggaatacaatttatgacaagtggcggtgggtcaaaggcgtggaaaggggatgtgaatgagtggaacccgcaagagatgaggttttactacgatggacaaggtttcgtgtcggtttatctatcggaagcagaactgcgtgtagatttttacgatggatatggtcgcgttctgcatcgatggaacacttataagaaggggatttatacggatatctaaacgatctgattacaaaaagttgagaaacaaatattcatattagtatttcattgtttttatatttggtggtggtttttcacgtgacataaacattttttatgatgtgtgactattatgcagctaataaagtttgagacagggaaaaaaaaaaaaaaaaaggcggccgc

SEQ ID NO: 1617 - DNA, 777 bp, Brassica napus
  Clone ID: BRANA-23APR03-CLUSTER85009_1
aatccgatacacacacacaaaaaaactattagattctggtcactatacggcggaaggcgctgaggaagtggatgacagggaggaatatgtagtagggacaccgatgaacgagaggaatccggcggcggcaggatcttgctcgtcgaggaagagatcattaggagctctgaaggcaccatgaacgcagaccgtcgctattccgaccaagagggcagatatgagtacagatccaacgctggtgaagaagatgactgctattgtggagaggataagagcaccaagagtttcgaggtcagagaaagatcggccgaagaggatgagaggtcgatcgactggacggaagaggtaaaggaagagccaggaggcggcgaggcagacgaggaggacgagagagaatggatgggcgagaagagagaaagcgaggatcagagatacgatgcagacgtaattcgccctgaaataagaggaattcttccggagtcgcgacgctgcctcagaaagagagtccggcttggcgaaggcggatcgatcgaggagctcggaccatggacggctacgggacagaccatcacggaccgtttcggtgaagcggttcacaaatgcacggacggctggaggttgcgattcggttaaggttgggggctgagtggtggaaaccggaagcacattagaatctgacgacaccattcgattcttcttcttcagcgattatgatcggatatcgggtatgtaataaatataaggggttggtctgaagaagccggacgcggggtcgac

SEQ ID NO: 1618 - DNA, 753 bp, Brassica napus
  Clone ID: BRANA-23APR03-CLUSTER85663_1
accattgggacccttcgtcctcgcgattaattattttttaccttagggcttggagaacacgtcctgatctcaagatgcggacattcttgatcaaccacgctaaaaccctcgccgaccaaactcgtcgtcaacctcacgcaagccgacgcttactctctcttcttccatcttcgtcagcatcatctcctcttcttactctgtctcgtttcttgtatgccactttggatatgtctgcttctgattccacttcatctcttcttgtctccatcaatccgaagggtatcaagggtttgcatcgcacaattgcagctgaaatagaatcccgtgatggttttaatcttcctcaaaaggcagccgaaccttcaaagaccacaccagatgctttccactgtaaaagccctcgcttcggacaggttcctggaacatggcacttcagacacacaatccttccgcaacaagaaaacaaggttccagccgcagtgaatcgtcacagagagatgcacagcagctccggtaagagtccagccgccgccaagcaacccgcggccaagagtgccaaaaaggtttcctccaagagctccaaaaagaaacccgccaagagcgccggcggcggcaagggctcctccggcacattgtttccgaaacgtagcaagttccctaaacaccaccgaggaagactaagaggtatatcttcaggcgataatcgtatctgtttcggaagatacgcgcttcgaacacttgcatcggcctgga

SEQ ID NO: 1619 - DNA, 825 bp, Brassica napus
  Clone ID: BRANA-23APR03-CLUSTER8589_1
atcacagctttccaaagtctaaaagcccagtttcgtacaagaaaccaaccttgcatcttgcaattgatccaaaaatggagaatatactgggtcttctgagaattcatgtgaagagaggtgtgaatctcgccattagagatacctcaagcagcgatccttacatcgtcttttactcaggaaaacagaagcttaaaacccgtgtaatcaaacatagtataaaccccgcatggaacgacgagcttactctttccgttacagatccaaatctcactgttaaacttacggtttacgacaaggacttgttctcagcggatgacaagatgggagaagcagagtttagtattgctccatatcttgaagccattaaactacgccataaacttgaaggacaacttcccaacggaaccataatcatgaaggtacaaccgaccagacaaaactgtttgtctgaagagagccatattttgttgaaccaaggcaagcttgtgcagaatatgttccttagactccagcacgtggagtgtggagaggtcgaggtacagctcgagtggattgatgttcccggttcaaagggtttttaagtctatccgatccgatccttaatcccttatgcatacatggtttagaaattagaactacggcgttgttcaaaactggtcagtgaaaggatctcaaactggttatgtaatgaactcttttgtattttaatgcaactttatccgtagctttctaaaacatgagttatattaatattttaattacattattaagttttaataaaatcaaataatttaatcaaaaaaaaaaaaaaaaaagggcggccgc

SEQ ID NO: 1620 - DNA, 1118 bp, Brassica napus
  Clone ID: BRANA-23APR03-CLUSTER8608_1
agatccacattctcgtttaaacgcgagagtcgcggcttaatagtacacgtattccccatcaaaacgcacacactgcgtcaaaaggctactagttacgattcgcccctccatcctgcgacttccccccgctacttaaaagcaggacctcacattcgggttcctcccatcccaccaacctcgtcccaccaacttaataatctcatacacttcttctcctcctccctctaaccacgggcccagccaaagtccacggggtgtccatgtatgtccaccagcaagcatgttctctccggtcgttccgagaaggaagtagcgttcgagttggtccccgtcgacatgaatggccggcggtcacaagcaggcgcctttcctttccctcaaccccttcgttccagatccctcgctctccaagacggtgacttaactctcatttcgagtcacggagccactcacaggagtacgtagcggagtgagtacagtgagaaaggcgagaagcttatgtgcccaggctgcaacaaagcaaggcactcaccaaggtctggcttaacgttgaaggtcaacagtttgaccctatcgcctctaagatcgccttcgagcgtgtcttcaaaggcatgtttggcatgaccaccgatcctgccgctgtccaagatctcgaaggcaagctcgtcagggtcttggatatctacgaggcgaggctctccaaatccgagttcctcgcttgtgattgcttcactttggctgatctccaccacctccctgtcatccactacttgatgggtaccgactccaaggccctctttgagtctcgccctaaggtttgcgagtgggtcaagaagatcactgccaggcctgcttgggccaaggtcgttgacctccagaagcagtaataaggcttttgtcgatgggttttgtctcatctctgagctttctctaataaaatgattgtaccctcctcctctgtttgtgttttgtgttttgtatttgaatcgtcactctttccagtttctttacttttttctctgtttgtgtgtttgttgggtcttttatgttcaataaaaacaaacagactttatgtaaaaaaaaaaaaaaaaaaaaaaaaaaaaaaaaagggcggccgc

SEQ ID NO: 1621 - DNA, 1874 bp, Brassica napus
  Clone ID: BRANA-23APR03-CLUSTER86_1
tgacaagaagtgtctctctaaacaatccacctgagggagaaataaatagtaagttctgcgtgaaatgctcccttccatcattattaatcccaaggccgttgggtagcttctctctttgtccatggggaggtcgggaggtagtagtaaaagtttcccatgtcaagtcaatataggccgaacgggtaggttcgcgggacgaaagtctctgggatgtgtggtgggcgcgcgcttggagctacatgcagtggggataagattcttgtggctaacagaggtgaaattgctgtccgtgttatccgaactgctcacgaaatggggatcccttgtgttgctgtttactcaactatagacaaggatgcactccatgtgaagttggctgatgaagctgtttgtattggtgaagctccaagcaaccagtcgtatttgttgataccgaatgttctgtcagctgcaattagccgaggatgcacaatgctccatcctggatatggattcctttcagagaacgctctttttgttgagatgtgcagagaacacaggatcaactttattggaccaaatcctgatagcatccgtgtcatgggtgacaaatcaactgccagggagacgatgaagaatgcaggtgtcccaactgtaccagggagtgatggactattaaagagcacagaagaaggagtcaagctcgccaatgagattgggttccctgtgatgatcaaggcaacagctggtggtggtggacgtggaatgcgtcttgctaatgaaccgtcagagtttgtgaaactgctgcaggcagcaaagagtgaggccgcggctgcttttggaaatgatggagtttatctggagaagtacgtccaaaatccccgccatattgagttccagattcttgcagataaatttggaaatgttgtgcacttcggcgagcgtgactgcagcatccagagacggaaccaaaagttgctggaagaagcaccttctcctgcactgacccctgagttgcgaaaagccatgggtgatgcagctgttgcagcagcagcgtcgattggctacgttggtgttggtaccgtggagttccttttggatgagagaggttccttctatttcatggaaatgaacactagaatccaggtggagcatcctgtgacagagatgatttactctgttgatttgattgaagaacagattcgtgttgcaatgggagagaaactgcgttatacacaggatgagattgtgcttagaggacactctattgaatgtcgtatcaatgcagaggacccattcaaaggattcagacctggacctggaagaataacatcatatctgccatctggaggtccttttgttagaatggatagtcatgtgtatcccgactatgttgttcctccaagctatgactctcttcttggaaagcttattgtatgggctccaacgagggaaagggcaattgagcggatgaaacgtgcacttaatgacactattattacaggggttcccaccaccattgagtaccacaaacttatccttgaagttgaggatttcaagaacggaaaagttgacactgctttcatccccaagcatgaggaggaattagcagagcctcatgaaattgtgctagtgaaagatttgacaaacgcagctgcttagaatccatcagctcttaagatgaaacagtaattttcacatggggaatcaattatggcaatgcccgcaaagtcctcttacctgggtgtcttcctcgtcttgtgatgttatgcaacagagcttcacatggtttcggctatagttgtgtttttttttcgttgatggtatttacagtacttcattccagaactacaagaccatttcaagtattttctaagttctttttgttattagtt

SEQ ID NO: 1622 - DNA, 1092 bp, Brassica napus
  unsure (1)..(1092): unsure at all n locations
  Clone ID: BRANA-23APR03-CLUSTER8705_1
aatcgaatagctcctctcaaccaaaaacttatttttttgtgtttacccccaanaactaatattacaaatacaaagtccccanaagttagagaggagaatctatcatttcttcatcttaaagaataataatggcaaaattcgtcatcttcttccttgcctctgccctatgtttcaccaccctccttcacttcgcggccgctgatgccgacgacttcgaccgcttccacattaagggctccgtctactgtgacacctgccgtgttcaattcatgacccgcctcagtaaagtcctcgaaggggcaaaggtgaagctcgagtgcaagggtcgtgagaaccagacagtgacactgaccaaagaagctatgactgacaaagacggaaactacgagatggaagttatgggagaccacgaagaggaagtgtgcgagatcatcctcgtccaatcaccagacgcagactgtggcgatgtgaacaatcaagagttcctaagaaacgcagccaggatcagtctcacggctaacgatggcattgtctccaacgagactcgaaccattaacccacttgggttcatgaggaagactcctctcgctgactgtcctcaagctttccaggtgcttggattgtctcttaccgtgttcttctaagctttatatatttattctacccatatatatccatctctcaacattttatttttggcaactctttctatttcttatataaagcatttttttttacatgttgtgtttgtgtttacttaactaacggtgttttcatttcatatcttgtgtttgtgttccagcaatttttcttttgctgtttaactcttgggtgttcttttattttctaaagaatgatctgattaccttccaaatttgtaagtctagggagtttgttttaagaatgatttgaacacgtatacatgatttgaacacgtatacgatattgcgatccaaagtttttacagttgactacataataacatatttagcttacaaaaaaaaaaacatatttgtaatttgttgaattggataatattttatatcatatatgtttctatgtgttttatattgttattgtaaattgtggttc

SEQ ID NO: 1623 - DNA, 1014 bp, Brassica napus
  unsure (1)..(1014): unsure at all n locations
  Clone ID: BRANA-23APR03-CLUSTER88022_1
attcctccctcattatcactattctctttcgtgactctcaggggacgctcttcttgtctttcgtttttactaccaatcttaactcatggtgagcgataacggtgagccgatgatggtaataacaaatgagtctcagagatctgttccgacgccgtttctcatcaagacctttaacctcgttgaagatccttctatcgacgacgtcatctcatggaacgaagacggttcctccttcgtcgtctggaacccgactgacttcgctagagacttgcttcctaaacactttaaacacaacaacttctccagctttgtccgtcagctcaacacttacggtttcaagaaagtagtccctgatcggtgggagttttcgaatgatttcttcaggagaggagagaaacgtcttctcaaagagatccaacgtcgaaagttaacgcctcaagcagctgctgttccgccgcctgaagtggttgcggcggcggcggctcagagagttcagacgacgaaaacggtcgtgtctccgtcgagttctgcggaagatcaggcggtatctccgtcgtggtattgtcaaaccggaaacggtggtggcttgtctgttgagctgttagaagagaacgagaagcttcggagtcagaacatccagcttaaccgtgagcttactcagatgaaatccctctgcgataacatcttcagcctcatgtccaacttctccggatctcctcctgaacggagctcatctcccggagctagtaccagtcatgacgcgatgaaaacggtggagtttttaccggcgaagcggttttcggttgagacggagggtgaggaagaagcgagtcataggcttttcggtgtttcgatagggctgaaacggacgagaagcgaaggtgttcaggtgaaggcggtgggagagagacccggcggaggaggggagaaggaggagacgccgtggctgagacactantataggaccaatcagagagtctgtaattgaacggctcggattgtgtgtgcgcgaag

SEQ ID NO: 1624 - DNA, 916 bp, Brassica napus
  Clone ID: BRANA-23APR03-CLUSTER8841_1
agtttggaagctagacttgtatttttcccatgattcacattaacaaaacgaagagataagcttttgctacaatctcatcttttttgtggctcactcatcttcacacaacaactctatataaatccctccttcatcgattactttctgtttcataataaagagatagagagagacttattcgataactatggagataacaacgaccttcacggttttgtttactcttatgattttcttaggaatctctatcaatggaggtttgtctcaaggacatcaacatcttgtcaagaagacacgttcttctgcggttgtagtaggaactgtctactgcgacacttgtttcaacggtgccttttcgaaatcacacaaccacttgatcccaggtgctgtagttgcagtggaatgtattgacgagaactctaaaccgagtttcagacaagaggtgaaaacagacgagcacggccaattcaaagcaaagttacccttcactgtgagcaaacacgtgaagaagatcaagagatgctccgtgaagttgctaagtagctcacagccttattgttccatagctgcttctgctacttccacttctctcaaacgtcttaaatcgagcaaacacggggagaacactagggttttctctgcagggttcttcactttcaaaccggagaatcaaccagagatatgcagccagaaaccgataaatctccgtggatccaagcctcttttacccgatccagctttccctcaaccgatccaagacccggttccaaacaatccttcccctctcccaaacctccctatcgttcctccactccctaacctgcctattcctcaacttcctcctcttcttcctccaggaccaccacagaaacaaccttccttgcataacaagaaagaaagttccttggatgacaag

SEQ ID NO: 1625 - DNA, 1272 bp, Brassica napus
  Clone ID: BRANA-23APR03-CLUSTER8844_1
aatcccagaccacagcaaaaatggatagtcacaaaaggagtttgggtttcatatctctcgcttttctcttcatcacttgctcttctgctgagttcctcattcaacaggtcacagaaggcaaaggaacagagaacaacagttcttacaatgtcgaggcgaatcttggagagacaagagcgtttagagaggagcgaccatcaagtaagatagtgacaatagcaggctactcggtgattaaagggagattcgaaccctacgaatcctctgttttcgaagcagctggttacagatggagattggttttgtacgtgattggtaataaaaacgacggtggagctggccatatatcactttacgtgaggatggaagagaccgagtctcttccctatggttgggaagtcaatgttgatctcaaactctttgtccacaatccaaagacccataagtacttgaccgtcacagatggaaccgtgaagcgatacaacgctgcaaaaaaggagtggggattcggaaaattgatctctctttcaatattcgagaacacgaacaatggctacattgtgcaagacacttgttcttttggtgctgagatcctcattgttaaaccagctgagatacaagagaaagtcacattcatatcaaaccctccaaacaatgttttcacttggaagatacttcgtttctccagcttggaagataaattttactattctgccgattttctcgttggagaccgatactggagattaggctttaacccgaaaggggatggagatggacgaccacatgcacttccactcttcttatttgctcaaggctttaaggaaaacgcagttgctacaaacacttggggagcagttaacttgcggttaaagaatcagcgaaactccaaccacagacaattatattctgcagcttggtacccgattcgaagcgattatggtgtaggagtgaacaacatcatattgctatcagatttaaaggatccgtcgaaagggtatttggtgaatgatgccattatctttgaagctgaaatggttaaggtctctgtgaccaacatcgtctccgtttagtaaactctacttgtttgtcatatgggtcaaacaaccttataaataaagagacgtttaatgaggttttaataagatgaagttgtcgatgcttgtgatgtaatcgtcatttatgttcatcgagtgtgtgttttctggtttgttattaatgaaatgaaactttcatggcaaaaaaaaaaaaaaaaaaaaaaggggcggccgc

SEQ ID NO: 1626 - DNA, 741 bp, Brassica napus
  Clone ID: BRANA-23APR03-CLUSTER8873_4
cccgttacttttgtctccaccagaacagaagttgcagactttatccgaatctagggtttattcgaatcaggtctcagcttctgtgtcgtttgcccatcagatcaacaaagtttcatgtctgaacttgattcccaggtccctactgccttcgacccgtttgctgatgcgaatgctgaggactcaggtgcgggaacaaaagagtacgtccacatccgtgtgcagcagcgcaatggtaggaaaagcttgacaaccgtccaggggctgaagaaagagtatagttacagcaagatacttaaggacctcaagaaagagttttgttgcaacggaactgtcgttcaagactctgaacttggacaggttattcagcttcaaggcgaccagaggaagaacgtctccacgttccttgtccaggctgggcttgtgaagaaggacaacatcaagatccatggtttctgagctgcttgtgttgcattgttcctagtctgttttctttattgttaatcctcccgttccaaaaaccataagtacctgtttgatgatctcttgttactggtttattccgaatcattgtcgtatgttcattgcgttacacttttcttcttgtgtaagatgagattgctaagaaagcttagttgacttcatctcttctctgaatgtctttccatacggttctcatacctttgttaattactactattgttcttgttttgtcaaaaaaaaaaaaaaaaaaagggcggccgc

SEQ ID NO: 1627 - DNA, 955 bp, Brassica napus
  Clone ID: BRANA-23APR03-CLUSTER900_1
aaaaaaaaaatacttttattatcttccttttccagatcggagcacaaatttgaattcagagaagcgaaagcgacagagagaagaagatggctcgtaccaagcaaaccgctcgtaaatctacaggaggaatgcattatcttcccttttcgagatcggagcactaatttgaattcagagaagcgaaagcgacgcagagaagatggctcgtaccaagcagaccgctcgtaagtctaccggaggaaaggccccgaggaagcagcttgctactaaggccgctcgtaagtctgcaccaaccaccggaggagtcaagaagccacatcgttacagacctggaactgttgctcttcgtgagatccgtaagtaccagaagagtactgagctgttgatcaggaagcttcctttccagaggcttgttcgtgagattgctcaggacttcaagactgacctgcgtttccagagccatgcggtgctagcactccaggaggcagctgaagcataccttgtgggactctttgaggacactaacctgtgcgccattcacgccaagcgtgtgaccatcatgcccaaggacatccagctcgctcgcaggatcagaggagagcgtgcttaagtgttggttgtcgtttcgttgggtcgtattatgtgaatgttggggtttgttgttctctaaatagacgtagctggattttagataatggtcttttaagaaggcctttggtattagtaagactctaaaacaatgatgaatgatggtttgttggttttttcttattttcttgtcccagtattatttgcttttgtgtatttgcagctacgtgttttgtgaacctttcgttgttgaatctcatttctaaaacaattagtatgttgatgctaaaaaaaaaaaaaaaaaaaaaaaaaagggcggccgctgagtttaaaaaaaaaaaaaaaaaaaaaaaaaaagggcggccgc

SEQ ID NO: 1628 - DNA, 729 bp, Brassica napus
  Clone ID: BRANA-23APR03-CLUSTER900_3
gttttcttcgttagtcgtttgattagccgattcgtcttctggatttagattctagatggctcgtaccaagcagaccgctcgtaagtctaccggaggaaaggccccgaggaagcagcttgctactaaggccgctcgtaagtctgcaccaaccaccggaggagtcaagaagccacatcgttacagacctggaactgttgctcttcgtgagatccgtaagtaccagaagagtactgagctgttgatcaggaagcttcctttccagaggcttgttcgtaagattgctcaggacttcaagactgacctgcgtttccagagccatgcggtgctagcactccaggaggcagctgaagcataccttgtgggactctttgaggacactaacctgtgcgccattcacgccaagcgtgtgaccatcatgcccaaggacatccagctcgctcgcaggatcagaggagagcgtgcttaagtgttggttgtcgtttcgttgggtcgtattatgtgaatgttggggtttgttgttctctaaatagacgtagctggattttagataatggtcttttaagaaggcctttggtattagtaagactctaaaacaatgatgaatgatggtttgttggttttttcttattttcttgtcccagtattatttgcttttgtgtatttgcagctacgtgttttgttaaaaaaaaaaaaaaaaaaaaaaaaaaaaaaaaaaaaaagggcggccgc

SEQ ID NO: 1629 - DNA, 878 bp, Brassica napus
  Clone ID: BRANA-23APR03-CLUSTER9033_4
acacgccggcaatttactaaaccaatcattgtcgacataagtttgatctctctctctcaaatcgtttcttcgcgatcggatctcatcggaagagacgcacaattcacgacgagcgatggcttcaggtttcagcggcgatgaaactgctcccttcttcggattcctcggcgccgccgccgctctcgttttctcctgcatgggagcagcgtacgggacagcgaagagcggggtcggtgtggcgtcgatgggtgtgatgagaccagagcttgtaatgaaatcgattgttccggtcgttatggctggtgtgttaggtatctacggtctcatcattgctgtcatcatcagtactggaatcaacccaaaggccaagtcttactatctcttcgacggctacgctcatctctcttccggtctcgcttgtggtctcgccggtctctccgccggtatggctattggcatcgtcggcgatgctggtgttagagcgaatggtcagcaaccgagtgggtttgtgggaatgattttgattctcatctttgctgaagcacttgcgctgtacggtctcattgttggtatcatcctctcgtctcgtgctggtcagtctagagccgagtgaactcagaaagccttttggtcaagtccttttgtaatgtttatgatatgtttcacttttggttttcttttgtggcattgtgagtttttgagtttctcatgggaacaagcaaaacatgggtgataatcatttgactttctggttctaattatatttttcatttgcacactctatggaatacttcaataattaataaaacaatatgatgatttagtaaaaaaaaaaaaaaaaaaaaaaaaaaaaaaaaaaaaaaaaaggggcggccgat

SEQ ID NO: 1630 - DNA, 1373 bp, Brassica napus
  unsure (1)..(1373): unsure at all n locations
  Clone ID: BRANA-23APR03-CLUSTER910_15
ccaaaaatggaataggaaatacaagaacaacaatngaccaaatacaacttcacaggggaagattanaaaagcagagattttgngagttcanagctaaataaatcggccaanaaaatgtttgtngcctcctcaaaacaacatacaactgaagcaaagagtatcataataacactgnatcgactttattcattttttctatcagagttgagactgaagaagcaaaaggatttganattgtttcgtgaagtcactaagcacttttcttcacctcagcagccttgatgatgtcnanaaactcaggctttanagaagcaccaccgaccaagaaaccatcaacatcggcctgaccacctagctccttgcagttaccaccattgacagatcctccatagatgaggttcggtttctgataaatcatacaaagatacgacaaaggaagtttaacaaatatacaaacaatctctttcgctgctgctcactcgcatgataataacctttaattcattcactttccagggacgaagttggtggcaaaggcccatgcgttgttgttgactggatcagccaaatggtcagcaagattctccaacggtccctttccggttacaatagcctgaacaaagaatccaaacatagagaacatagccaaccttccgttcttgatctccttcaccttcaactccgcgaaagcctctgggtcggtagcgagacccagcgggtcgaagctgcctcctgggtaaagcaagtcctctgcttctcccaatggtccctctccggctactctgtaaccctcaacagctcccatgaggatcacctgagtcgcccaaatggctaagatgctttgagcgtgaaccaagctcgggttgcccaagtagtcaagccctccttcgctgaagatctgtgaaccagccttgaaccaaacagcttctccgaacttcactccgttcctagccaagagctcagggaaaacgcagcctagggctccgagcatggcccacctgcagtggataacttctagctcacggttccttgcaaaggtctcggggtcagcggatagaccggcggtgtcccatccgtagtcaccagggaactctcctgtgaggtagctcgggggctctccggagaatggacccaagtacttgaccctgtcggatccgtaccatgggctgccagatggaccggtgggtttgacggtttttctcatggtgacacggccggttccaaagacctcggaggctcccggtgagagcttcacggcctttccggcaaaggcaggggaggacagagccatggttgaggcagccattagaacttttcttgatcttttttagtttttgtgtttttttttttttgcgaccggacgcgtggtcgac

SEQ ID NO: 1631 - DNA, 1037 bp, Brassica napus
  Clone ID: BRANA-23APR03-CLUSTER9251_1
acgagaaacgcttcagaaagcagttaagcttcagattaacgaagaatcgattccggtggcgaccatagtgtgtatcgtgaacttataatctcccatcttaaaaaagaaaaaaaaagacaattcagaaagttaatcttcagatatcgatggcgaccaaagtatatatcgtgtactactcaatgtacggtcatgtggagaaattggctgaagagattaggaaaggggctgcttccgttgaaggtgttgaagccaagctatggcaggtaccagagacccttccagaagaggcactctctaagatgagcgcaccaccaaagagtgaatcaccaatcatcacacccaacgacctaaccgaagctgatgggttcgtctttggattcccaacgaggttcggcatgatggctgctcagttcaaagccttcttggacgcaaccggtggactctggaggactcagtcactcgctggtaaaccagctggtatcttctacagcactggctctcaaggtggtggccaagaaacccccgcattgactgcgataactcagctggtcccccccgggatgatctttgtcccgatcggttacacatttggtgcgggaatgttcgagatggagaaagtgaaaggaggaagtccctatggagcaggaacattcccaggagatggttcaaggcagccaccagcccttgagctagggcaagcttttccccaaggcaagtacattgcacccctccccaaaaagctcaagggattttctgcttagagtttttcaaaaaaggaaaacaaaccaagccccggtttggttctctgcttttttattacccaataaaaaattccctcttcttgtgatttcatttgggttttgattaccccccccctgatattgtttccccccaaccattcttgtcttgcttttccgtattagatatgtaatgatttatgcttgtctttaaaaaaaaaaaaaaaaaaaaaaaaaaaaaaaaaaaaaaaaaaaaaaaaaaaaaaaaaaaaaaaaaaaaaaaaaaaaaagggcggccgc

SEQ ID NO: 1632 - DNA, 693 bp, Brassica napus
  Clone ID: BRANA-23APR03-CLUSTER9291_1
atttataaaccctaaaaaaccattagggcgaaccctttaatgcgaacgcgaagtctgaaagtgaatagagctggcgagtggggaagctgggacgggaacgacgacggcgaagagaaaatgtttgtgaaagtagaacgtgcagcggaagcctggaacgaccggtcacacattgactgtgaaggtcgttgacgccaagccggtggtaccggccgcgaggaaggctcgtccgggggtttgtatgggccgtccgtctcagccgagtcgaatctctgagtgtctcatcggagaagaaaccgggtgtattctcttcactgctcgtaacgatcaagttgatcttatgaagccgggggaaacagtgatagtgcggaattcgaggatagacatgttcaagggtacaatgaggctaggggttgataaatggggacgcatcgaagccactgagcctgcctctttcacagacatctcaaagaagtaacaatctcatgtctcttgttgagtacgtaactgattaacgttaatgatcagtgatcttttcttagtgtggactggtgaatgtctttgatttagatgatgaagatttgtgagtggttcttgtaggatttccttttaccctaaaacatgagacatgagtattaatgcaattgctccttttaatcttaaaaaaaaaaaaaaaaaaaaaaaaagggcggccgc

SEQ ID NO: 1633 - DNA, 605 bp, Brassica napus
  Clone ID: BRANA-23APR03-CLUSTER929_2
agatcagattccatatctcattccttttgagttttgtgtttctgtttcatcggagaatgggcggaggcggcaaagtttacaccttggcggaggtttctcagcacactaccgcccaggattgctggatcgtcatcgacggcaaggtttatgatgtgaccaagttcttggacgaccatcctggtggtgacgaggtcatcttgacttctacagggaaagacgcgacggatgattttgaggatgtgggacacagttcgacagctaaagctatgctagatgagtactatgttggtgatattgatacagccgctgtcccagccaaaaccaagtttgttcctcctccttctcctaagcagaccgagtctgaccagagcaagagctcggattttctcgttaagatccttcagttccttgttcctcttcttatcttaggcttggctctcggtatccgttcttacaccaagactcctttcttcttcttgaggactctattgggttgggtctttgagtctggttacactctttgccctcctttatatctatctgtctgtcttgtaaagacttcaaaatattgtattctctttttgaaaatcaagtggatcagctac

SEQ ID NO: 1634 - DNA, 1034 bp, Brassica napus
  Clone ID: BRANA-23APR03-CLUSTER9310_1
atatccgctttactgttttcctcccctcgtcttttgcctttctcttttctctcccccaaactgttctcttcttgaaatatccattttacttacacaccgccaccgcgctataaagcatttattcctcctctcccaaagtttctcccttttctactccaaagatgagtgaggaaacgaagcagaaccagacgttgcagcgacctgctcctcgtcttaacgagaggatcctctcttccttttctagacgctccggttgctgcacatccctggcacgatcatgatattggccctagagctccacagattttcaatgtggtggtttgagatcataaagggaagcaaggtcaaatatgaactatacaataagactggactcatcaaggatgatcgtattctctactcatcagttgttttccctcacaactatggtttcgttcctcgcacattatgtgaagacaatgaccctattgatgttttagtcatcatgcaggaaccggtgcttccaggttgtttcctgcgtgctcgtgctattggattaatgcctatgattgatcagggtgagacaaagaacttccacctcgcagtctctcagaaatccggcgtttctttgaagattacaagaagaatgagaacaaggaagtcgctgtaaatgattttctaccgaatggtcctgccgttgaagccattcagtactcaatggacctttacgctgagtacattcttcacaccctgaggagataaaacaagaacattcctgccaaattttttgctctgcaaatctcagattttgtagcagaggaaaaagaaaacaaaacaagaatttgtctgatatttggattttgaataagcacgtgttcctgacactgttctaatacttggcttcatagcttgttgttgttgttgtcttctggggatctgttgtctgaacaataacccctattaagatttgctttctcacttgtattgtaatcttctatccatttaaagtttcgagttagttccaacgaaaaaaaaaaaaaaaaaagggcggccgc

SEQ ID NO: 1635 - DNA, 865 bp, Brassica napus
  Clone ID: BRANA-23APR03-CLUSTER9310_2
gactccaaaggtatgtttcttttcatcaatctctctacttttgttctttagatctcaaagttggatgcttttcgaagtttgctcatctgggttttgctccaaatctcaaactcatccatcgggtttattgagaagcaaactcagatctttaagatgactgaggaaacgaaggagaaccagcgacctgctcctcgtcttaacgagaggatcctctcttccttgtctagacgctccgtagctgctcatccctggcacgatcttgagattggccctggagctccacagattttcaacgtggtggttgagatcacaaagggaagcaaggtcaaatatgaacttgacaaaaagactggactcatcaaggtggatcgtattctctactcatcagttgtttaccctcacaactatggtttcgtccctcgcacactttgtgaagacaatgaccctattgatgtattagtcatcatgcaggaaccggtgcttccaggttgtttccttcgtgctcgtgctattggattaatgcctatgattgatcagggtgagaaagatgacaagattatagcagtccgtgttgatgatcctgagtacaagcattacactgacatcaaagaacttcctcctcaccgtctctctgagatccgtcgtttctttgaagactacaagaagaacgagaacaaggaagttgcagtcaatgattttctgccatctgagaatgctattgaagctatccagtactctatggacctttatgctgagtacattctccataccctgagacgttgaagcttcatctcctcagaacgtttcctgcaacatcttggtttctgtttctttcaatgatgataagaaacagctttttatctta

SEQ ID NO: 1636 - DNA, 1021 bp, Brassica napus
  unsure (1)..(1021): unsure at all n locations
  Clone ID: BRANA-23APR03-CLUSTER9326_1
aaaagcaaatcagctcagagcttctcagcctctaggaaggttttagtttcgcctattcattaacaaccggaatcgaaattagactcgtccgtttcggagctcaccgtcgacgatggcgccaatcatcagatctagcccctctctcgctttcctcgttttgcagattagcttgatcttctttgcttccactctcccatactcttctgggtctgaggatagttacacaatcactggtagagtgaagattccaccaagcaacgtgattggtcacttatcaaagttctcaaatgtcaaagttatactcaatggtggacagagtgttacgtttctcaggcctgatggatatttctcttttcacaaagtgcctgctgggactcatttgatcgaagtttctgcaatgggctacttcttctctccggtacgagtcgatgttagtgcacggcaccatggcaaagttcatgcaacactaaccgaaaccaggaggagtcttactgagctggttttagagccattgagggaagagcattactacgagattcgagagcctttctccattttgtcaattgtgaagagtccgatgggtctcatggtgggattcatggtcgtggttgtgttcctaatgcccaaactgatggaaaacatagatccagaggagatgaagcaagcacaagaggaaatgaggaggcaaggtgtgccttctctctcgagtttgttgccaggcgctggggctagccgttaaagagtttctcagtcagctcaatgtatcacaaaatgagcggaagaaaggtatcacgttctagtgagagacacactcattgtaatagatttgtattgtgtgatagatttgtattaagaacatagaaaaaaacgaaaatgtaatgcagtttaagagcagaacgaaccaataattggagaggttcatgctcatcattaaacatcatcaccgaaaaaaaaaaaaaaaagggcggcagagtcttcatcnnnnaaaaaaaaaaaaaaaaaaacaaaaaagggcggccgc

SEQ ID NO: 1637 - DNA, 712 bp, Brassica napus
  unsure (1)..(712): unsure at all n locations
  Clone ID: BRANA-23APR03-CLUSTER9539_1
aaagtcatatcaagcaaatcgtaaaccgctacaaaaccgtcaaataggaaaaagtaatttgtgtttgtttagtttgttaagaagaatccgatggagtcgtcaccagcagcagcagcgaagccggcgagaggcgcaggaggaaggaaaggaggtgatcggaagaagagtgtttccaagtccgtcaaggctggtcttcagtttcccgtcggtcgtatctctcgttacttgaagaaaggtcgttacgcgatcaggtacggcgccggtgctcccgtctacctcgccgccgtcctcgagtacctcgccgccgaggttctggagcttgctgggaacgcagcgagggacaacaagaagaacaggataaacccgaggcatctctgcttggcgataaggaacgatgaagaattggggaagttgctccacggagtcaccatcgcgagcggtggagttcttcctaacatcaacccggttcttcttcccaagagatccgcatctcaaactgagaagcctgagaaagctgctaaagctgccaaatctcccatcaaatntagaagaacttgtttttttagggattgtgtagtttactttctatgtttactctccgtttggtttgttttatggatctccaatggctgattatgcgttttgtaatgaatgaactaataatttntgggtatnttntcagtttntcagtcaaaaaaaaaaaaaaaaaagc

SEQ ID NO: 1638 - DNA, 913 bp, Brassica napus
  Clone ID: BRANA-23APR03-CLUSTER959_2
gggcccatcgttgactttttgtttctgagtgtgtgtgtggttatatcgtcgtcggaggggtcacgagcggaggaaaccaatcgcagatctgcataccaaaattccaacgaagatcatcactcaccatggccatccccttagctaagctcctgatctccgccgtggcggtcttcatgctcgtctccgcttcgttcgcgacctcggaaatgccgttcatggtggttcacaagaaagctactctcaacaggctcaaatctggcgccgagcgcgtcctcgtctccttcgacatctacaaccaaggatctgcgacggcgtatgatgtgactctggttgataacacctggattaagaaaacttttgaagttgttaatggaaacacttcaagatcatgggagagacttgatgcaggaggtattctgtctcattccttcgaacttgaggctaaggttaaaggacccttctatggagctcctgcggttgttactgtcgacccacgcgtccgctttccgcatccccacaaaggcagctctacagcaagcgtactcaactccattactacctctagacatcctcgcagacgtgcctccaacagacctgcttgctctggcaaagaggatgttggcaaaatatggatcactcgtttcagtgatctccatggtggttttgttcgtacacttggtagcaacaccttcatcgaagtccaatgcagcaaaagggagcagcaagaagaaacgctaaattagtgaaacgatggtgagaaaggtttgcatggtgctttgttgtgtttagcagttaagcactgtttcagaacttgtacgaattagagaatatactttaattttggtgtttcagaggactatcttaaagagttattttggttttgcgtgaaaaaaaaaaaaaaaagggcggccgc

SEQ ID NO: 1639 - DNA, 1327 bp, Brassica napus
  Clone ID: BRANA-23APR03-CLUSTER96343_1
aattctttcttggcgaccgcaaaagagaatgggactctgcttccaacccatcttagcctctctgtttctcatactcctctcttcactccctgagctattagcacaatctcaacaacattttttgggacaaaacaacacaagcttattgggagaagagagatcatgcaattggtttagaggcaaatgggtctatgattcttcatatcctctctatagtcctttttcttgtcccttcatcaaccctgaattcaattgccagaaaacgggtcgaccagacactaactatcaacacttccgatggcaacctttctcatgttctcttcccagattcgatggggtgaactttatgaggagaatgagagggaagaagataatgatggttggtgactcactgagtctcaacatgtttgaatcgttggcatgtttgattcatgcatctcttcctaatgctaagtactctctcagtcgaagccagcctctcacttcactcactttccaggattatggagtgacaatacttctgtacagaacacagtttctagtagatgtggttcaagaaaaggcaggacgagtgcttgtacttgactccatcaaacaagccaatgcttggcttggcatggacgttctgatctttaactcatggcactggtggactcacactgacggaatccagccgtgggattatatgagggaaggaaacaccttgtacaaagacatgaacaggcttgtggctttttacaaaggactaaacacatgggctcgatggattaacggtaacattaacccttcacgcactcaagtcttctttcaaggtgtttctcctgttcactacgactgatgacttttaaagcataaattcaaaatactaactgtgttcaaaacagtggaaggcagtggaacgaaccatcgcagtcgtgcaagggccagactcagccgttcatgggagaaagatatccaggaggattgcccttaggttgggttgtggtgaacaaagtgttgagccgaatcaagaaaccggtccgtcttcttgatctcacaactctctcggagtatcgcaaagacgcacacccaagtctctataatggtatcgcaaagggtctagactgtagccattggtgtctccctggtctccctgacacttggaacttacttctctacgcatctcttacttcatagttctcgttctacgtattgatttttatacaattcaataaatagtttgtggagttcttgtgattgtgattccgatttttatctttaagtgtaattaatatttatactaattacattttgggcttaaaaaaaaaaaaaaaaaaagggcggccgc

SEQ ID NO: 1640 - DNA, 679 bp, Brassica napus
  unsure (1)..(679): unsure at all n locations
  Clone ID: BRANA-23APR03-CLUSTER9772_1
ataaatctcaccttatcttcatcgtccaccccaaaatcaatggcgtcgttagcctcatctctgcaatcttcgaaggtctccttctccccatttcacccatggctccactccacctccttccctttcccaaacccatttcctttccgaacactaggaagcctggtctagtcccggcgataagagccatgaagacgatgcaaggacgcgttgtgtgcgcaacgaacgacaagagggggcgtggggtgggaatgaggcggcctgcacaccccaagtacaagaggcgggtgaggatgaagaagaagtatcaggaggcgcatgaggctgaaaaagtgttaaaggggggctgacgttgggaggcttgaaaagagcagactcatcaggtaagactttttcttggcgctgcccgtccttaagacgaaaggatcttgtcttggccatttgcgtctcagtgtcagcagccatcggcgggagtcagatggaggctcaacaactgtccgcctgccgggggcattagtacgaactggattgtttgatttgtctctgtccaaacttgagttgtaattcagttgaactgttgtttgctcttggaatgtgcatttggttttcccgtgtnnacaccacagcngncntcnccnccaatncncnctgtccctccaacancananaccgactntntagn

SEQ ID NO: 1641 - DNA, 667 bp, Brassica napus
  unsure (1)..(667): unsure at all n locations
  Clone ID: BRANA-23APR03-CLUSTER9812_1
attacacaaacagtacactcaactctctttagatccgtttattaaaaaaaaacaaaatcccgatggagtcatcagcagcagcaaccaagccagcgagaggtggaagaaggggaggagaccgcaagaagagcgtctccaagtccgtcaaagccggtctccagttccccgtcggtcgtatcgctcgttaccttaagaaaggccgttacgcggtcaggtacggctccggcgctccggtctacctcgccgctgttctcgagtacctcgccgccgaggttcttgagctagctggaaacgcggcgagggataacaagaagaacaggataaacccgaggcatctttgtttggcgataaggaacgatgaggagctggggaagctgttgcacggtgtgacgatagcgagtggcggtgtgcttccgaatatcaacccggttctgcttcctaagaggactgctggttcgtctcaaggtgagaaagtgaaagcagagaaagtgaaagcttcttcgccggctaagtttaatgtttggtttgtgaaacctattgaagatttatgtttttatacatttgtaatgaaggaactaatttctctggttatgtttctgagtttctgtctaatcgaataaaaaaaataaaatatctttntggatctcaaaaaaaaaaaaaaaaaagc

SEQ ID NO: 1642 - DNA, 1606 bp, Brassica napus
  Clone ID: BRANA-23APR03-CLUSTER98933_1
tttttattgttcgagtttctgaggattacttttgatctctgggttcgataatctcttctccctcgcataaagtttcctcctttttattgtgggtgtcacaatcatgtcagatgggtactatagttgtaagaaaacagacgatatctgcgaagatgtttgtggtcaggatggttctcgagcagccaaggccttctcaagagtgagatgcgtactacgcggactcgatttcaagacatacatcatcttcctcacgatcgtccccatctttatcctcggagtctacttgcacggacaaaagctaacttacttcctgagacccctctgggaatcaccgcccaagccttttcaaaccctcccacattactaccaccacaacgcctccatggagactctctgcagcctccacgggtggacgcaccgggagtctcctcgacgcgtcttcgacgccgtgctgttcagcaacgaggtcgacatgctcaccatccgctggaaagagctttacccttacgtcacgcagttcgtgatcctcgaatctaactcgacgttcaccggtttgcctaaaccgctggttttcgcggcgaaccgggagaacttcaaattcgttgagccgaggctgacgtacggcaacattggaggacgtttcaagagaggggagaacccttttgttgaagaagcttaccagaggattgcattagatcagttaataggactcgcggggattcaagaagatgatctgttgataatgtctgatgttgatgagatccccagcgcgcacaccatcaacctccttagatggtgcgatggttaccctcccgttctccatctccagctcaagaactacctctactcgttcgagtactttgtcgatacaagagttggagagcttctgttcatctgtacaagcccgggaagactcggtacgctcattttcgacgaggggatactctattagcggattctggttggcattgtagtttctgtttcaggcgtataagcgagtttgtgttcaagatgaaagcgtatagccacaacgatagggtgagattctctcattatcttaacccgaagaggatacaggatgtggtatgtagagggactgatttgtttgacatgcttcctgaagagcatacgtttagggagatcatcgggaagctggggccgatccctaggtcttactcggctgttcatctcccggggcatttgattgagaaagctgagagttataagtacttgttgcctgggaactgcgttagagacagtggctgataagggtttgtgcttatcatcatcagtctttttagtgggggagtctgaaccagaggtttggtacagtttatttgaggagagtgatctgataagtggagtctctggtgagggtatataacattttactgacttcatgttcccatgttgtttttgggaagttttgctggaatagtctttccatctcttatctcttttttttttttttacttcaaaactctcttttttttagtctgtacaatctattagtgagttgtttacattatcctcagattctttgtaatctttattcttgaaaagtcttaatttgatctcctaaaaaaaaaaaaaaaagggcggccgc

SEQ ID NO: 1643 - DNA, 782 bp, Brassica napus
  unsure (1)..(782): unsure at all n locations
  Clone ID: BRANA-23APR03-CLUSTER9926_2
aagtttgaggggtgcgagagagatggcgaggtcagtgaagctgcttctatggagtcttcttcttctgggaacgctaaccgctattcaggccaaaaagtcaaaggaaaagatcacaaacaaggtttatttcgatgtcgaaattaatggcaaagaagcaggtcgtattgtcatgggtctatttggcaagacagtccccaaaactgctgagaatttccgagctttatgcacaggggagaaaggaatgggtaagaaagggaaggctctacattacaaggggagttcctnccataggatcataccaagctttatgctccagggaggcgactttactgatggaaatggtatgggtggtgaatctatttacggtcgacccacgcgtccggagaacttcaaactcaagcatactggtccagggtatctatcaatggcaaacgctggtgaagacaccaacggatcacagtttttcatcacgacagtaacaacaagctggttggacgggaggcatgtagtgttcgggaaggtagttacaggaatggacgtggtgtacaagatcgaagctgaggggagtcagagtggaactcctaagagtaaagttgtgattgttgacagtggcgagcttcctctgtaactcaactctctcatgtagctgttttctccatctgatcctccattgctcctgtgcttagtgctttgaacgacttttatgtttaaaacgaccatcttagccatttaataaaagattcaaccattctgcttaaaaaaaaaaaaaaaagggcggccgc

SEQ ID NO: 1644 - DNA, 564 bp, Brassica napus
  Clone ID: BRANA-23APR03-CLUSTER9953_1
aaaataaacacaaaaaaataaaaactatcagaagaagaagaacaagggatggcgctgagtgcggcgatggtgggagcttttctgggtccaggtacccagatgtactccaccgctccccgcaagctcccttacttgcgggaaccgtgggagggtgtgggggctaggggccgtggtggtgtgttcgcgagccagctcgggaagatgggatgttgagcttaaggaaggatctcgaggtcatgctcgataatgccagagctgccaatgagcgccgttaatttgatgatgatcgtagattagtttttgggagatttttgaagtctccaataatataagtatcttccgcctgtagtcggtcatcttaagtgtcttgttttttgctttgatttgatttttctctgtaaaagcttagaacctggttctcttttgctttgacaatctggaatctcatggcttcttgcttgtacctggataataatttagaatcataaacctttcaacgacttcacagttcacaagtcaaaaaaaaaaaaaaaaaaaaaaaaaaaaaaaaaaaagggcggccgc

SEQ ID NO: 1645 - DNA, 1383 bp, Zea mays
  unsure (1)..(1383): unsure at all n locations
  Clone ID: ZEAMA-23APR03-CLUSTER0_1
gcgcgcccgtggcccgtaaaagacaccaacccacttctcgaatcgaatccaggtccagggacgccgctacccgccgtccttcacccccgccatgccaacgctcggcatctcgccgctgctggacgcctacttccggcgccgcttcgccgcagcgggcctcgtggaggcctccgtcccgctggacggcggcgccaccacggtccactgctggcgcttcccgccggggtccgccgacggcgaggacgacgcccgtcccgtcctggtgctcctgcacggcttcgggcccccggcaacgtggcagtggaggcgccaggtgggccctctctcgcgccggttccgcctcgtcgtcccggacctgctcttcttcggcggctcgtccacgtcggcggcggcgcccggcgccgggcgggtgtccgaggcgcggcaggcggaggcggtggcgaagctcgtggcggccctggtggcgccgccggcgcgcgtgtcggtggccggcaccagctacggcgggttcgtggcgtaccacctggcgcggctgctgggccccggcgcggtggaccgggtggtgatcgccagctccgacctcctcaaggccgacgccgacgaccgcgccctgctccgccgcggcgccgccgagcgcgtcgaggacgtcatgctgccccgctcccccgagcggatgcggcgcctgatgcagctcgcctaccaccgcccgcgccgcttcacgccgggcttcgtgctccgggatctcgcccagtatctgtacagcgacaaagtagaagagaagaaggagctaatcaaggggataacgctgggcaacaaagacaagttccagcttacacctctcccccaggaagtccttgtgttgtggggagagcacgaccagatattccccgtcgagaaggcatttcaagtggcaaggaaacttggagcgaatgctaggctggaggtcctcaaggacaccggccacatgcctcaagaagaggatccaaagcggttcaacgaggcaatcctcaacttcttgcttccagctccaaagtcgtccttgtaacgcgatatatatcccatagttattcacttattattattcccaaagaagagttcacgatttcgatatgcacattctgcccgatcagtgcagtctttgtcgctttggtatcacctcaccttcaagattgatcatggaaactattgctatttatctgccaataaaaaaaaaaaaaaaaaaaaaaaaanaaaaaaaaantatgttggcccccccctgggcttgacctatttattgaataaactatcccctgtgtaatggtggccactaccaatagtaccacattggaagtccaagtatcttttgcattgacttatatggtgtgaccccttccacttatttcc

SEQ ID NO: 1646 - DNA, 828 bp, Zea mays
  Clone ID: ZEAMA-23APR03-CLUSTER10034_5
aaaccgagcacccaaaccctaatttaagctatttgtattcggatctgatctaattactacaagtgcatatatggcgagcacggggcggtcgatgctgctgtcactgctcctcttcgcagtgacgctgtcgctgctggagatgtacagggccaagttcgcctcgtcggagctcatgaccatcgccggtggattcgtctgctccctcctattcctgctactcctcacctttattggaaactatcaagaagctagtggagatagaactgggtggggtgcagttgttgtagcacaacttgtagctcttattgtagccggcactgtccaccgtgtctgtatcacaacatgcttcctgttttccgctggactcctttacgaggttgacaagctctctggcatgatccttgcgaggagtgagtctaaggtgaggcggcactaagcacagaagcagcacagagagatgatacatcgatatttttatgtaagatgacatattttgtatgtcaaactggagttttggttcgcgctggccatcaggccttttctgctagccatataggggctctggattctggatactggtgcgtttgcaccgaggtcacactctgatgtttgtctaatcaattgactaggtgattttccaccttttgccggtttcatgatgtcattttccttcagccataaaaaaaaaaaaaaaaaaaaaaaaaaaaaaaaaaaaaaaaaaagaaaaaagaacaaaaaaatagaaaaaaaaaaagaaaatgaataaaaagaaaaaaaacactaaagagtgatacagaaaataaaaaaagggggggcccctttaaaggt

SEQ ID NO: 1647 - DNA, 3475 bp, Zea mays
  Clone ID: ZEAMA-23APR03-CLUSTER10068_1
aaaaaaaagcgaagagagggttttaatacgattccactcttctcaacaaatttgacgtttttgttcttcgaaattcaaattcacccagaaaaaatctcaatccgcgatggttgaagaatcagcttctgcgtcggaagcttcggtgatacaaaccctaaccgagccggcgacggagattgcgcaaaccctagaacctaacctagcctcaatcgaagccaccgtcgaatcggtaattccactgcacgagaagcgcgtactaccctgaaaatgttcaatcgacttgtaacaacgacgctaataacaacaacgccgctgacagtgctgctactgaggtttgtgatgaggagcgtgagaagacgcttgagttcgctgaggaattgacggagaaaggctctgtgtttttgaaagagaacgatttcgctgaagccgtcgattgcttcagccgtgctctcgaaatcagggttgcacattatggtgaacttgatgctgagtgtataaacgcatactatcgatatggattcgctctcctggcaaaggctcaagctgaagctgatccacttgggaacatgcctaagaaagaaggtgaagttcagcaagagtccagcaatggtgaatcgctggctccttctgttgtttcaggtgacccagagagacaagggagttcaagtgggcaagaagggttctggtggtaaagaccaaggagaggatggtgaagattgtcaagatgatgacctatctgatgctgatggtgatgctgatcgaagatgagtctgagaaaaaaaagcgaagagagggattttaatacgattccactctttctcaacaaatttgacgtttttgttcttcgaaattcaaattcacccaagaaaaaatctcaatcccgcggatggtttgaagaaatcagcttctgcgtcctgcgaaagcttcggtgatgacaaaccctaaccgagcccggacgcacggaaaaattagacggcaaacccctagaacctaaccttacatgccgtcaatctaagccaccgtcggaatatgttgttactagggaaaaggcactgaaattcttcttcgtaaacattgtgacggcgtaaaataaaacaacaacagcctctgtactaagtcctgctaaaatgaggtttattgatgtaagatacgtaaaaatacatctgtgagtgccgctgagggaactgacgccagacaggttactgtgtttttgaacagaagaacgatttctgctgaagaccgtcgattagacttcagcgctgtgctactatgccaaaattcaggggtgtgcacacttttggtgaaattgactgctgagattgtaatataagaaaatcttttaataatgattcccatctcctgacataagagcttcaacttagaatctgaaccttttggacaaaatgtcagaggaaccgaacggtgaagggttcagcgaagagtgccaagcaatggatgaatctgctgggctccttctgttgtttcaggtgacccaagagagaaaagggacttttcaagtggtgcaagaaagtacatgatgataaacgaaaaaggagaggatggtgtagattgacaaaatgatgacctatctgatgctgatggtgacgctgagaaagatgaatataatttggatatggcctggaaaatgctggacattgctagggttattactgacaaacagtctactgaaacaatggaaaaagtggatatactctgttcgcttgctgaagtgtcctaggaaagagaggacactgagtctttcctgtctgcttacaagaaggccttatccatcttagagagactggttgagcccgacagtcgacgcacagctgaattaaacttccgcatctgcatttgtcttgagactggatgtcagcataaggaagcaataccatattgtcaaaaagctttgttaatatgcaaagctcggatggagaggctcagtaatgaaatcaaaggtgcatctggttcagcaacttcctcaaccgtctctgaaatagatgaaggcatccaacaatcatccaatgttccttacattgataaatctgcttcagacaaagaagttgagatcggagacttagctggtctcgctgaagatctagaaaagaagcttgaggatttaaaacaacaagcagagaacccaaagcaggttcttgctgagctaatgggcatggtatcagctaagccaaatgccagtgacaaggttgttcctgctgctgctgaaatgagctcttctaggatgggaactgtgaacaccaatttcggtaaagatttagagtcgcctacagtctcaaccgctcataccggtgcagcaggaggaggagcagcatcaggtgttactcacttgggtgttgttggaagaggagtgaagagagttttgatgaatacaacctcgattgaatcaagtgcatcaaagaaaccagctctagagttttcagacaaagcagatggcaactcctcttgaaaccggaaaaggtataaaaattcctgttactagtgaagtatctaacctaagaaaactgagaaaaacatttggtatcttcctcatgaatcttccaagactagattttcaggttcatgttttgtaatggagtccgtacttgctacttttttaaatcgctgagatattttttactttttattgttgtttaatcagtcttattttttcaaaaaaaaaaaaaaaaaaaactcgagggggggcccggaccaattgtctgcaagcgcgccgttgagcttctagatggggtcaacaagcgattcgacctctggtgcaagctggaccatgacttgccgcgcactaaccaaccgtcatcgcaccaagaagaaggccatgagtcccgcgacatcaccgacgtcctgcatgggaacatcaaccgagcgaggcagcatgacatatacatggtacgtatatacatatctatggatctgaattcattaaggtcccattctgtgtttgtcttggatgcaggctgccgatcacgcgatcaagcaatggcggagcttcctcacatccgtggagaagacacatggccatgggccggacaagtaggcgcatgatgaggccaccggcagctaccacaaaccccagaacacagcgtgagtggtgttgtgtcgatgcagactcagacatactacaccatataaataaataaatttaatgagcgagaggccctgacaccagtgcctccgccgactccctccgatcctgagaataatatttgtgcgtactgtccctccgtcctcatggccattatattggtcatttgatttcccgtgtgttcactactgttgttctctaattactagtcctgatcagttccggacgactaagctgtaataatgtatcttttattttcttttttatattaatataaaagaccatatgtgtatgcgtcggtcaaaaaaaaaaaaaaaaaaaactcgagggggggcccggtacccaattctgtttaaacacaataaagtgggaacgtga

SEQ ID NO: 1648 - DNA, 2357 bp, Zea mays
  unsure (1)..(2357): unsure at all n locations
  Clone ID: ZEAMA-23APR03-CLUSTER10069_1
gcacgagaccattacctagaacatcctaatcaaaaagtggaggaggagcagcgaagcaaaagctcaccgagtgaagaagtgttgtccgaaggtgtggataaggccgacgcggttggaggctccggcgtcgcagaaagcgggacgcttgtcgccggcgtagctccaggcggcggaggaggactgctggtggacttgctcggctgcctagggtttcgggctgccagcctgccgtctcggaggccgcaagtgtaatggctactgagagtgctgtcagattaattggtggaacgggagctagggactggagtaagggatttggtgcattcgactcttcagtgggtgccctttcaggggaagacttgggatttgtagataatgatgctggggtttatgggggctggagcaaatctgttccaaatcgcagtggaagcgcgccacctagcatggaaggatctcttgctgctcttggccatctcattggccagcagagtgggagctttgaagctagtttggcaaccttggataacataactgacagttccaagtctgaggagcaagtacttgctgatccagcatattttgagtattatggctccaaggtgaatctgaatccaaggctccctcccccacttatttcaagggagagccgccgattaatgaaccgtgttggcaaggccaaagagtggagggtggtctctcaagataacagcaacaaagactctatatacattcctcgatccacattgtcaactcacaaagaagaacctgaggatgataaatctccaagattggatttaagttcagtggaggatgcccagattatctccagtgcatccaactttcagagccaggattttatgctcttcgagcactcgaaagctcagtcgaggagccgcatcgaagccaaagctcgccgtgtggtggtgccttttcggcatgataggtctccgccttcgctgatcgaggtccggatcctacatcacgcgggagcggtgttgccgctatggatccgggcgaccgagatggagatctgggcgacccgcacggtatccgcggggtcggggcagccggctgaaagttacgggggcgtcaagcttcgtgccaattgcgagggcgtacagcggattcgggagatcagccgcgagatggtggaggaggagatattgcgcattcgaatattcagtaggcacgctttcaggggaagacaggagatttgtagcgaaggaggctcttgtatatgtggaacgtaacaagaaagttgatataatccatgagcgttgatggcctatgttatgaggatgtcttccgtgttcaaaatggaaatcacgttatacaaaagtgcattgagtgtgtccctacagaacatattggttttgtagtatctgcttttcagggacaagttcctagcctttcaatgcatccatatggctgccgtgtaattcagagagttttggagcactgcggtggtacctcacaaagccagtgcatagtagatgagatattgcagtgcggcgtgcgtccttgcgcaagatcagtatggcaactatgttacacagcatgttctagaaagaggaaatgctcatgagaggagccaaattattatctaaattggctgggcaggttgttaccatgagccaaaataaatatgcatcaaatgtgatagagaagtgttttcaacatggtgatattgcggagcgggatcttttgatcagacagattgtggagcagacagagggcaataacaatttgctggcaatgatgaaggaccagtatgctaattacgtggtccagaagatactcgaaacatgcaatgagaaccagcgggaacttctggtcagccgtgtcaagggccacatgcaagcattgaggaagtacacatacggcaagcacattgtaagccgagttgagcagctctgcggcgacggaaccgccgagccggattcttgaaatgaaccccgcctaattcttcccaggccaggggtgtgagggtgtcttgttcttttgctcagtccatcagtggagaaagcagaacagatcaagtccacctctggtgcttccaaacagactaacaaaactgtcatcgaagattgtataggtgtgactcgcttcaggatagtcttgaggttctagaacaggaacttagtggtgtgcatcagtgtatctatgttagggtgtgcctatttacagaataacagtggttggctagctgtgtgcagaagggagtttagcgttatggtttgtatgtgatacatattatgcctggtaatgtatttgctttcttgcatcgccagttgtggggtaaatgcaatgttcccgcattgtcctgataaaaaaaaaaaaaaaaaaaaaaaagnaaa

SEQ ID NO: 1649 - DNA, 1003 bp, Zea mays
  Clone ID: ZEAMA-23APR03-CLUSTER1009_10
ttaaatcttgtactactgaaaatgctcttaatctcattgaaaatcgaagatcgaatccactgccatctctatccatgtccgtagcgtgacgcgtccacaacagtagaacacgtgttacgacggcgcagtttcagtgtagaaagcctagaagggtaaaatgtcctccctttccctttccaatccccacgccgccacaacaatatcgcattgacacatcgttcatcggatccagtcctctcccgggatcacctccggctataaatttccgtccccaattcacccaatccagatgcgcaaacatcgaatcgtctcgctagtggctgccctactcgtgctgcttgcccttgccgccgtttcctccacgcgcagcacacaaaaggagtccgtggctgacaacgccgggatgttggcaggcggcatcaaggacgtgccggcgaacgagaacgacctccagctccaggagctcgcgcgcttcgccgtcaatgagcacaaccaaaaggccaatgctcttctggggttcgagaagcttgtgaaggccaagacacaagtggttgctggcacgatgtactatctcactattgaagtgaaggatggcgaagtcaagaagctctatgaagctaaggtctgggagaagccatgggagaacttcaagcagctgcaggaattcaagcctgttgaagagggtgctagcgcctaaggatctgtcgtctccctgtgcaatttcctgcctgaagcgcaaaactaagttacagaataaggagctgcttcggaacatgccagagcatgcaccctcgcgtaatttcataaaatcacagggctcttaatgtaatatcttgaattgccgtgccatgtgtaataagtaatatcatgaataacagttgctactatgggttctaaaggtttattaacagccatccatgggccatggcagagttctcatattactttgttgaagtctttgttgcaaaaaaaaaaaaaaaaaaaaaaaaaaaaacacaaaccc

SEQ ID NO: 1650 - DNA, 1724 bp, Zea mays
  Clone ID: ZEAMA-23APR03-CLUSTER1013_6
gcacgagaccattacctagaacatctaatcgaaaaagaaattgcgcccggccgccccccattcaccttcaaaaaaggagccaggcttgccatcaacgagggtgtcggccatctgagcagctcccctgcccctcgcagcggctactctacaggtctagcgactctttcgccatccatagagggaggaggcgcggcggagatggtgggcggtggcggcggcgggccgctgcggcgggtgggcaagtacgaggtgggacgcaccatcgtggaaggcaccttcgccaaggtcaagttcgcgcagaacaccgagaccggggaaagcgtcgccatgaaggtgctcgaccgctcctccatcctcaagaacaagatggccgaacagattaagagagaaatatccataatgaagcttgtcaggcatcccaatgtcgttaggctacacgaggttttggcaagccggaagaagatatttataattctggagttcatcactggcggcgagctattcgataaaattattcgtcatgggagactcagtgaagcagatgcacgcagatactttcagcagcttattgatggtgttgatttttgtcacaagaaaggagtctaccatcgagacttaaagcctgaaaatctcctccttgattcccaaggcaatcttaaaatttcagactttggactgagtgcatggcctgctcagggatctttccttctacgtacaacctgtgggactccgaactatgttgccccagaggttctcagtcataagggatataatggcgcacttgctgatacatggtcatgtggagtaattttatatgtattgttagcaggttatcttccatttgatgaagtggacctgactaccctttatggaaaggacgataatgaggatgctttcgaagatgaaacaggtcctctaacacttaatgcattcgacctaatcattctttcgcaaggattgaatcttgcagcgctctttgaccgcagacaggactgtgacaagcttcaaaatagattcttatcacgcaatccagcaaaggttatcttgtcaagcatggaggttgttgcgcaatcaatgggatttaagacacacattcgcaattataagatgagggtggaaggtctaaatgccgacaagactagtcatctctcagttatggttgaagttttcgaagttgctccatcaatcttcatggtagaactacaaagagcagcaggagatacttcagagtataacacgatacatccaaagggacaaatttacattggacagtaatgcatgtaattgggtgatgctgatgcttgctgcacagattaacttctaataaaattttcgtaaataactactgcggcaaattagatgatatcatctggaaatttccaactgagaagggaaaatcaaggataccccggttatcaaagtctcattcataatctagttctgtgtgttatcaattactatggacttaagtggatatatttgcagagtgtatcgcaattggattatgatattctaagtgtagctcttcgagtagtatatgtttgtatattcagagtccccatgtacaaagaggccgttttaattgaggtttccgtacctcgattccctgtgcaaagttttcatcgatgttttagactgcacatctgtatattttgtcgagagcatcagtttcttagacaccacctatgtatcatgtgtttgttgccaactagtgtcatttttgt

SEQ ID NO: 1651 - DNA, 2037 bp, Zea mays
  Clone ID: ZEAMA-23APR03-CLUSTER10151_2
gcacgagaccattacctagaacatcctaatcgaaaagccctggctggcgttgacagttagatgcgaccgcgggagcgtccgtccaaccgccaccgcgtctgcctcagctccgcgcctccgcctagcctcctctaatctccagcccagtagtggcagactagaatcgtgggcgcgacgcctcggctgattcgtccgccccgatcccaccaccaccgtactccgcgggcgacgtcggccgctagcgatggcgacgtcgtcgtcggcgggggcgcgcaagaaggcccccagccccccgaagcaccgccacgatggcacctcgccgctgccgctcggcatggactggagccctcccccgaagagatgggagggaaggaacaccatatggccacataatcctcaaacaggttggagttactgtgtgatgataccttcttggatcactcaaacacctgaaactggtgtgaccgctgatagctttttgaaatctgtcgttgacagttttacaggatacatgtcggtatacaatctccagaaggctttagctctagccatggaattctcagaaggtttagtgactttctgaatctattttctgatcttaagagcgcatttcccagaaaagatgccccgtcggctcctccgaagcatgctttcttaagaataaattcaagcaggttgcttctagaagagagaaggcatgcattggaggagtggatgcaaaagttactttctgacattgacttgtcaagaagtgctcctgttgctgctttttttgagcttgaagctgctgcacgttcatgttaaggatttggaggttgaattggaagccgcaaagcaaaagggtagagagacactgcaacaagctatcctgactgaaagagagaggattacccagatgcagtgggatatggatgagctccgtaggaagtattctgagatggagtcaaacctgaaggctgaacaaaatgagaaaactcgtgcagagtcagagaaaacaaccgctagtgataaaaatgaaacattacttgaagaattagaaatcaaacgaaaagaagtcgagactttgaaacatcatcttgtagaagctgaggcaaagtctaaagcagataagaaagttcttgtaaaagaggtcaagtctcttagaaactcccaaacagagatgaagaaagtgttgaatcagtatcttgaacagaagactggtttagagagagttattattagagataaacagaggtcagcacgtgcaaagttatgccgagtgaaatttcttcatgagtctcgactgctgcatgagcgtctactggaatgtagtgctaaatttctagcagaagaacaaggcaattttactattgatccttcgtccttgcctgatcattagatcttctagcaacatcagacaatagagtacgcttactcattgctgaggctcaacttttagcacgagatgatgaacaaggctcttctgatgatggcgacaattctgatagcatatcgtcattaactatgagctgggaagatgcaaaagttacagatgaagatgcaacgaaaatactttctgatctacttattgacaacgcgcagctgaggctgcgtcttaatgctgtcatccgcaacgctgtaaatactgccgtgaagccagagaaagaaggtagtggcgaggttcttcccaaaaagacagtccttaactggttgttagacagatgagaacacctatgtatattcctgtgatttaggtttcaaacttacgcggcttgaccaaaattatatgatgagcatacctatatagtgccagggcagcatcaggataaaagattccggccatgagggaaggagatcctggagaagcgtgtgttgctgctgtacggttgtttatttacacatggaaatctccgaggatagtatatttaggcccgtttggtttagtgttactaaactttagttatttttagtctctaaagaaacaaacagagtgatcgaaaggaggtgactaaagtttagtcatttagtcactaaatgggtgactaaagtaggattttt

SEQ ID NO: 1652 - DNA, 2261 bp, Zea mays
  Clone ID: ZEAMA-23APR03-CLUSTER10170_5
gcacgagaccattacctagaacatcctaatcgaaaattgattattcaggcaggcaaccactatccatttcttttttatgttaggtagggttcttatatgcttgtttttccattgtgtatatgttaagtattgcaattgggagcagcttcgattttagctgatgtgcctgttccatctatcaatgaccttgtagatcagattgctgatgtcatcgatttttttctggtagcatttcagacttttgtttcttatgtataccacatttatattttgtcaaaaatggtcctgtacttgtcctaatgaaaatataaattgccaagatcaagatcaggatgaatgttgagtttgcatcctccgatctgagttgtgatgtataatgtatttgagttacgccgaccttgtgggttttgatcgcctttttttgttggtgccggatttggcaagatcagaaggctggtgaccaaggtggccctgcagagcgatgatgacgagctcgtcgctatgaacgaccccctcatcagcaccaattacatggtatacccctggtctctctatcgcctgatctggtactttagcggactcacaggtccagaaatcgttggacaacatggctccgtcccatgacgatcgaactgatttctggatggctgttttccgtcggacgaacgaactgatttctggatggagtggtgtcgcaatccaaacagactgttaatgtctgggtgcttcaggtcatgatcaaccatcaaatttactttgcaaatgaatgtttcaaattggactggtcaagcctaccaagtccaatggtcctgcctagtttcgaatccttttgagtcctgcatgtttctcaaagcagttgtaattttatttcgatcctaaagcttgtgtcaggtcaagatccatcacccttgacataaaaccttcagtagggcacttgagttaatggtgtgataatttggacccacatttttaacctttagggttggattactgattttgatccacatttttaaccttttgttaaaaaatggttcagtactcaaagcaggttgctccaaccatgtttttttgggccaccatttttgactggactgccattggagataggagtgtgcatccaaataggtattctgaatttgaaacacactatctttttattcatactgtgaaactgcaatatctgcatggaaaggagtagtacctcacctgtatgcatagagcatttccatttccttctctctgttctgtatatatttgtgttgacaaacctgttggagctggtttctgaatccaagaccattaagctattttgttctatatatactgaaggagtttgttctttgtgcaacaaacactatggttgaatctcgtgggcaattgcttcgctacgttattacacctttgtttcgttgatgcaacaatctagtatccatttcacttcacaagggttctttttatttaaataaacagattttagtaacaaatacagaatgttcatcaactttttggttgtattattttccctaacagcggtgttatggtgaaacagagttttctccacgttgggaaagctggaagagtcttttctactcagttttatgctaacagtggtgttcatgttacgtttgcagatatggacctcggtggttatgttttctccacgttgggaaagtcttattaactgtaggtatgatgcattagtatgtcatgtgtgaactgtgtcctttgctaagccgattcagtagttgaattccccaaatctgaaaatttcctcaaaaaagacattaaagagcacaaatggtatgaatgaggcgtagggatttctggtattgctcatccctcgtcctttgtatatgtatgttttgtcttgtatatgcagattactcaacatattatatggtgtactgatttatgcgctataatattttccttttcccttctttgaaaggtgatatttgcacatctcttctctactttgcattacttattcctttcatttggtatatattaacctgttatattttctggtcttcattttttcagttctgaacctagaacactatgaagatgcaagggcttgctgcatatggatatttgttttgcttattgttttgtttggatctagatcatcgatggctatgagtcatatgtaaatatatttttatcctaccaaaagtgtctcgagccatatatttatatgaaactatggatcaacttcttgtaatgctactattgatttttaatatatattaattttgctt

SEQ ID NO: 1653 - DNA, 1937 bp, Zea mays
  Clone ID: ZEAMA-23APR03-CLUSTER1024_1
aggaaattaagcttacagccccagacagacaccgccaagagcccaccacacctgccaccgcctcgctgccgatgtcggcggccgccgccgcccggatcctccgcttggccccgcgccggatccaggttcccaagacctccccgctcgccgcactctcgttcccactcccgcgtacggcacctctcgccgctgccttggggcggcggcagcgcttctgcgccgcggcgcaggcccccgcccccgcatccgcggcgacaggggcggcgggcgaggccgtgggggagttcaggaagcggctgcgggtggcggacgtgaagggcggggaggacgagggcgccgcgtgggtgggcaaggagctcgccgtgcgcgggtgggtgcgcacctgccgcgcccagaggaccgtaaccttcgtcgaggtcaatgatggctcttgcttatccaatatgcaatgtgtattgactcctgaaacagaaggctatgaccagatagactctgtcactactggagcatctgtactagttgagggagttgttgcaagcagccaaggcggtaaaaaaaaaggagttcagaaggtttcaaagatcactgtaattggtaaaagtgaccgggcctgatcttttatacagaagaaacgggcatcaagagaattccttagaaccgtagctctccgtcctcggacaaacacttttggtgcagttgcaagaagtgagaaatactctggcatacgcaactcataaattctttcaagacaatggatttgtttgggtttctagcccaattattactgcctcagattgtgaaggagctggggagcagttttacgtgactactttgctttcaaatagcactgaaggtggttccctactcaaagatattcctgctaccaaggatggaagggttgattggtcacaggatttcttctgcaaaccagcatttctgacagtgtctggacagcttaatggtgaaacatatgcttcagctctatctgatatttacacatttggtccaacgtttagggctgaaaattcaaacacttcaaggcatctggctgaattttggatgattgaacctgagcttgcctttgcggatctgaacgatgacatggcttgtgcaactgcatatctccagtatgtagtaaagtatattctggagaactgcaaagaggatatggatttcttcaatacatgggttgaaaaaggcatcatagatcggttaaatgatgtagtagagaagaacttcgttcacctgtcttacactgatgctgttgagctactacttgggtccaagaaggaattcgagttcccggtaaagtggggtttggatcttcaaagcgagcatgagcgatatatcacagaagttgcctttggtgggcgccctgtaataattagagattacccaaaggagatcaaagctttctatatgagagaaaatgatgatgggaagacagttgctgcaatggatctgttggttcctcgggttggtgaacttattggaggaagccagagggaagagcgtcttgattaccttgaagcccggttggacgagcaaaatctgaataaggagagctactggtggtatttggacctacgacgatatggatcagttccacacgctggtttcggtctcggatttgagcggcttgtacagtttgctactggaatggacaacatcagagacaccatcccatttcctcgagttcctggctctgccgagttttagcgccctggaagtgttgtcgtatacgtatactttagaaacattctttcctaggatgtaatgtgaggaaaggcatacgttgtactgtacaactgtttcatcattgtacagagttgagctgagacttgtgattaatcggaggcaagcagtgctgtggcaagctttgtcgtttgttgtaattgtcgtcaaagaatgtcaatggtggatgatgcaattttttc

SEQ ID NO: 1654 - DNA, 1610 bp, Zea mays
  Clone ID: ZEAMA-23APR03-CLUSTER1027_14
gagacgttccgcggccattcatacggcgtggctaggagcactccttcgaatcggcatcgcaattcatacggctacaacgtctattctgtgggcacttcgtctccgatcgattcacggcaagagcgagagttcatggattcgacagggcccatgagggtctccatcaaagcccaccgccccgactggaaatcggagcttagaacaaattgcctcagaagagttagaaaggacagaaatgacttgctttggaagatcaggaagcagggactgcccggcaatgtcatggaaaaggtcagatctgctgtcaggagcgtcatatctgatgaggtagagaaactcaaacagtccaatacagaaaacgaggaccaagaaatggatgtcatatgggagtatcaaggactgcatgctgctaagcctgctgaaattgaaagtgaagatatattgcttgaaatggaaagacttgtttgtgaagatattagagaagaagtaatcagaaaacgtgtggtgcctataacctctgttattctttcattcccactgcttactgaccagcaatctgtttgcccatcttatcgctggagtttagctgcaaaaacaacctgattaactgtttttgcatagttgtgcggttgtgccaattctatgatacttattttactcattggtccggaatttttcatcagttaatcatttgcagaactagaggcacttgatgaggaagatgcatatttagctcaaagtgttttggatcatatgcaactaaatgacattgaggctgccgaaactgctaagctctggtgtccagtatgcaagcaaggagatctacgagaaacacgtaatctcatatactgtactctctgtaatctacggcttgaccttggagaagataagatgacgctggagttcttacgagaacggttggccaatgcacatatggatcactttgacagaggatgcaaatcagcacccaagttctgtttacagactatgtttggcctgactgcgctctacatacagtgtgcagaatgcagtacatttgatatcgtggtataaccaacaagatgctgatatgaatcaacacttcaacggaggaaagaaatgttacaaaacttacttgaagttatttcatcgcttcatgtaagattagctggtgaagttatggcaagatggctgcaatccgaaaggtggcacacactcagcacctgaacacgttcatccattccagcttctggtcaaaacaattgacatgcatgcatgcatgtggaatttccacgtatgtccaacttaaatgttgcaaccggtgtaaggtggttagtaaatatgcacttgactatggcaacatctagtttccagcttacttgaaagttgaaactgcaactacaattggaaccaaacactacccaattgatcttgaagtcgtctttgggctagctcgcattcctttgcagatctgctaccggtggcgagcgtgtagagatggcaatggttacccgcgacccgatacctgatgggtatttactctattagggtatatatgtaggctaaataatctacccgtgggtctgttattggacaaaaatcttcacccaatgggtaaacgggtattagaa

SEQ ID NO: 1655 - DNA, 1602 bp, Zea mays
  Clone ID: ZEAMA-23APR03-CLUSTER1027_19
gcacgagaccattacctagaacatcctaatcgaaaaaatccaattcacaaacacacacgggcaatcaattagcagaacccgcgccaccccccttcctcggagtcggagcgagtcgaggaacggctcgtctgcctctcccgttctccttcctctcctccccagaagatccgatccatcatcgaggactcgccgggaagaatcaaggatatatagataatatacaaacaaaggttcctccagagcccagaggagggaagtcaccggccgtcggcggggaggagatgtcggacggcgcgggctcccggacgggcgtcgctggcgcgctgggcctctcggtcacctcgtcggtggccatcgtcatctgcaacaagtacctcatcagcactctaggcttcttcttcggtcacgacgacgctgacgagctggcacctcatggtgaccttcttcacgctgtacgttcgcgcagcggctgcgcttcttcgagccaaagccgatcgacgcgcgcaccgtcatctccttcggcctgctcaacggcatctccattggcctcctcaacctctgcctcgggttcaactctgttggcttctaccagatgaccaagctggccatcatacccttcaccatagtcttggaaaccctctttctgagcaagaagttcagagcatcaaggcctccctcatggttctgctgctgggagtcgggatcgcgtcggtcacggatctccagctcaacctcctcggctcgatcatcgccgtgctcaccatcgctgcgacatgcgtcgggcagattctgaccaaccaaatccagaggaggctgaaggtttcgtcgacgcagctgctgtaccagtcgtcgccgtaccagtccgcggtgctgctcgtcaccgggcctttcgtggacaagctcctcaccaagcgtgacgtcttcgcgttcagctacaccacccaagtcgtggtgttcatcctgctgtcgtgctcgatcgcggtgtgcgtaaacttcagcacgttcctggtgatcggcacgacgtcgcccgtgacgtaccaggtgctgggccacctcaagacgtgtttggtgctctccttcggctacatcatcctcaaagaccccttcagcgcgcgcaacgtggtgggcatcctcatcgccatcttcggcatgggcctctactcctactactccgtcgtcgagagcaggaagaagaccgaggacgctagctcgctgccggtcgccgcgcagatgagcgagaaggactcggcgccactcctcggcgccaagagctcgccgcggacagagaacaaggccgaggaaaccttcgactacatgccgaggacggccaagagcgcgttcaccggccggtgagcgcgtagcttgtaaggagtacgtatctttctagagttgtgggtagacgacgagcaacaaggcgggaatgtgttagtgaaagatgtaacggcagcaagtgacattccaattatcatttttgcgatttctcctctagggtggtctgcgtggtcatggtttaccagagcataaacagcagaatgtgtggtctactggtcttgaccgagcttgaaatagtagattggattggtgataatacaactatacaag

SEQ ID NO: 1656 - DNA, 2693 bp, Zea mays
  Clone ID: ZEAMA-23APR03-CLUSTER10287_4
gcacgagaccattacctagaacatcctaatcgaaaaagccgccacctcaccccccccatcggccgcctgcgtcccaccacccgctcctgctgccgggcctgccgcccgttgctctcgccactgaagccctcgccgccgcctccgcctccgcccgcttgcttgccctcctgccggctgcctcccggatgagaagcggcgcaacctgggcagcggaagcgtggtcggcctgagccttcgccggggtttctgccgagaaggatcctggagattaagcgcatgggttccttggaggcccggtacaggccggccggggcagctgaggacacagctaagagaaggacccaaaaaagcaaaagtttcaaagaggttgaaaaatttgatgtttttgtgctggagaaaagttctggttgcaagttccgatcgatgcaacttttgctcttcgctatcatgtctgctgcatttctaacaatcctatacacaccatctgtgtatgaacatcagttgcagtcaagctctcggcttgtcaatgggtggatatgggataagaggagttctgatccccgatatgtatcttctgctagcattcaatgggaggatgtatataaaagtatccaaaatctgaatgttggtgaacagaagctcagtgttggactcctgaattttaacaggactgagttcgacgcttggacacacatgctcccagaaagtgatttttcaatcataaggctggagcatgccaatgaaagcattacctggcaaactctctatcctgaatggatagatgaggaggaagaaactgagataccatcttgtccttcgcttccagatccaagtgtcccaagagcaacgcattttgatgttattgctgttaagctcccctgttctcgtgtggctggttggtcaagagatgttgcaaggttacatttgcagttatcagcagcaaaattagcagcgaccacagcaagaggcaatagtggaatccatgtgctgtttgtgactgattgcttcccgattccgaacctcttctcttgcaaggacctagtgaagcgtgaaggcaatgcttggatgtacaaacctgacgtgaaggcgttgaaggagaagctcaggctgcctgttggttcctgtgagcttgctgttccactcaacgcaaaagcacgactctacacagtagacagacgcagagaagcatatgctacaatactgcattcagcaagtgaatatgtttgcggcgcgatcacggcagctcaaagcattcgtcaggcaggatcaacaagagacctagttattctcgtcgacgacaccataagtgaccaccaccgcaaggggctggaatctgcggggtggaaggtcaggataatacagaggatccggaaccccaaagccgagcgcgacgcctacaacgagtggaactacagcaaattccggctgtggcagctcacggattacgacaaggtcatcttcatcgacgcggatctcctcatcctgaggaacatcgatttcctgttcgcgctgccggagatcacggcgacggggaacaacgcgacgctcttcaactcgggagtgatggtcatcgagccttcgaactgcacgttccggctactgatggagcacatcgacgagataacgtcgtacaacggcggggaccaggggtacctgaacgagatattcacgtggtggcaccggatcccgaagcacatgaacttcctgaatttttttttttttttttgtacaatgcagaggatgcagcatgacacgtctattattggaggaggattacacaggaaggaagcggacggacggcatggaacgtggagatcctgcgggagttcgcgagcgacgtcgcgcacgcccgctggtggaaggtgcacaaccggatgcccaggaagctccatagctactgccttctgaggtcgagcctgaaggccgggctggagtgggagcggcggcaggccgagaaggcgaacttcacggacgggcattggaagcggaacgtaacggacccgaggctgaagacctgcttcgagaagttctgcttctgggagagcatgctgtggcactggggcgagaagagcaagagcaactcgacgacgacgcggaacagcgccgtgccggcaacgacaacgacaacgcctgctgctgcgagcctgtcgagctcgtgagacttgtagatagctctgtctgccgagagtagtataccagtaccagatacagaacttctgaagctccatacatacatagcgacagctctgtaaaggtagctatgtaggccttttccttccccgaatgactatataccttcgtcttcgttcgccgtcacagctgcaggcagctccctccctcccgctggtttccgatggttaacaattcttttgtttttgccaataattcatcagtataggatgtcaggctatgttgcctcaattcccagtggctggctgtttttccctttgggcggcttgaggtccgttttggggctgttgttttttcaaaccctcccggggttactgcttttgttgcggtaccccaccggtttaatgtatggtggttgaccagtttcagtgataaatttggagggatccaatatgggattgttgcccaccaacccctgcttcaaaaaaaaaaaaaaaaaaaaaaaaaaaaaaaaaaaaaaaaaaaaaaaaaaaaaataaaaaaaaaaaaaaaaaaggccccta

SEQ ID NO: 1657 - DNA, 2390 bp, Zea mays
  Clone ID: ZEAMA-23APR03-CLUSTER10287_8
atctttggtaaagcccgctagggcgggggttccgttggcctgcatgttttacatgacatttcgcccttctttttttttcattttgtttgcctcaggtgtgcgaagcggcgcaacggcggaggcggcgctagcatcaccggccgacggtcctcctccttctcacgaaaggcactagaggagcggcggcggcggcggcgcatcaagcaccgcaccgatgggcccactggagccgcgctaccgtccaggcggcgcccccgaggacacgactaagagaagggcctccaagagcaagagtttcaaagacgccgagaatttcgaagtcctcgtccttgagaagagctgcggttgcaagttcaagtctttgaggatcttgctcatagccatcatctccgcgacagtccttacccttgtaaccccgaccttatacgagcgccagttgcagtcagcctcccggtacgtggatgtcgggtggatgtgggacagagcgagttccgatccgcggtacgcatcttctgccgatgttaggtgggaggatgtgtacaaagcactgggaaacctaagaagcggtaaccgccagagtcatctcagagttgggctcttgaatttcaacagcaccgagtacggctcctggacacagttgctcccagctgacagccacgttatctccaccgtaaggctcgagcacgccaaggacagcgtcacctggcagacgctgtaccctgagtggatcgacgaggaggaagagacggagataccctcttgcccgtcgctgccggagcctaacgtgccaagaggtgcgcgctttgacgtcgtcgccgtgaagcttccctgcacccgtgtggcgggctggtcgagagacgtcgcgcggctccatctgcagctctcggcagccaaactggctgtggcgtcctcgaagcgcaaccacgacgacgtccatgttctcttcgtcactgactgcttcccgatcccgaacctcttcccttgcaagaaccttgtgacacgtgaaggcagcgcctggttgtacagtcctgactccaaagcgttgagggaaaagctcaggcttccagtcgggtcctgtgagcttgccgttccactcaaagccaaatcgaggcttttctcggtagatcgacgaagagaagcgtacgcgacgatactgcattcagcgagcgaatacgtctgcggcgcaatctcggcagcgcaaagcatccgccaggcaggatccaccagggacctggtcatccttgtggacgagaccataagcgaccaccaccggagaggcttggaggcggcggggtggaaggtcagagtgatccagaggatcaggaaccccaaggcggagcgcgacgcgtacaacgagtggaactacagcaagttcaggctgtggcagctgaccgactacgacaaggtcatcttcatagacgccgacctcctcatcctgaggaacgtcgacttcctgttcgccatgccggagatcgccgcgacgggcaacaacgccacgctcttcaactccggcgtcatggtcgtcgagccctccaactgcacgttccgcctgctcatggaccacatcgacgagattacctcgtacaacggcggggaccaggggtacctcaacgagatattcacgtggtggcaccgcgtccccaggcacatgaacttcctcaagcacttctgggagggcgacagcgaggccatgaaggcgaagaagacacagctgttcggcgcggacccgccggtcctctacgtcctccactaccttggcctcaagccgtggctgtgcttcagagactacgactgcaactggaacaacgccgggatgcgcgagttcgccagcgacgtcgcgcatgcccggtggtggaaggtgcacgacaggatgccccggaagctccagtcctactgcctgctgaggtcgcggcagaaggccaggctggagtgggaccggaggcaggccgagaaggccaactctcaagatggccactggcgcctcaacgtcacggacaccaggctcaagacgtgctttgagaagttctgcttctgggagagcatgctctggcattggggcgagaacagtaacaggaccaagagcgtccccatggcagccacgacggcaaggtcgtgatctgtagatatacgaacaccccatccccatatggcaaccatacatgcatagcaatagcttgtataggtagctatgctttagttcttcgctatatatacagaatacaccactcgatccctgttgttgtcaaggctgcagctctatgtcgctgccggcctgccaccatggctaacgattcttttgggttggctgctgtaataagtttcaggtacatgtaaatttccctgctgaaattacgtgaccgcgtgtgagaaatgaatttgtacagggcgtc

SEQ ID NO: 1658 - DNA, 1687 bp, Zea mays
  Clone ID: ZEAMA-23APR03-CLUSTER10330_4
gaaaacatccggatagagctatcctatcttagaaaatttcgtccattcacatgatgctttgcagtacctctgtccagtacaaaatttctactgggaatacggctccttttgggttgcacatgctgctgctgatgctgttgcaggtaacagtggttctgcaaaatacagcatctaaaaccggcttagactggtggaacctgcctactttagtcagccttctcacatgccttgagcatacaaaccaagtactagcaagcatattaagctttagataccattttcgttgttcatcagcacgtagccagaacaggcattgtggtccttgcggaggcgcgcccaccatcctagctgaagattaaccagtaaacaacttcctcggcaaaaaccacgcaattggcaccaacacaatccagtcagacggtttcagtgatgacaactaaaaatgacaccgatctgaagagcgaaaaagaacaccagatgtaatcaaatggaggcatataaagaaacttatctgaataaagcagcagcatgagcagcagccgaaggcgactacattcaaatatcaaaatttaacagcactggttgtattgcaagttaagagtacaaacgtcaatcccccacggcctcttgcaccatttgtgttctttgtaaacacttctttcatggcatcactctctgccgtgccttgaccgcttgcgatcctcatgttccacatcatatctgcgtctttctgattttgtttctcttcctctgtcggatctgtcatcgtccctctgcctctcacctcgtgatctctcaggtgagttgtcacgcctgaatctgtcccgatcttctgctcttctatcatcatgcctactcctagattctcggtctccataccgctctgatctcgatggtccaccatccctagagtcccgacgactgtttgcatttctctgctcgtcatgcgaaaatttgcaggatgctccacggttgcactctcccttctggaaagcatagcacatgcctcggctcttcggtacatcactgtgtttgtcatgctcccatcgtgcaccactatcctctttagaaccccaaccggtgtttgcatttctctgctcatcatgcgaatatctgcaggaagctccgcggttgcactcgcctttctggaaagcatagcagactccacgggcctccctcttcttctgcagctcctcctcatcttcctcttccttcttcttgtacttgctcacatggtcaacctttatgatcctcccaagaactttagctccattcaaattgtcaacagcaagaatcgtgcttctctggtcctcgtacgcgaggaacgcgaaccccttggattttccggtgcccttgtcgcgcacgaggttcacgtcgacaacctcaccatactgcgcaaagatggcgaggaggtcgccctcggtgaggtcgaaggggacgccgccgacgtagacgtaggccgagtccttaaacttggcgtgccacgacgcgtcctcgccgatgcccaggagcgcctccttctggttgataatctgcgtccgcttcacctgcgtgaggggattcatcgccgccgccccggccgccggcgccgcgccgccgactactcgtacagcggcggattgggagacgaaggggggagtcgtgtcggtcagcccacgcgtccgcggacgcgtgggcggacgcgtgg

SEQ ID NO: 1659 - DNA, 2214 bp, Zea mays
  Clone ID: ZEAMA-23APR03-CLUSTER10330_6
aaacccgtgtccccctcgtttccgctcttctgctcctcgcgccgccgcagcgacccgacgacaggtaatggcttccgccgcggtgctccggaacgccggatctcgccgcctcttctcctaccccaccctccgtgctgctgcaatctcgggacccgccgtgctaccagatgcgcccgtggcggcgtcggtggcggcccagccgcccccgctggcctggacactctgggcgatgtccatggccaccttcacacgcacgaagccccatgtgaacgtcggcaccattgggcacgtcgaacacggcaaaaccagtctcactgccgctattaccaagggaatatcaactacaaggaattctgcttgcagatgatgctatggtgcctatctcctctcctttgactcctccactaggtgacagtgaagaaactgacaaaaagggggctgtggtaaaacgcctaaaggtccaagccataaaaaaagatatcaaacagagtcccaagaaggtgaatctagtagcaaagctggttcgaggtatgcgtgtagaagatgccctactgcagctgcaagtgactgttaaaagggctgccaaaaccgtttaccaggtgatccattctgctcgggccaatgcatctcacaaccatggattggatcctgataagctcattgttgaggaggcctttgtgggaaagggacttttcctgaagagagtgtcttaccatgccagagggaggtccggcattatggtgcgacccaggtgcagattgacagtggtggttagagaagctacagctgaggaggaggcaaagatcgccaaactcagggtgagcaactacaagaagctgaccaggaaggagcagcagcttatgcctcacaggctcatcgaggttagcccgaggtggattcgcaagaggaaagcggaggctggtgctacggcgtagtactttatgtatgcagaacctgcattcactgctttgcacatccgaggagcgaacatgccttccctggcacaaatacttgatcctctctcggtgtcgattcacgcaaacgggttacaaagccaggcttgttcgttttgctctcaatccatgtggattggatgtgtttaaatcgcaaacaagtcaaaatcttttataagtttttctaatctcatcaaatccacgtgggatagagaataatcgaacaagaccataggtggattcaactatttggtaatcttggtcgtttggagtctaggaagagaggaaattgctatgtatttcagcgatgtgcattgtagccaactaaaatctcgccaaagcattggatgtgcatgagacacgtaccattgcttctacaatttcatgcaactattggtttcgctgcttggggagatgaaaatggttttgcccggtgacaatgtaactgcgaattttgagttgatatcacctgttcctcttgaacctgggcaaagatttgcgattagggaaggaggaagaacggtcggtgctggagtcgtctccaaagttcttagctgatcagtttccactttcttctccgtagcaattcagtgaacaaacgagtgttgatatgttcgaccgggttagaaacgagcgcaaagcaccgggttttcttttgcatttttcttggaatgcctgagcaaaggcagagctggcctggccagtggccaccattttattgttgaggcgtggtgctgtgtaacaccacggttagtttggttgacacgcaagttgggcataactttgattgaataatactagtctcatcataaacatattttctagcaattttgtcatgtcggtcttggaggcgctttgtcaagtccgcagaaaaaaaatgctggttggactatatatgtgtatgtatttgtgatgtttaccgtcgctagcttctgatctggtgatgcgaaattttaatggcatggatattatctatttgtattcgaatttgattcgactacaaggactaaacccgatccttatctgagtccatgttctttagtatctgatatgtatttgatatttatccgtattcataaagtcataaagttggatatgtattatgttgatactgttttaaatattatctgacataatttaataacatttgtattcgatgtgaatccgaaaagaaaaaaaaaatgtaaaaataaatacggaacgactgtttgtatcggtgctggatagatttttgtgggatgaattagtacattatcttttt

SEQ ID NO: 1660 - DNA, 2143 bp, Zea mays
  Clone ID: ZEAMA-23APR03-CLUSTER103814_1
accacgtctcccctcacctggctctccccctgccacctcacgcgcgcccctgctctgtctcttttggctccgctgaggccgagcacacacaacaaattctctctctcctctctcactctctctctctctcacacacactctgctccctgtgcggaggacgggccggccgcatggggtgggggtggacggcgctggcggcggccgcgatggcgtacgtggcggtgaagctgatggaggtgctgtggtggcggccgcggcggctggagcagcacttcgcgcggcaggggatcaggggcccccgctaccgcttcttcgtcggctgcgtccgcgagatggtggcgctcatggtggccgcctccgccaagccaatgccgcgtccctaccgctcccacaacgtcctcccgcgcgtcctcgccttctaccaccactggaagaaaatctacggttccacgttcctgatatggttcggcccgacgccgaggctcgccgtcgccgacccggacctcatccgggagatcctcctgtcccgcgccgaccaattcgaccgctacgagtcgcacccgatggtgcgccagctcgagggcgaggggctcgtcagcctgcgcggcgacaagtgggcgcaccgccgcaaggtgctcacgccggcgttccacatggagaacctcaagctgctgctgccgttcgtcgggaggacggtggtcgacgtggtggacaagtggcacgacatggccgccgcggcgtccggcgaggtcgagatcgacgtgtccgagtggttccaggtggtgacggaggacgccatcacccgtacggcgttcggccggagctacgaggacggcaaggccgttttcaagctccagacccagctcatggccttcgcctccgaggcgtttcgcaaggtcttcatccctggatacaggttcctgccgaccaagaagaacacgacctcgtggaagctggacaaggagatcaggaagaacctggcgacgctgatcggccggcggcaggaagccgcggacgacgagaagctcagcggctgtgccaaggacctcctcggcctcctgatcaacgcgggcagcaacggcggcaaggtgagccccatcaccgtgaacgacatagtggaggagtgcaagacgttcttcttcgcgggcaagcagaccacgtcgaacctcctgacatggaccacagtcctgctcgccatgcaccccgagtggcaggagctcgcccgtcaggaggtgctccaagtctgcggggcgcgtgacatcccttcccgcgagcagctcaccaagctcaagacactcgggatgatcctgaacgagacgctgcggctgtacccgccggcggtggcgacggtgcgtcgcgccaaggcggacgtggagctgggcgggtgcctgatcccgcgcggcacggagctgctgatcccgatcatggccatgcaccacgacgcgcggctgtgggggccggacgccacgcagttcaacccggcgcggttcgccaggggcgcggcgcaggcggccaggcaccccacggcgttcatcccgttcgggctgggcgcgcggatgtgcatcggccagaacctggcgctcctggagtccaagctcacgctggccatcgtcctccagcggttcgacttccggctgtcgcccagctacctccacgcgccgacggtgctgatgctcctccacccgcagtacggggcgcccgtggtcttccggccgcgaccgtctgagccgtccgattccgattgcgacagtagggatgtgtgaggagatgacggagctcgtactaaccttgtcagtgtcaattgcgcctggcatgatgaccaataaccacctccgcagcatgctgctttgccctcaagggcaaacgagcagagcagccgccgccacgccgccaccgccaccgcccagcaccaccggaggaacaagtgactagaaggagcaccaccgtaccgtactaagtactaacaaatatatcctgctgaaggtgccagcagcagcttagactagtagagcagagtagaaggcttgaccagtgcctcccaatttttcagtcatttgggttgatgatttccttccttccatgaggttttgccaggtgtggttggtgtatgaaggattgcaaaattgtaaaaaaaaaaaaaaaa

SEQ ID NO: 1661 - DNA, 1760 bp, Zea mays
  Clone ID: ZEAMA-23APR03-CLUSTER104126_1
acggtatgcggtgtgctaggctcttggggtctttttgctccggccgcgccctcgtcccaacccgaccactgccgcccggacagtcaactgtgttctagacagttgagttcaaaaaggtgaggcggcgagatcgaatcaagcggagcggagcctacacatggcgatggcgctgcgtcggctgctgcttcctctcctcctcctcgtactcttaggtctgcggccgcagagctgcgtcgccagtggcggaggtggaggggagccggcggagttcgagatacctcgggacgggagcgtgctggagcttgacgagagcaacttcgaggcggcggtgcgcgcagccgaattcctcttcgtcgacttctacgctccctggtgcggccactgcaagcgcctcgccccgcagttagatgaggctgctgcagtgctagctggactgagcacgcccgtccttgtggctaaagtaaatgctgacaaatacaagaagctcggctctaaatatggagtagatgggttccctactttgatgttttttgaccatggagtgccctcggagtacacgggttcaaggaaggctgatgtgctagttgagaaccttaagaagcttgttgcacctgatgtttctgtccttgagtcggactcgtcaattaacggctttgttcaagcagctggcatcaattttccattgtttattgggtttggaatggatgagtcattgattgttgaatatggagcgaagtacaagaagaaggcatggttttcaacagcaaaggatttctctgaggatgtgatggttgtgtatgattttgacaaggttccagcgttggtttctgttaacccaaaatataatgagcagagtgtattctatggcccgtttgaaggaacttttctggaagattttataaggcaatccctactgcctgcaactgtgcccatcaatagagagacagtaaagctattgaaagatgatgggaggaaagttgttcttacaatcttggaggatgaatcagatgaaagctctctgcagctaataaaagtgttgaggtctgccgccaatgcaaaccatgatttagtgttcggatatgtgggagtcaaacagtgggaggagttcaccgagacttttgatgtgaaggtttcgcagctgccaaagattgttgtctgggacacaaaagaggagtacgaagtggttgagggttcagagagtttcatagaaggtgactatggatcccaagtcagtcgatttctagagggatatagggaaggaagaacaacaaagaagaaagtgggccgtggttccccaacactgctcggccttaacgcggtatacatcctcgtcctgttggtcgccgttctcgttgttttgatgtatttttccgcgcaaggcgaggaggatcatcagccaagaagagcccatgaggactgacagcaatctgagatggcttagattcaaggcgttgatccggaggctgccgagttatttttgaaggggggtaacatataacatctgatggacaaattttcctgatcttcatttcacgtgccctagggtcgagttttagatatttgttgcagagctatgcatgagctcccctgtgtttctcttgaacccttgaagtttttggacttgttacttgaggaccgggtttcctcaggtttatgtcattgtaattattcggcactttgtaacatagcattcatgtgttatatttgagacccttggagaaacgacttctatagattgaacagcaaaaaaaaaaaaaaaa

SEQ ID NO: 1662 - DNA, 1413 bp, Zea mays
  Clone ID: ZEAMA-23APR03-CLUSTER10415_3
gcacgagaccattacctagaacatcctaatcgaaaagtaccacactgccgcatttttttctctctccccctcctctcgcgctccgacgactggtcgccgccgctgccccaacgccaggtgctagggtcttcggcggcgaccagaatttaacaggaatatcaaagatggacctatgcaatctctgcggtgacaatctccactgagtttctgaccaaaaccagacatttctgtaacttgatgaccaagcatacgaggaacaaaaaaaagttcatctcatcagcttagatcctcgcatcacaggaaaccctaaagtagttccagattttttaaaaaaatccagcaagataccatttgcagcgatagagaaatatgcatggacagaggcaacttgtccagtatgcatggaattcccacacaacgctgttcttctactctgttcatcacatggcaatggctattgcccatatatttgtgcttccagctaccaacactcaaactgtcttgatcagcctgtggagtcatgcagaaaagaagcctctgaggacccagatgcaatagagcttgcgtgtcccctttgccgtggtgaggtcaagtgttataccttggttgacccagctcggaagcagctgaatcacaagaagaggagctccatggaagatggttgttcatacatggttacatacatagagctctgaaagcatgtccaaaagaaacacccttctgcaaacccacgagctgtggaccccttacatgcttacagatggaagagacttttatttcggctgcttcagaagcagttcggctggctgcaactctataactactaagtattgtcgcatgaactaaagaatctacagccgcagccataaaaagtctagctggtctgttcaagtacttcagaggtgatgcgaaggtttatttctctcatgctgcagtttgaggagcttgtggctccttcgcgagagggtggtgaccgtcatggcgctaccattgacgattcactgcaaagtgccaatgcagaatccactgatctatatgatctctggtcctctcgccgaaatgtgagaatctgtgttgatcctgcaggcaatcttgcatgaatccctgacttgctccccctgccgataagccgattcacaattactgacctgacaaagcgatagtagcctccatctgttctcaggggatgctcaatggtaatcttgaaatgaaacagactgttaagctttgatggatttattcagtaacagtgataatggctggttgaatggcatggggctagtgtgtcatgtgatgctttgttatcgtgcagcggctagctagcctctcccccctccctcgattgtatggcataaccgtttcttatggaatgcaatgtgatcctgttccgaaaaaaaaaaaaaaaaagcggcc

SEQ ID NO: 1663 - DNA, 1358 bp, Zea mays
  Clone ID: ZEAMA-23APR03-CLUSTER104319_1
atatcttagttgcacggttaggtaagacatatggacacaggcagttgcgtctctgtctcttatatacatatgctagatttgctatattgagttgacatgccgttagttgcgatttgcgaagctagctcccaccatctgcgacgccatgtcttcttcctctgtccaacaaacggcctttcccgagcaagaagccgatgcggaaggcgaaacgaaccctgagctctaccagcatttcgccaacttggtctcctccctgccgagctccaaaggcttgtccaacaacaaattctaccgccacgaccaaggctggcactgcagcgtggtgggcatagtgggcgccatggtcgccgacgcgtgcttcagcgcgcgcccctcggacgtcatcgtcgccaccctgcccaagtccggcaccacgtggatgaagtcgctcctgtacgccaccgtgcaccggagagagcgtcccgtcgtcggcgccgccgccgaccagcatcctctcaacagctggggcccccacgaactcatcaagttcttcgagtaccagctctacacgcgggacagggtcccggacctggacaggctccccgaccctcggctcttcgcgacgcacgtccctttcgtgtcgctgccgagctccgtggtcgccacgccgggctgcaagatcgtctacgtgtgccgcgaccccaaggaccacctcgtctccctgtgggacttcgtcaacaaatacttcagggtcaaggatgggctcgagcctctctccgtggaggccgccgccgagctgttctgcgccggcctgaccccgttcgggccgtactgggaccacgtgctcggctactggcgcgcgcaccgcgcggaccccgacaaggtgctcttcttcaggtacgaggagatgcagagggaccccgcggcgcacgtccgcaggctggcggagttcgtcggcctcccattcagctccgaggaggaggacggcggcgtggtggatgccgtcgtggggctgtgctcgttcgagcgcatgaggggcatggcgccgaccaagggtggcaggactgagttcccgatcggcgtggtgcccaacagctccttcttccggcagggcgtggtgggggactgggtgaaccacctgtcaccggagatggcgcgccgcattgacgcgatcactgcagacaagttcaggggttcgagtctcgtcgtctagctagctgttacggatcaatcatcactcatcatcagtgcgccactctaccgtggtttctcaaatgctcaataatgcaaggactacctattagtattctatatctatactattctattaataagaacttatatatgttgctatcgcggctccaaaaaaaaaaaaaaaa

SEQ ID NO: 1664 - DNA, 1787 bp, Zea mays
  Clone ID: ZEAMA-23APR03-CLUSTER10447_2
acaccatcctctcgtgttggctgttgctctgccaatgccacctatggacgcatccgctacactccacctcctccctctcgtcccagtcccagcggccagcgctcatccatccacccccatcctataataaaacctccgaatgcgcctcgcgtgccccgtcctcctcgtcgccggcggagccgcctactatcgcctggagaaggagcgccgcggggagcttttcccactgccgactgccgtctgaccctccgagatcggaagcggcgccggcgccggccggcgatggcgatcccgctcgtgctcgtcgtgctcccgctcggcctgctcttcctcctgtccggcctcatcgtcaacgccatccaggccgtcctatttgtgacgataaggcccttttcgaagagcttctaccgtcggatcaacagattcttggccgagctgctgtggcttcagcttgtctgggtggtggactggtgggcaggtgttaaggtacaactgcatgcagatgaggaaacttacagatcaatgggtaaagagcatgcactcatcatatcaaatcatcggagtgatattgattggctcattggatggatattggcccagcgttcagggtgccttggaagtacacttgctgtcatgaagaagtcatccaagttccttccagttattggctggtcaatgtggtttgcagagtacctctttttggaaaggagctgggccaaggatgaaaagacactaaagtggggtctccaaaggttgaaagacttccctagaccattttggctagctcttttcgtcgagggtactcgctttactccagcaaagcttctcgcagctcaggaatatgcggcctcccagggcttaccggctcctagaaatgtacttattccacgtaccaagggatttgtatctgctgtaagtattatgcgagattttgttccagccatttatgatacaactgtaatagtccctaaagattcccctcaaccaacaatgctgcggattttgaaagggcaatcatcagtgatacatgtccgcatgaaacgtcatgcaatgagtgagatgccaaaatcagatgaggatgtttcaaaatggtgtaaagacatttttgtggcaaaggatgccttactggacaagcatttggcaacaggcactttcgatgaggagattagacctattggccgtccagtgaaatcattgctggtgaccctgttctggtcgtgcctcctgctgtttggcgccatcgagttcttcaagtggacacagcttctgtcgacgtggaggggtgtggcgttcactgccgcagggatggcgcttgtgacgggtgtcatgcatgtcttcatcatgttctcccaggctgagcggtcgagctcagccagggcggcacggaaccgggtcaagaaggaatgaaaaatggagggtggagatgaggttctcgtggggtttgttatgggcaaccttcaaaaggactctccattcatattagtattaattcatatatatgcagcgccaaattccagacattgatatgctctcaaataggatgttctgctcccctcttgtatttgtatgcaggaaagggtttgtagggagtttaccccccccccccccccccccgcctttcttttgggcagaaagacatattctggaagcctttcagtagttcatttatcagcaacaattgcatctttcttccattgctgtgcaccttgtatcacctatcagaatgtggtcatatggggattgtacggcagcactgctgtgtgtgttgaaatgttgttccgttctgt

SEQ ID NO: 1665 - DNA, 1660 bp, Zea mays
  Clone ID: ZEAMA-23APR03-CLUSTER10464_1
gctagcaggagccaggtcgcgccgacagcagcagttggaagaggatccatggggaaggaggcgacgcttgcgttcacgcccacctgggtggtggccatcgtatgcctcgtcatcgtctctatctccctcgccgctgagcgctcactccattacctcggcaagtatctggagtgtaagaagcagaaagcgcttttttcagctctacagagactaaaagaagagctaatgcttctcggattcatttcattcgtcctgagtctctcccaaggttttattgttagcatttgcattccagaaacttctactgacttcatgcttccatgcaatagaggcaactccagagttgcagaagaaggtgctaaaatttgcaacaaaaagggtgatgttcccttgctatcactggaggcattacatcagctgcacattttcatatttgtacttggtttagtccatgttgtgttctgcgctacaacaatatcatttagtggggccaagatgagaaagtggaagcattgggaaacagaaattcacagagaagtacatgagaagttacagcaagaaaagaatgaaggacaagggtcatcattgagtattgttgtgctacatcgggagcaccaggatgaatttgtccacaagcggacaaagggattttggatgaagctcgctgttgcaagctggataactgcattcttgaagcaatttcaagattcagtgagtaaatcagattatgaagcacttagatcagcttttgtcgtggaacactatcccgagaaaccagatattgatttccacaaatacatgactcgcgctgttgaatatgagtttaaaagagttgttggtatcagctggtatctgtggctttttgtaatcttattcctgctgctgaatataaatggatggcacacatacttctggttggctttcttgcctctatttctgttacttattgttggtgccaaactagagcacattatcactcggttggctcaagaggcagcgatatcattatcaaataatacagaggaagttccgaaaataaagccatgcaaggaccatttctggtttcacaagcctgagctagtccttcatttgatccatttcatcctgttccagaattcgttcgagattagttttttcttctggattctggtatcagaaggtttcggttcgtgtatgatggaacggaagccttatgtcatttccagacttgttatcggggtgatcatcgaagtcatctgcagctatatcacgctgccactatacgccatcgtgacccatatgaccggacagatcaagctgcatggttttggctcccgcgtgcacgagagtgtccatggctggatcggcttgaggaagaaacccttctcgttctggaagattcccggcggtgaccctaacgctgattccggcagggaggccgacgtaacccgcagggtggccaaggagcggtcggggagctcgcgcagcatgccgatggcgccggctgacgagatcgtcaccgtcgacgacgtcgcggtggctgcagctgccgttggccaaggaccataaaattcctagctagcaaacaccagcagggaaggcaggcaggctgccgaggtaccgtgcgcagcgggttgatgggtcggacgctgcggaaaattcctcgtgtcgggagcaggct

SEQ ID NO: 1666 - DNA, 1520 bp, Zea mays
  Clone ID: ZEAMA-23APR03-CLUSTER10472_2
cctgtttgtttacccagattatctggcgtgtttctgttgggcggcgggcttctctgatccgataggggcaaaaacgattcggtagattataatggcaatgatgggtaatttctaggaaacttgaaagggtagtggggaagtgggaaaaaaataatctgaaataagcacctcctcacttgcttatggattatcataatccaaggggttagattatataatctgggcaaataagctagactgtttgtttgcctcttaggattatttaatccagattatataatctgggggtaaacaaacaggcccttaaagtctcttctttcccttttgtgatgggaacctttggccaattatgcagccgagcatttcgggctgccactgccgccaccgtcgcaggccaagggcaaggacttcaagaagggcgccaacttcgccatcaccggcgcgacggccctggagtactccttcttcaaggcgcacggcatcgaccagcgcatctggaacaccggctccatcaacacccagatcggctggctccaggacatgaagccgtccctctgtaaatcggagcaagactgcaaggattacttcagcaaatccctgttcgtcgtcggggagttcgggggcaacgactacaacgcgccgctcttctccggcgtcccattttctgatgtcaagacttacgtgccccttgttgcaaaggctatcgccaatggcgttgagaaactgatcgagcttggggcaacagacctcctggtgcctggcgttctcccaattggctgcttcccgttgtacctgacgctgtacaacaccagcagcaaagcagattacaacgcccggaccgggtgccttcggaggtacaaccgcctggccttccaccacaacagggagctgaagcagcagcttgacgagcttcagaagaagtaccccaagacgaagatcatgtatggagattacttcaaggctgcactgcagtttgtcgtcaaccctgggaaatttggtttcagcacggctttgcaagcgtgctgcggcgccggagggcagggcaactacaacttcaacctgaagaagaagtgtggcgagcagggcgcgagcgtgtgctccaacccgtcgtcgtacgtgagctgggatggcatccacatgaccgaagctgcgtacagaaaggtcgccaatggctggttgaatggcccgtatgctcagcccccaattctcaagtcatgatcgagattactaggctgtgcgtaataccgccgcagctgcatgctgcggctagagatatatatgaggagtgtttcaggcaatagatatgctaagttatggtaaagctatttggtctgttcattggaagatctgtataaactgcgccggtatagatatgttcccagctgaaatggctctagcacagatgtgcatggcatgttctctgattcttttcatttgttctaaaaaaatattgcggcagtaatatgagttgataaaagtaactaaatttctgcaataaaaaaaaaaaaaaaaaagcggcc

SEQ ID NO: 1667 - DNA, 1158 bp, Zea mays
  Clone ID: ZEAMA-23APR03-CLUSTER10497_5
gcttctagagttttagtgccagcctgccaggccagccaccaacctcctcctcttccgcatcgcatcgagagcggggctgtacagtgcgagactctactgctcgatcgccatggccgccgcgctcaggtgcccggcatccgtcagggtctcgggccccgccgccgcggggctcgccaaggtgcgccaggcgtccagagtcgtagcggtgagcggggcccggcagagccgcggcggcggcgtcgccgtgcgggcgtcgctgttctcgcccaagcccgcggcggccaaggacgcgcggccgaccaaggtgcaggagctgtacgtgtacgagatcaacgagcgggaccgcgagagccccgcgtacctgcgcctcagcgccaagcagacggagaacgcgctgggcgacctcgtccccttcaccaacaaggttggtctcgtctcgtctcgttccccctctgttcctagtcaagcaagcaagcaagcaagcctctgctcatccgtccctctctctccaccaccccaacctgcaggtgtacaacggcagcctggacaagcggctgggcgtcaccgcgggcatctgcgtgctcatccagcacgtccccgaccgcaacggcgaccgctacgaggccatctacagcttctacttcggagactacggccacatctcggtgcagggcccgtacctgacctacgaggagtcgtacctggcggtcaccggcggctccggcgtcttcgagggcgtctacggccaggtcaagctcaaccagatcgtcttccccttcaagatcttctacaccttctacctccggggcatcccggacctgcccagggacctgctctgcacgcccgtcccgccgtcgcccaccgtcgagcccacccccgccgccagggccgccgagccgcacgcatccctcgacaactacaccaactgaactgatgattgatgaatccattatcatccatctctgctctgtctgtcgcggctgtcagaacttgacgagacaagctcccctgctactcatcagtactcctcactcgtagccgtagtttggctactcttatgtgtgtatggctggtttcttcaattcgtgagtgcgtggtagtaccaataagcaataagacgcagagggatcgatcaaaaaaaaaaaaaaaaaagcggcc

SEQ ID NO: 1668 - DNA, 1971 bp, Zea mays
  Clone ID: ZEAMA-23APR03-CLUSTER104_121
ttttttttttttttttaaatctgataagtggatataaaaaaatcataagtatttcagattccctctccatgatacaacatacaggtaactctattcaacttccagacaaaatcagaatagaaacaaaggcctgagtggataaaccagaatagaaacaaggcctgggtgcataatggttatccaatccgagagcgtcactgccttcagcagtgcagcagcccaaaggaatacagaagtaattttaggatccatcttcataggctctggtggaaatcaatggttcttgaaccaagttcaaaaacccatgactaccaagtatgatctgatatggaggtaaggatctgagagacatgaaccaagttcatactgcacggtactcaataaacagaatcaacttctgaaccaacacggcttgtgaaccatatacaggttttctcccttcactgatccagttcttctccaagctggatggttttgcattagctcgtaggtcatcgatgaatgctgaaactatctgatatacagaagtccgaagaacatctgccatggtataagctttcttgtgtaggccgcctttttgtgtgcatgcaattgcaactccagtgccttttcgtcctgtggagaagttaacccacctaatgttttcaggacccaatgagtgcacaggctgtgggtttgttttctttcctaagcatgtctcaattgctactagggcagacagcaacgttgtcatcacagcagcattgcagccagtgagttgagcaacaccataccgatcctcctggcgtgagcacgcagttaacccagtcaatgtcctagcacaccatgcgcatatctgggaatcatcaaatgcactaaagagtttggactgttgtagcatcaattctggcttatcactagaaaaatcttcaagggattcagcaatttttgaagtaaactcctcaagtggcttcaaacaagttgtcacgattcttttataagtttcaccagattcctcaaagaaagcagctctgcgccatggttccaaattacactcagataccacacacaaatcttggtaagcaagatattgtatcaatgattgtggatcactttgttccaaagattctaggataaattcagtgggattagtgtctgcagcagcagtgctctgaggcggagcaaaactgcacctccttgtatgtacaacctgaacaaaatgatgatttatttccaaacagagagaaacaccagtggtcactataaaaatgctgatctcagtaagtatttggcttccaatagaacctcccgttctgaattgccaaggaagaaagaaaatcatgaaaagggaaagaaagaaggcctgcattgataactttagagctctttctccagatggtaggacacccatcttcaatccatagaataaaggtcgctgcacgacgggaaattggagcaaccacctccgacggccaaaatagcgcgcggcgaagatggccccaagcacggcgcctcggaacccaagcccagcgacggccgcccacccggcgtcctcgggtagcatggccgccgcggctcccacgcaaagcgcgccgggccgcggcgaagagggcggttgcgagcgccgcgccgcggcagcggggtaggccgcgggtgtggggacacggagaggaggagcgcgagcgcgagcatccccgtggcagcgcaggcgaggaacggagcaagcgcgacgaggaggccggaggggacgccgaggagcgggtggcggcggccgctcgagaacaccgtgaggtagagcgccgaggcggcggtcgagagcgcggcctggaaggcgaatacgccgagccaccgctgaccgacggcgtcgcggggcgcgccgcgcggtggggcacggtccattgcggcgacggcggcgggtgacgagggttttgggaggttctcgagtgtgcttttttttcgttgccctcgagcactggtgtctgggcctatcgg

SEQ ID NO: 1669 - DNA, 1548 bp, Zea mays
  Clone ID: ZEAMA-23APR03-CLUSTER10520_2
agacgtgaatccaagcgtgcaagcaagcggcggtaatggcggcggctctgcaagccacgccgctcaaaaccctatccatctcccgccggcgcgtcggcggcgcgggggcgcggccgcgtccgatggcggcgagcttccgatgctccgcggcggcgaggagctacaatatcacgctcctccccggagacggcatcggccctgaggtggtcgccgtcgccaaggacgtgctgtccctcgccggcgccctcgaaggcgtcgagctccggttccaggagaagcttgtgggtggctcggccctggacgccaccggcgtgccgctccccgacgagacactcgacgcggccaagggttccgacgccgtcctcctcggcgccattggaggctataagtgggataacaatgagaagcacctcaagcctgagaccgggctgctgcagctccgtgccggacttggggtctttgccaatctgcgaccagctgcagtattgccgcagttggtagatgcatccactctgaagaaagaggtagctgaaggtgttgacatcatggttgtcagagagcttactggaggcatctacttcggcaaacccaggggttttggaacaaatgacaatggagatgacattgggttcaacacagaagtttatccagcttctgagattgatcgtatcgcacgagtcgcatttgaggttgctcgcaagagaagagggagactatgctcggttgacaaagcaaatgtcttggaggcatctatgctttggaggaaaagggtgactgcactagcttcggaattccctgatattgagctctcacacatgtatgttgataatgctgcgatgcagcttgttaggaatcctaagcagtttgacacaattgtcacaaacaatatttttggtgacatattatctgatgaagcatcaatgattacgggaagtattggaatgctcccatctgccagtgttggtgaatcgggacctggtctttttgaacctattcatggctctgcccctgatattgctggacaggacaaggccaatccattggctacaattcttagtgcagcgatgctattgagatatggcctaggagaagaaaatgctgcgaacagaattgaagctgcagttactgaaacactgaaccatgggttccgaactggggacatatattctcctggaacaacattggttggatgcaagcggatgggggaagaagtcctgaagacagtgaactcactgaaggaagtggctgctgtaaactgatgcatgttggtacttaatttataaccctacaggatgagatggttgaaagggacttgcattttattagaagttgagcctggtgaaagagagcactgcgtctggttttgaatcgcaactgtagcggctgaaccgacggtcttttttcatttctggtgtttgttggccttcctgtaactcaattttgtacaaggaaggataagcatatgtatgataaaatgggatagtttatgccagttgaataaaatatgttctataacttctattcattataagaatgattaacttaaaa

SEQ ID NO: 1670 - DNA, 1262 bp, Zea mays
  unsure (1)..(1262): unsure at all n locations
  Clone ID: ZEAMA-23APR03-CLUSTER10573_12
accacacagacacacaggtacgcaangcacagccnaataccaccgcaccgcacctgcacaccgccaggatggcgcaaccgcgcacctcaccggtgtcctcggcgtgtcgtcgccgcctctcgctccgtcccactgcagctgcagcggcgctaagaagcagagctgctctctgcgtcaggggcggcagcagaggaggcgcctccgcgtcgcccgcgccgtcgaggtggacgcgccttccgccggcgcaccggagccggaggaggcggaggagccgtccgtcgacttcgcgttcgtcagctcgcggctgctgccggacgggacaccggacgtgcactaccggacggcgcgcggcgggcagaagctcagggacatcatgctcgacggctacatcgacctatacgggccctacgataaggtggcggcttgggtcgacgatggcggctctgggactgcacggggaatgacggttgagcgtgggtagacaaaaccagaaggagaaatgggaattaggggcgagtcccgactcccgagcggctggcaccgaggcgaagctcaatgtgacaaggtcgacgacaggagatcaacagcgatggcgacggtggcggccctactgcgtgctgggtggggaaacggacaaggagagtgcaaatgaggagtggggtgcgctggagttccgggtcatcactctgaatcccatgagggcttgttcaattctaccccaatccatatggattgaggggattgagggggttttaatccctggtaagtcaaaatcccctttaattcatatcaatcccctccaatccatatggattgaaaataaccgaacaagcctgtaaggtgcgtggacggggttgtaggatgcaggcgatggttatctatgcacaacacgcgacgtgggcgtggccttggtggagctaatggttgcggggaaaaggatgaggctgacgagtgtggaaaaggatggcgagatacttgcagatcactcggccaatgaagttggcatcgctgccgaactgaggtcagccactgataaactgagagacttgctgcgcaaatgagccgggcgaaaggcaacctgcacctctatctgatcatggaactcagaggcccagaataattacatagctgtgtaacggttagcagatcccgattgaagtagctgtgtaacggttagcactgtgccgttaaacaatgtcattgtcaccatcgatatgttgtttgtttgctcgctggagtgtatgaggaattgaagtttcaag

SEQ ID NO: 1671 - DNA, 1459 bp, Zea mays
  Clone ID: ZEAMA-23APR03-CLUSTER10583_3
gcacgagaccattacctagaacatcctaatcgaaaaaccgcaccacgcttcacccggcgtgcactccatctctctgggacgactacggccgccgccgccgccgcccccacctacgccaggtgccgaggccttcgttggcctcttcgccggtgacgagaacctaccagacttggagcaagcctctcaacatgtcgtgggccgcaatcgagaatgatcctggtgtttttacggaactgttgcagcagatgcaactgaagggtcttcaagttgatgaactctactcacttgacctggatgctctcaatgatcttcagccaatatatgggctaatattgctatacaaatggcgacctccagaaaaggatgagggtcctgtcatcaaggatgcaatcccaaaccttttctttgccaaccagataattaacaaagcctgcgcaacccaagctatcgtttcggttctcttgaactctcctggcattacccttagtgatgagcttaaaaagctcaaggaatttgcaaaggatttgccacctgagctcaaaggactggctatagtaaactgcgcaagcattcgtatgttaaacaattcgtttgcaaggtcagaggcctctgaggagcagaaaccacctagcggggatgatgatgtataccatttcataaactacgttccagtggatggtgtcctgtacgagcttgatgggctaaaggaaggaccaataagtctagggaaatgcccaggtggtgttggtgatgcagggtggtggcttaggctagcgcagcctgtgatcaaagagcacatcgacctgttctctcagaacgagataagattcagcgtgatggcgatcttgaagaaccggaaggagatgttcacggtggagatcaaagaactccagaggaagagggagggcctcttgcagcagatgggcgatcccaacgcaagcaggcatgttgagcagtcactcgcggaggtggcagctcagatcgagtctgacggagaagatcataatggaggaggagaaggtgaagaagtggaaagcggagaacctgaggaggaagcataactacgtgcccttcctattcaatttcctcaagattctcgaggagaagcagcagctgaagcccctgatagagaaggcgaaggcgaagcagaagtcccacggccccagctaggtgaaaagccgcaatgcacctacgtactgtctcttttagttggggttccttgtaagattggagttcgcgtatatgctttctgtttttagtttaggacaattgcaccaatagggtgcaactgcagatttatccctgttttttagactttgcgtgtgtgcctttagattttttgaaatgaaactgctgtatgtctctattccgttaaaccgttgtatgtctctacttcggttagtcgtatttagtatttaacggtgtcaagtcttgataatacgacaagggataattatgt

SEQ ID NO: 1672 - DNA, 1110 bp, Zea mays
  Clone ID: ZEAMA-23APR03-CLUSTER106110_1
ccccgaaccaggacgaaatccccaatccccagacgttgatacgagtatacgaggccgcatcaaccacgcaatcgccgtcagctcggtctacggccccgtaccggtattccaccgcttgcacgccaacgcgaacgccggccgccatggcctcctctgagtctcccaataccgcgcctgcggccgcggccgtcgcttcccaaccggcccgcgatttcctcgcccacctcgaggcctatctcgcccgccgcgacggcgtcgacaagctcctcaagatttcccgctacgccacgcgcctcgcgctcgccgccgggcccccgctgccccccggcgcctccgcccgcctcaagtccttcgagtccagcgtcggcctcagccgcaaggctttccgtctcggcaagttcgtgcagtccctcaacgccctcctcgcccacccgcaccctcccccgtccctcgcgctactcgcctacggcggtgagggcgtctactacttcgtcgagcagttcgtctggatcgccaaggccgggctcctgcctgcgcaccttcttccgcgcctccagcgtctcagcgcctgggctgagctgctgggctacgtcggttccattttaattaagctggaggaggtggctaagatcgaatcttcgataaagaagcggctcgtgaaggactgtgataaggagagcgaggcggtgaagactatgcagggtaaactgctgctgaagcggatgtcagtggtgcaggacgtggcggatgccgtcatggctctgggagacgtcaccgatggcaagggtttgctcgggagctccacgctgatggcagcagctggactgctctcggcgttgatcagcacgcataagaattggaattcttgttgaagcctggaggtacatgttatagatagcacatcatataatgaaataaagctctgattatagcgataactaagagtttcctctggaaatatggatgctcctaaaactgataccaggtcctctggggaatgaatgaagtttattcttattcatttggttggaccaaggaatcttgtgttttttcagccatcttgatcattcaataatttttttgttcttaaaagtaaaaaaaaaaaaaaaa

SEQ ID NO: 1673 - DNA, 1309 bp, Zea mays
  unsure (1)..(1309): unsure at all n locations
  Clone ID: ZEAMA-23APR03-CLUSTER10623_1
attcaggaacaacgatctttggcacggcggacggcggcgacccctccaactccccccaccttgatatcgccgctgctacgctgttatcaccattcgaagccatgagatgagatctcttcttacccgcctcttcacctcaactcacattgtcatggcctcgtcttccttctcttcctctccatctcggcggttggtccacctcacacgccatctcgtctcctcttcttccggcgagctttcctcagtcggcgcccccgccgctgccgcctcagatgccgaccccgtgaaaagcccacgctccactgcctccagggttcacgccgcggtgctggtctgcctcttcgaggaccctagcagtgggccacgggtcctgcttacaaagcgcgcttcctccctctcctcccactccggggaggtgtcgttacccggagggaaggtggacgatggagacgcagatccgaaggccacagctctacgggaggcgaaggaggagattggactggatccggcgcttgtttctgttgttacagttcttgagcctttcctatcaaagaatggcctcactgttgttcctgtcattggtatggtcccagataaagccttatacaagcctgtcttgaataaagctgaagtggaggacatctttgacgcacctctggagatgtttctaaaggacgaccaccggaggacaagacagatgaactggatgggcatagatatccccgtccagtttttcgactacgaggcagatggcaagaagttcgtgatttggggcttgactgcgcacatcctgacacgcgcagcggcagtcattttcgggaggaaaccatcattcgtcgagcttcccagacccaaatatgcaggtgcacctgttgctggcactggcaagtcgaatctctgatggagcataagctggatgtaaggggcctctttgggtttggaacttggtgcatgaaccttgtgattgtagaattatatatgtttctcactatgtgatggctggggaaggtaccgaaaattgcttggtatatttatctacagaatataagatacatgctcaactgtattttgagtgtagcacagcagacaatattggcacacttggtggatggtgctttgtaaaaaagaatgtatacaatgaactccagaaagtatactgtcttgaaaaaaaaaaaaaaaaaaaaaaaaaaaaaaaaaaaaaaaaaaaaaaaaaaaaaaaaaaaaaaaaaaaaaaaaaaaaaaaaaaaaaaaannnnnnnnnnnnnnnnnnnnnnnnnnnnnnnnnnnnnnnnnnnnnnnnnnnnnnnnn

SEQ ID NO: 1674 - DNA, 1301 bp, Zea mays
  Clone ID: ZEAMA-23APR03-CLUSTER10724_1
gtctgatactagtaattaatctatagagtgattctcagcatcgtcgtcagccatgggccgcgtgaagctgcagatcaagaggatcgagaacaacaccaaccggcaggtgaccttctccaagcgccgcaatggcctcatcaagaaggcctacgagctctccgtcctctgcgacatcgacatcgcgctcatcatgttctcgccctccaatcgcctcagccacttctccggcaggcgcaggatcgaggacgtgatcactagatacatcaatctcccggagaacgagagaggaggaggaggaggaggagtcgttcggaatagagagtatctgatgaatatgcttacgcaactcaaacgcgagggtgacattgccgaacagctcacaccacccaataaaggtccagcgaactccaacatagaggatcttcagcacgagattagaaattacagacatcaggtcgaagagttggagaagcaaattaggatgttcgagccagatccggcggtgttggtgttgacgaatgaagccgagacgtgcgagaaattcctcatggacacactcacccgcgtcgaggagcgtaagaaatatctgtcgtgcaaccagctgggcccgttcgagccgtcacccaccgacatacacgacgtattcggtgtgtcgcagcagcagcagcagcagggggacctgagcgcattcggggccggcgacgtagtatcgtatttcgctggcggaatagcggcgtcggacatcttctccggtgttggcccgatgtcgtctttcagcgagcagacgattttcgactcgatgcggccggacccggccgtcatggctggactggacccgggaatagccacgatctgcaccgtcgaccagcagcctcccagtctcaactgggaggacgcgtacgcgtctgcggggctcctctccgcgctcattccgtccacgcccttccccctcgatgaagaccagcaggacgccatgatggcgccggtgctcacgtctccgatggtgccgccgccgccgccgccgccgccgcatcacgtgcacgaggaagtggaggcgccggaaagctgctccaacgtgtcgacggacggggaccgcgccgctacaaccgcccccgccgccgtcggtcaagagaacgggctgcccagtgcggtcgtcgactagctagctgcatctgcttgtccgccgactgttttgcagcatcacttctttaccaggcataacagttggaaagcctacagctagccaacaactagacagccaaggatggattataccttcctctataaaaaaaaaaaaaaaa

SEQ ID NO: 1675 - DNA, 1021 bp, Zea mays
  Clone ID: ZEAMA-23APR03-CLUSTER10742_1
cgcgtgcgcgcgcgctcatcacaagctgtcacaaactcagcacacaatcacactgacacacacacaccacaccacggcaccgctagtgagaaatcacaagctgtcacaaactcagcacacaatcacactgacacacacaccaccaccacggcaccgctagtgagaagcggagcgggaggacacgcggcgcggactgcgatggctcgtgcgctcggcgcttgcgtgctgctcgccgtcctgctcggtgccctggcgccggcggcggccgcgcgcgcccacgacgaccagggcagcggggccggcatacggcagccgagcggcgagtaccgcgggaggaaggtgggggccaggacggaggtgcgggacgtggagggcgacggcgaggtgcaggagctcggccggttctccgtcgccgagtacaaccggcagctccgagaaggtggcggcggcggcggcaggctcgagttcggcagggtggtggcggcgcagcggcaggtggtgtcggggctcaagtactacctccgcgtcgtggccgtggaggagggcggcgcggggaacggcggcgagcgcgtgttcgacgccgtcgtcgtcgtcaagccctggctcgacggtcacgttcgccgctgataagcgaagcgtactagagagtgaagatggacgaactctgcgctgccgcgcgcagatcgatgttttttttttcaaaggctgttgcataaatagaggagacaagagtctgagactgagagagaataattaaatcgctgtgcttctataccaaaaaaagaaagaaaaatcaccagagatcccgaattatgattattcagtttctaaaaaaaaaaaaaaaaaaaaaaaaaaaaaaaggggggccccccgacaagggaccccgccgcccgggaaataattccgggccgggaccctgggggggacccagtttccccaaaggggggccgtataaggcctgggggaaaccagggccaaggcggtccccgggggaaaatttttacccgcccaaattcccaca

SEQ ID NO: 1676 - DNA, 1651 bp, Zea mays
  Clone ID: ZEAMA-23APR03-CLUSTER107566_1
ttttttttttttttttcttttttttttcgagggcctcaatcgtatattggattagacagaaaaggctaatcttactacattagtctgcaaattacaatcattttctactgctgccgtggcagcgtcgggagtcgaaactaccattaggaaaccctatgaggctatgacacctaattagcgacaattgtttcagcctgcaatcatctgcacaattaacataaccaaatcatatttgtttgtttagagaactaagttcagaacttcagataagatgtaattgcttcgctgttatcgtctatttgctacattcaggcagactgctgctgctcctcttcggggggctctgccgcttgcccttgcggcgtctgccacatataagtcactgggtgaccctgctggccaccatacatcatacctgctccttgcacctgctgagctggcacatagtaatatggatgagaaccatgatcagctggagcccccatagcaggcggcaggccaactatgggattatgtccgagcccctcctctttcatttcatccctcgggattatgtccaccaggaagtcatatatatcagtcctggtgatggcagctgcaatgtcgttcttctgcaaggtccggcgcttgttctcctctgtgtgcatccatgacctcaatgtcagctctaatatgaatacctcgcatgccttcgcaaacacaacaggagcttctgcagagatcatccgcacatcctcatcagccttcattatcttctttatccttgcaagtggcaaggtgtggatcttgaagtcatttgcttgcttgatctcatccatctgggtagtccagaactccctgagctgttgttcctgctgttgctgaagttgttgatgaaattgctgagcctgctggtacaccatctggtgctgagcactgagttgagttggattggggaatgctgctgctggctgtgagccaggaggaacagcaagagatccaggtactggcacatagggagcagcagcaggataaggttgtgacccaacacccatcattggttgaggctgtgaggatggttccatgctagatctttgttcaaaatcaataagtgtcctgaccctcgaaggatccttgagccgacgtgtctactccaaccctaagggaaacggaagaggaaggaggaggggatgacgcgctgagaccgaggagatggaagccgctttacctggacccggcgcgaccggaggcggcgcgagtcgttgcgggctgccggaggagtcggggattgggatcgctttttcgattaggatgttctaggtaatggtctcgtgcgctcctcaattggaaatttggtctttttttccatccagatgagcaagaaagactgcacaatgacaggttataccacatataaatgcaaaagatgtatttcaggtttcaacactaaaaattctcagatctatgttgatggatgggattgggaatgccttttgtgtatgaaaaaaatcgctggcctttatcttatttattcttgtagcttggacgctactcttgagagcagcaaataatcgaactgaagttactaaagatgcttgcttgtaaaattccatcttaagcaaaaatccatcttaaagcagctgcagtggtgcaatagcgcattggtataaaa

SEQ ID NO: 1677 - DNA, 1622 bp, Zea mays
  Clone ID: ZEAMA-23APR03-CLUSTER1075_3
gttttcagtccggaggtacatcaagggaggaacaaacgtgagggctgcctgcctccggacatgggctccagcttcaagtaccgagctggcctctgcctcatcgtcgccgtcgtgctgatttgggtcatatccgcggaggtcacgcaggggatattcacaaagtacaaacatccttttgcagttacttacttgggggcctcccttatggtcatatacctccctttgtcatttctaaaggattctggaaacaccagtgcttcataaattgcaagcaaaacttcctttggtggtggtgcccctttgaagaatgacgaatttcggaagactttagtgctaaattgcactgatgtgagcattcctgtagtgaaagagacaaaaccactcatatatggaatcactgaaatgaatgatggtgttttgaaggacaagcaactttcgactaaggagattgcaacttatggattgtatctttgccccttatggtttgtgacagagtatttatcgaatgcagcgcttgcaagaactagtgttgccagtaccaccgtactgtcttcaacttcagggctcttcactcttttcattggtgttttacttggccaagactccataagtgcttcgaaagttattgctgttttcattagcatggctggcgttgtaatgacaactatgggacagacttgggcatctgatgaatcagaagtaggcaaatctggggctacacaaaggactcttctaggtgatatgtttggttttatgtcggcaatcgcgtatggtctatttactgtgctgcttaaaaaattttgtggggaggaaggagaaaaggttgatgtccaaaaactgtttggttatcttggactttttacccttgttgctctctggtggattgtctggccattaaccgcactaggcattgagccaaagttttcgatgcctcactctgctaaagtggatgaagtggtggtggcaaatagcctaattggaagtgtactatcagattacttctgggccctttctgttgtttggactactcccttggtggccacgctaggcatgtctctcacaattccactggcgatggttgcggatatgatcattcacggccgtcactattcagcagtgtatattctttgttctgtccaggtattttcaggctttgtcatcgcgagccttgcagatcggctttcacgttctctagggctattatagtttcataaaacgaagcaggttcttgttagagtgtacatctggaagtttaaaggtcgggttggttagacaaaatacttgaggaaacacgggttgggatttgggaaatgccagtaattcgtttcccttttgctcctttaaacataggagcggtgaattttgccgcggcgaatagtaaaggccagcagacgaagaagaaaccgtatattgtagcaaccctttgcaactgtatattctcctactacaaattgagcgacagtgtaaactgccgtcgttctggccttgtcgacaggcttgcacgatttcaaaaaaaaaaaaatattatttaaaaaaaaaaaaaaaaaaaaaaaaaaaaaaaaaaaaaaaaaaaaaaaaaaagaaagagaaacaaaaaaaagaagagaaaaaagaaaaaagaa

SEQ ID NO: 1678 - DNA, 1347 bp, Zea mays
  Clone ID: ZEAMA-23APR03-CLUSTER10768_5
aattaattaattcttcaattgatcccatttgctctctggatgtgggttcccccttcaaatcgatccccttgatccagatatcggcccgcttgtcgaaaagattgatgatccaagcatggccaacgataaggatttactgcaggttgtccggttactggatgatgcttgcaaggaggccggattcttctatgtgaaaggccatggtattgatgagtcactgatgagggaagtcaggaatgtaacccgtgaattctttcagcttccttatgaggaaaaattaaaaattaagatgacacctcaaagtggatatagagggtatcaaaggataggggaaaatattaccaagggtaagcctgatatgcatgaagcaatcgattgttatactcctattagacctggcaaatatggagatctcgctaaaccaatggaaggatctaacttatggccaaaatacccatcaaattttgaagacatttcaagaaagataatgcgaggtatagccttggctttgggaggggcaattgatgcttttgaaggggatacagctggagatcctttctgggtgttaaggttgattggttatcccgtagatattccagaagagcagcgcactgatactggctgtggagctcatacagattatggacttctaacactggttaaccaggatgatgacatatgtgcccttgaggggggcacaactcttcggtgatgtgctgggagctgcagaattctgtggctcgggaggggagcgcggcgtcccccccaaccatgatggaagtggatggctctgacaagaggaccaacactgctgttcctgaaccatctttgcttccttctgagcttgtgcagcattttgatcaaccactgtccaaaggaaagattaaggccatcaagaccttgctggaaaatgggaagcagttgaagaagaaggtcaggggctccaaagtcgcgccggctgttctggcatgcccaactgcgctggtctaatggtggagctggctctttagggtcgtcatcctgtttttatccatgttaccgtttgctggagtgttgacaatggtagtgtgtcagggtctgttcccttttggtggttcaaaaatcaggccttcctacaagtgtgtggaacgtagtaaggtgtcagctatgggggagcaaaatcagtttctcccacccttgttgtcttgtttctgcccctggctttgtacttggtcttctgcggccagcctcatgggaattgagtcagtctatttggccttgttgatgttgcaacgattatctagtagtcaatttttctttaatgtcacaatcaaattgtaatgtgctatgctggaatgtgagaggtct

SEQ ID NO: 1679 - DNA, 2653 bp, Zea mays
  Clone ID: ZEAMA-23APR03-CLUSTER10770_1
gcacgagaccattacctagaacatcctaatcgaaaaagcctacacgcccccgcctcctgccctctgtccacatcctcgcctctccccactagttcgctcgcgtgatggtggtgcgggagcagcggaacaagggttcgtcgtcggccaccctgtgacaccccgcccacgcccccgcggcggaacctgcaaacccggaggccggagctccgacttcgtcggccatcgaccgcgtctgatcggcgctgggacctgccgtccggacgaaatcggtcagcatgacggggcccaatgagaaggcggcggcgggaggcgggggtggcgagaggcgcaagtacccgatccacgtggaggactacgagctgtacgaggagatcgggcagggcgtcagcgccatcgtgtaccgcgcactctgcaagccactcgacgagatcgtcgccgtcaaggtggtcgacttcgagcgcaccaacagcgacctgaacaacatcgttcgtgaagctcagacaatgattttgatagaccatcctaacgttgtcaaggcgcattgttcatttgcaaaagaccaaacgttatgggtggttatgccgtatatggctggggggtcctgtcttcacataatgaaatcagtgcatcctactggattcgaggaacccatcatcgcgactatacttcgtgaagtcctgaaaggtttagagtatcttcaccatcatggctctatacatcgagatgtgaaggcaggaaatattctagtcgattctcggggtggaattaaacttggggactttggagtctctgcttgcctttttgattctggtgatagacagagggccaggaatacttttgtgggaacaccttgctggatggcgcccgaggttatggagcaactacatggatatgatttcagagcagacatatggtcctttggaattactgcacttgaaacttgctcatggtcatgctcctttctctaagtaccctcccatgaaggtcttgctcatgacacttcagaatgctcctccaggtcttgactatgaaagagataagaaattcacgaggaacttcaagcaaatggttgctatgtgtttggtaaaagacccttcaaagaggccttcggcaaaaaagttgttgaagcaaccatttttcaagcaagctcgttccactgattttattgcacgaaagcttttagaaggattgcctggccttggtgttagatatcaagctttgaaggaaaaggatcaacatttaatggctcaaaagaaaatgtctgatggaaagaaagaagaaatctcgcaggatgaatacaaaaggggtatcagcagctggacctttgacatggatgacctgagatctcaagcttcattgggcacagaatgtgaagacagtaccttatgcaaagattcagatatatctttctatgacttggacagtttacaggatcaagcaccagaagggccacacttgttgagagatttctcaacgaagtatgatgctgacattgaaaatgatatgacaaccaaagataagtcagccgtttcatctcctgatcagcctgctagcttagtgaggaatgcttctatgcgtgggatgcccataaacggttctttcaggaaagacaactctacagaaagcttcgatttggaatgtcaagagaaacatctggacattgttccgactagctcatcccctgaaaggaagttttcttttagttcttgctcatcaaatgggctccttttgtccaaagagagctctaaacagcaaactagcatccacaaccttgacaagtgtaatggagggcatttgcatgtatcagatgaaacatcttctgaagctgctcctaagacacataaatcagcagaggaccatgatgatagatccaaacctccacttataagaggtcgatttagagttatacctgggcatgttgactcaaaggctcaaccacctggcctacagaagtgtcacagcatgcagacaatttctcgccttccatcattaagtataccctcttccgcagaagttgcatcaaccattattggtggctccttctacatgcagctatatagtattctacagacaaatatgcttcagagggaccaaatacttaacgcgatgaagcaggtgagtggttgtgctatggcttcaccaggcgtaccttctatggcttcaccgtgtatcccttccacaagtcgctcgacatctccatcaggtgtaccatcagttgacagatccatgctggaagctgcacaagaaagggagaaagagctgctgaatgaggtcttggagctgcaatggcggttattgtgcacacaagatgaggttcagaagcttaaagcaaaggcagcgcagatctgatgctgaagctgttaagggagcattaagggcgcgtcatgataagatgatctgttcatgcggttttcaaatggctatttagcataggagagagatacaaaattaaggattggtgtatatttaaaaaggtgctagtgatgctcgagtgtccaatcctgtctaagcaggacattaatttcgtacaatctgtgtgtttgtgtttatgggtggcatggcgctgtgtttttgttggagcgcaattcccaggttgggacttgggaaagatagcttaacatgcctatgggttttaataaaaaaaaaaaaaaaa

SEQ ID NO: 1680 - DNA, 641 bp, Zea mays
  Clone ID: ZEAMA-23APR03-CLUSTER10777_5
gtcactgctttacgtcccaacaggcggcacatttccgccaccagctaccaccgcctgcgcgcagcgcggtcctctctctcctcttctttacacctcacctccggatcgctcagagattgagccgtagcccgactggtcgccgcgtcccctccccccgcgcagcagcagagcaccacccggcgagcgagcaatggaggcggggggcatcggcctggcgctgcaggcgcgggcggcgggcttcggctccggctccggccggcgccggggcggcctacaggcgcccaccgggagcttgagagtcgctgatccggcgggacctgcggtcgctgtgcgggctcgcgggtccaagcccgttgcaccgctccgactccgtgcgaagaaatcgtccggaggtcatgaaaactcgcacaactccgttgacgaagctctcctgttgaagagaaaatcagaagaagttctgttctacttgaacgggaggtgtttttacctagtaggtccgtcctcatcctcctatgtgacgattgctatagagaattccgacttttagatgaaactaccatatttgaatatgtgattgatgagtgagagtgagcgtgtgcaagaatgatgggttctggaaaaagtactgtggggaagattat

SEQ ID NO: 1681 - DNA, 2255 bp, Zea mays
  Clone ID: ZEAMA-23APR03-CLUSTER10782_1
gcacgagaccattacctagaacatcctaatcaaaaaagctcagccgagccaactgctggcgtggaagtggtcgctacctacctcttctcacagcacccggctggggcagactagctgtgctataggctgctgctagtcgccgtggcttttctttcttacatagtgccccgcgagcggtgtgcgcacatcgtgagcctgccatttaacattaattagagatgattgaaaccgttgtggagagggaggaggagtgcttctgcgtaggacgtagccaaaagcagcagcagtcacttggagttggcacaagagcggcggtgagcgctgccgacaggacgggcgacctgtgtttgcagcggcggcagcaccagctcccgactgtccaagcacaccaattgaagcagcctccaggctgtcacacacacgggcggaacagaacccgccaatgtattcttcgtcgccggcctgggagaagcgcgcgagcagccaagagcaggagccactcttttgcaattgcagctgcggcaggaggtttcacaggccggcggtcatctgcaggacgccgcactgatggcgacggcggtctcctgtccctactcctcgtctcgcgccggcgcccctgcactgctgctcgtcgcgcttcttcttgccgccgccagctggacgaccaccgccgcggcgaagaacgacacgcagaggttccggcccggcgacgagctccggcggtaccggagggtgcaggcgctgctcaagaggctcaacaagccggcgctgcggagcatccaggcaagccccgacggcgacctcatcgactgcgtgccggcgcacctgcagccggccttcgaccacccgaggctgcgaggccagaggccactggtggcgggcccgccgccggcgaggcccaaggggaaccgcctccgcgacccgataaggaatgacaccgcggaggccgccggcgtccagcagctgtgggcggcgtccggggagtcgtgcccggaggggtccgtgcccatcaggcgtgtcacggagtcggacgtgctccgcgccagctccgtcaggcggttcgggagggcgcccgcgggcagggtgcggcgcgactccgtctccggcggccacgagcacgcggtggggtacgtggccggcgacgagtactacggcgcgaaggcgagcatcaacgtgtgggcgccgcaggtgagcacggcgtcggagttcagcctgtcgcagatctgggtcatcgccggctccttcggcaacgacctcaacaccatcgaggccggctggcaggtcagcccggagctgtacggggacaacgcgccgaggttcttcacctactggacgacggacgcttaccagaccaccggatgctacaacctcctctgctccggcttcatccagaccaacagccgcatcgccatgggcgccgccatctcgcccacctccgcctacaacgccggccagttcgacatcagcctgctcgtctggaaggacccgaaccacggcaactggtggctggagttcggctcgggcgagctggtggggtactggccgtcgctgctgttcagccacctggcgtcgcacgcgagcatggtgcagttcggcggcgaggtggtgaacacgcgcgcgtcggggtcgcacacggccacgcagatgggcagcggccacttcgccggggaaggcttcggccgggcctcctacttccggaacctggaggtggtggactgggacaacagcctggtgccgctcgccgccggcttccacgtcaccgccgaccaccccagctgctacgacatacagggcggcgtcaacgccgtctgggggaactacttctactacggcgggccgggcaggaacgtcaggtgcacctagctagtagcagctatagctcttcgtcatctcgtctcggcccgttaacctgatgtgatgatgccgctagctaggattttctcttcttccatatattgcccacaaaaaggttaattaatttctcaaatgcgagagtcacggatcatgtagttttcttttctttttgatttcctattttcttggtggtctctgaacgaaacaaaagggtgaagggttaagctcagttcaaacgtagtccagttcatcaggtcgtagcgacgatgatggtcgtcgagttgtaacgtacgtaaaagccccctgaacaatatgtagccacaaggcacaatctagcagtatatacacgcattgttttactcctttccaaaaaaaaaaaaaaaagaaaaaaaaaaaaaaaa

SEQ ID NO: 1682 - DNA, 1004 bp, Zea mays
  Clone ID: ZEAMA-23APR03-CLUSTER10786_1
gcacgagaccattacctagaacatcctaatcgaaaagtgtccacggcggccatccgtcattccacagctttgctctctcgctgtctctctctatccatggctgaatcggcacctcgactcctcgtcctcgtcctcctctccctcgtggcggcgctcgccatggccactgggccagcggcggcagcgcacgcagggggccgtagccgcctcatccacctgcacttgtacatgcacgacatcacgggcggcccggggcagacggcggtgcaggtcgtcaagggcccagggccggcgcacccggcgatgcccggctaccacttcggcgacaccacggtgatcgacgacgcgctgacggacgggcccagcgcgtcgtcgtcgcggctcgtcgggcgcgcccagggcacctacatgctggcgtcgctcacggagcccgtgctggcggtttccatgaccgtggcgctcacggccggggcctacaacggcagcgccgtcgtcgtcgtgggccgcgacgacgtctcggcgggcgtcagggagctcgcggtggtcggcggcaccggcgcgttccggagagctacgggccacgtgctgtggcggacggccaggatggagtcccgggaccacatggtgctggagctcgacgtctacgccaccgtgccggccgctagtccggctccgcctccgcgcgccggattggcgcgtcaggtggcctgagtgcctgacctcaaccgtacctcgacgtgatgtcaccggacttggttttgattttaccatgcacgctgctcgcctgctgtgtgtatggtcaatcgtataaaattgcttcagctccgcgcctccgcacatacgttggaaaattgaacaataaatgattactatactgctgctggtgctaccgctaccgtcagtcataataataagtttgaattctttacgttcaaatcaatgaacctatgatggatgtgagtttgtcctaaaaaaaaaaaaaaaaaaaaaaaactcgagggggg

SEQ ID NO: 1683 - DNA, 1355 bp, Zea mays
  Clone ID: ZEAMA-23APR03-CLUSTER10788_1
gcacgagaccattacctagaacatcctaatcgaaaagacctgtgtacactcgtactcgtctcttcttcgccacacacacacacggctgctagtgtacacagaggcacagcagcaggaggatggccgtagtgccggcggcgccggtggttcttggagtggccatggtgctcgtcgtcctggccgccagcgccggcgcggccgggcagctcaggatggggttctacgccgagagctgcccgggcgtggagcgcgtggtgggcgacttcgtccggcagcacgtccgccgcgtgcccaccgtcgccgccgcgttgctccggctgcacttccacgactgcttcgtcaggggctgcgacgcctccgtcctgctcaactccaccgccggcagcgtggccgagaaggacgcgccgccgaacctgacgctgcgcggcttcgacctcgtcgaccgcgtcaaggcgctcgtcgaggatgcctgccccggcgtcgtctcctgcgccgacgtcctcgcgctcgccgcccgggacgcggtcgtcgccatcggcgggccgtcgtggcgcgtggcgacgcggaggagggacggcacggtttgggtccgccatgcacggctcgacgacatccctaagcacaccatgaccttcccgcatctggccagcctgttcgccagcagaggcttcggcgttcgggacctcgtctggctctcaggcgcgcacacgatcggcatcgcgcactgctcctccttcgcggaccgcctgtacggctaccccggcggcggcgttggcgcggccggcaacgacacggccgacccggccctggacgcgacctacgcggccaacctgcggaggcgcaagtgccgggcggcgggcggcgggtacgcggaggacggcgtggtggagatggacccaggcagccacctgacgttcgacctgggctactaccgcgcgctgctcaagcgcaggggcctgctccgctccgacgccgcgctgctcaccgacgcggcggcgcgcgccgacgtcgagggcgtcgcggccgggcccgaggaggtcttcttccagctgttcgcgcggtccatggccaggctggcggcgctgcaggtcaagaccggcgccgagggggaggtcaggaggaactgcgctgtcgtcaacggcggctaatgcatgtagcttcttgcctttcttcttctttcccttcatggccattactgctagcgaatactgtgattttgctcttgcattttgggtgcttcacgctcgggtgcaattatcatgtcaaagaaattgttaccctcttgctccttttgttagagacttaatagaattgtttggactggcacaaaaaaaaaaaaaaaaaaaaaaaaaaaa

SEQ ID NO: 1684 - DNA, 2666 bp, Zea mays
  Clone ID: ZEAMA-23APR03-CLUSTER10822_1
actgtgatatggtataacaagtagtactgtacgattctcccggggagctcgacgatctagatggagatgacggggtctctccctgtgcccagcgtgcaggccatggtggccgctgctcggcatgcaccagtgccaccaaggtatgttcaaggagatctttccctggcttttgtcgttggagagcaagcgctctccctgtgcacaacgttctgcccccggctgcccgcggtcgacccatgggaaagtgcccgccaggttgccccctgccggcccggccgcgtatttcgtcggtgccgccgatgcgttgcgcatccccagcggcgggcgacgaaggccagtgccgggtcattcttcgcgcttcctgcgcctgccaaggacctgccaggactggggcttcttccagctgataaaccacggtgttccggacgatgtgatggaggcgatgaaggccagcacccagtcattcttcgcgcttcctgcggaggccaagcagcagtaccgtcagcaggcaggacagctggaggggtacggccagctgttcgtcgtctccgaggaccagaagttggactgggccgacgtcctctacctcaacacgcacccgcccgagcaccgtaacctcagcttctggcctgctggtgagagcttcaggcagacgctggacacctactccgccgccgtcaagcacgtcgccgaccgcctgctgggagccatgtacatgaacctgggcctccagctgagcatcatgcaggttggaggccggcccggtctccggcagacgacgtcttctccaacgatgtcgcagatgacgacgctcctaccccaactctcgacgctgctcaacctccatgctcaagctgttgttgtgcccatcatccgagctcttgtatcgctcttcctcgacgtcaactccaccttctacgctcgatgttttattttagttaaggggtaaagggtcgtattcgctagcgtttgagaaggagcatcatccccagccgaacgcacagcaatctggtccaacatccctgcctattcctcaaaggtaggccctgattaaataatccttaactgtctgatcatccatgttgcaacgattctcctgtactgtgatatggtataacaagtagtactgtacgattctcccggggagctcgacgatctagatggagatgacggggtctctccctgtgcccagcgtgcaggccatggtggccgctggtcgtcatgcaccagtgccaccaaggtatctccgtccagatctggccgcggatgtcgtcgttgccgacgacgcgacgaccatccccatcatcgacttccagcgactgctgctggtcgacccagaggaatctgcgcgcctccatgcggcctgccaggactggggcttcttccagctgataaaccacggtgttccggacgatgtgatggaggcgatgaaggccagcacccagtcattcttcgcgcttcctgcggaggccaagcagcagtaccgtcagcaggcaggacagctggaggggtacggccagctgttcgtcgtctccgaggaccagaagctggactgggccgacgtcctctacctcaacacgcagccgcccgagcaccggaacctcagcttctggcctgctggtgagagcttcaggcagacgctggacacctactccgccgccgtcaagcacgtcgccgaccgcctgctgggagccatgtacatgaacctgggcctcctgagcagcatggacatggacccggagcggggtgccgggatacagtcggtgaggatgaactactaccctccctgcgctgaagcggcggacaaggtcctgggcttctctccgcactccgactcggaccttctcaccctcgtcctccaggtcaaccagctccagggcctgcagatcaagaggccgcccgacggcggcggtgcctgggcctggcttcccgtcacgccgctgcagggcgccttcgtcgtcaacgtcggggacgtcctcgagatcttcaccaacgggaggtacaggagcgtcgagcaccgggctctagtcaacgcccacacggagcgcttgtccatcgcggcgttccactctcccagcatccatgccaccatagggccgctgccggagctcctcggggaccaggaggtgcccaagtataagacgctggaccaccaaagcttcattacgctcttcttctccgccaagctccagggcaagagcttcttggaacggatgaagaagctttcgtagagccaatcggacggaccggaaagttaagcaggccgacgtaaagtcggattacatgttatcggttcggccatagcaatatagcacgcatgtatgtccggattaatttggtgaccgacgagactagttttgtctaccaattcacttttacatcgatttttaaatataaaaaacttacaaaaccgggcaagagcttcttggaacggatgaagaagctttcgtagagccaatcggacggaccggaaagttaagcaggccgacgtaaagtcggattacatgttatcggttcggccatagcaatatagcacgcatgtatgtccggattaatttggtgaccgacgagactagttttgtctaccaattcactttggcatcgatttttaaatataaaaaacttcccaaaaaaaaaaaggaagggcggccgcagggaaggagctc

SEQ ID NO: 1685 - DNA, 891 bp, Zea mays
  Clone ID: ZEAMA-23APR03-CLUSTER10871_3
acctctgttcagccaaagccacctccccaaacccaatcccgtcactatctcattcccctgaccgccggaacaccctaggcaatggagcccaaatccaccacccctcccccgccccccgtgatgggcgcgcccatcgcgtatcctcccccgcccggcgccgcgtaccccgccgggccgtacgtgcacgcgccggcggccgcgctctaccctcctcctcccctgccgccggcgcccccctcctcgcagcagggcgccgcggcggcgcaccagcagcagctattctgggcggagcaataccgcgagatcgaggccaccaccgacttcaagaaccacaacctgccgctcgcccgcatcaagaagatcatgaaggccgacgaggacgtgcgcatgatcgccgccgaggcgcccgtcgtcttctcccgcgcctgcgagatgttcatcctcgagctcacccaccgcggctgggcacacgccgaggagaacaagcgccgcacgctgcagaagtccgacatcgccgccgccgtcgcgcgcaccgaggtcttcgacttcctcgtcgacatcgtgccgcgggacgaggccaaggacgccgactccgccgccatgggagcagccgggatcccgcaccccgccgccggcctgcccgccgccgatcccatgggctactactacgtccagccgcagtaacgaatttgcttccttatcatggtttcgcttccatgcagcctttgcgggtttttagtaaactattattattactgagagtgccctgttgttacccatgctctgttgttgccacccaataactcgatgacctgatgatcatctgatgtgcctcccgttccgtaacaagtgattccatttctctataaaaaaaaaaaaaaagggcggaaa

SEQ ID NO: 1686 - DNA, 1467 bp, Zea mays
  Clone ID: ZEAMA-23APR03-CLUSTER1089_5
accacgcgtccacgcctcaccatcgcagaagcgcagtaggaactaggaagccggacaaagctacgcaaggagggagaaagcgtgtaaaccatggcgtcctccgcgttcctcaacgctctcgtcctccgatcgccatcaccgtcgctctcgtcctcgtctaacctccgcagcaccggcgccttcgcgttcccgaaaccaccgcgcttcccatgcctgcgttctgcgcgtcgactcgtccttgcgagggcggcggcagcgccggcgccggggcgatggccccgaggacgagtgggggccggagcccgagggcggttccgctgtcacgggggccgcggtggcggaggcgccagaggcgagagaggtcgcggagctcaaggcgcagctaaaggacgcgctgtacggcacggagcggggcctgcgggcgtccagcgagtcgcgagccaaagtgctggagctcatcacgcagctcgagacgcgcaaccccacgccggctcctacggaggcgcttacgctccttaacggcaagtggatcctcgcgtacacatcgttttcccaactattcccactattggggtttggtaatctgcctcagctggtgaaggtggaggaaatatcacaaaccattgattctgagaacttcacagtgcaaaactgtatcaagttttcaggacctttggctacaacctcagttgccactaatgcaaaatttgaaattagaagccccaagcgtgtgcagatcaaatttgatgaagggattgttggtacaccacagttgaccgactccattgtgctaccagagaagtttgagttatttggacagaacatcgacctgagtccactgaaaggcatattttcttccatcgaaaatgcagcatcctaggttgcaaagaccatatctgagcagcctccgctgaaaataccgatcaggacaaacaatgctgaatcgtggttgcttacgacataccttgacgaagagctcaggatctccagaggcgatggcagcagcatctttgtgctgttcaaggagggaagtactcttctatactgagatccaaatcccgagtcgatgatcgttgaagctgaaccgtgaagtagttatactgcttatgctttcctttcttatagtaatatactccgtctcaaaataagtcaatttctagaatcacttaaagtcaaattatcttaagtttgaccaattttataggaaaggcaccatcgtctatgtctctatgacaccaaatgagtacattatgaaaaatatatgggttgtcttgtaaatacagttcttgtcattagagtatatgatgactaggaccggtttaatccgaaatatataaactctatatatcagtcaaccccttttttatagttagggccaccaaaggagtccatattgaaaatattttaatggggcttaagggcccctaaaaaaaaaaaaaaaaaaattaagggggcggcggttttaaa

SEQ ID NO: 1687 - DNA, 1746 bp, Zea mays
  Clone ID: ZEAMA-23APR03-CLUSTER10928_1
gcacgagaccattacgtagaacatcctaatcgaaaaactcagcacacacatcagatcgccacatctccgacaccaacccacctccctcctccccctctcgccgtcggccccgcccgtcagcctcggccgagtgcgtctgcctcgcactcccgcggcccctatagacagagcagccgctctagagcgggaggaaaggcgagcagaggagacagagatggggaagggaggaggagaagaggacggcgcggcggcggccgcgcgcgcggcggagcaggcgcgggagctgcaggacgcggcggctgcgctgctgacgcagacgcgggcggaggaggaggcgctgcgccgccgcgccgccgcgctgcagggggagctgcggcggctacgcgaggccgccgcggcgcacgcgggcagcgacaaggttgaggaggacttggatcgagcagcgtgcctcatcgctgaaggtgacgttgcgtcgctgctcccgagcaagacgcaaggcgcttttctgaaaatgttcttgggaccagtaaatttgcgggcaacaaggaaggaggtgcagctcaaggtgaaggaggagtacaatagctacagggacagaactgccttgctgtttctttgttttccggtgattttgttgtttcttcgacaatggttatggaatggatgttttccagtattgccagttcagctataccaggcttggttattattcctgtataccagtttagctttgcgtgagaacatactgcgagttaatggaagtgatattcgtccttggtggatacttcatcactactgtgccatgctgatgtctcttgtaagtctcacatgggagataaaggggcaacctaattgtgcacgcaagcagagaggcgtggaacttttcctttgctgggccataatgcaaggatttgtcatgatgctgcagaatagatatcagcgtcaaagattatatactaggattgctttggggaaggctaaaagaatggatgttgtatggggagagactgctggtgttgaaggtcaattgttgctgttgtgccctctccttttcctcctgcagggattcgagggttatgttgggtttttacttctgcgcacagctcatactggcgttgtccctgagtggcaggttgtggtatgcgggatcctgctgatcgcgatggcaatcggtaactttgcaaacacagtggacaccctggtaaccaagtcccggttcaaggcgaagatgaagaaatccaagggcagacgggacctcgacacatgcccctcgccaacaggttcatcatcgccgatagattcagcgaccaccaaagcatgaacaaggccaagaggaaaaggtgcccgtgtttaacccgggtgtgttaccactgtaaagcattttagtgtttttttttcttggccgtcagctcgtaatcctgtccgtcgtctgtgtcgaagctcatactcgtgtaatcaatcatcaggcaagtaggctgctgatggttctaggctggaggtggccgagaataaacttgtggtgtttgtttatatacctgtaccctgaatgaacatcgagtgggctagggtggtgggcttaggactatgtaaggcttagcaaaattttccaagtatagttgtgagacaggcaggcatttgtcacaatgaatgaaacatgcgaagttgtatacacgttgtggcaatgtgttgctttgtatgttggttggtgcatgcttacgttgctctgaaataaaaaaaaaaaaaaaa

SEQ ID NO: 1688 - DNA, 1406 bp, Zea mays
  Clone ID: ZEAMA-23APR03-CLUSTER109386_1
ttttacgacacccaacggcagctgcagcacagcagaggaaggcaggaaggaagaagatatcagaccagtgtgaagccaagccagcgcgtctctctctctctctctctggtcgcttggtcggtccatcggaggatcagctcggcggtggccatggcaatggcgcagcaagcgagcctcccctgctcgactgccaccacatggagagagctcacgaacacgagctggagggacgacgactacaggcggatggtgatggcgtacctgaacgacacaccaaacgcaatggcgcaggaaggggaggcccccggcctcccggacgactgctactactactactacatggacagagctcaccaacacgagctggagggacgacgactacaggcggatggtgatggcgtacctgatcgaggcggtgtacctgctggagctggagcggcaggagcggcgcgacgcggcggcggtggcgcagcagtggtgggagccgttccagttccgcctggcgcacgagctggtggacgaccgcgacggctccgtgttcggcgccgtcttcgagcgcgaccaccaagccagcccgaccccgagcccgagcggcgcgcccagcgccgtcgtcgcgttccgcggggcgctgctgcgcgcccccaccatccgccgcgacgtcgaggaccggctccgcctgctggcccggtacagcctccgcggctccgcgcggctggcgcgcgccgcgcaggcgctcagcgccaccgtcgaccgcttcggctccgagaacgtctgcgtctgcggccactccctgggcgccggcttcgcgcgccaggtcgtccggatgctcgtggcctcctcgccgcgccaccagcagccgcagcagcagcaggccgccgcgtccctcgagtcccacctcttcaacgcgccctacctgtccttggcccatgggcgtcaggggcgtggtcaggacggcggactgcctgctcaaggcgctccgctccggcgtcgccaagtggcgcggcaaggcgctccggaacgtggcctacgccaactgcatcctcggctacaccaggctcgagagcaccaggaagttgtgaaggatcggatgcgcgatgcctccctccacctccaatcctatacgatcgacgctgactcgaacggttcaaccgtcccccgcccgcgaaccaaactgtacctatggaatgcgaatgcgagccccgtgtccgtgtgtgtgatcgattaccttatagtagaaactagaaacaagttagaaattaattcaattctagcaggagacgaataattaagcttccggcgaccggaggatgcaaggctttgcatactttgctttgtacaaatctttaagtgtgaattatgccagctatatagcatagcattgttctccattaaaaaaaaaaaaaaaa

SEQ ID NO: 1689 - DNA, 897 bp, Zea mays
  Clone ID: ZEAMA-23APR03-CLUSTER10955_2
agaatccaccctgccgcctcaccgcctctctcaatctgataccgcagatccgtcgtccggtgagtggaagccgcacgaacccatggcctccggcgagcttgcctgcacctacgccgctctcatcctcagcgacgatggcatcgccatcaccgccgagaagatcgccacgatcgtgaaggcggccaacatcaaggtcgagtcctactggccggagctgttccccaagatcttccccgagcagtacaagagcatcgagaccgtcgagggcgacggcaagtcggccggcaccgtccgcctcctcaagtacaccgaggcggtgccgatgctgacgttcgccaaggagaagcttgagacggcggacgacgagaacaaggtggtgtcgtacagcgtggtggacggcgagctggcggacttctacaagaacttcaagatcacgctgaaggtgactccggccaaggcggagggcgagggcggcgccgtcgtcagctgggccatggagttcgacaaggccaacgaccaggtgcctgacccggacgtcatcaaggagaccgccaccaagacgttccacgacctcgacgactacctcctcaagaactagatggagcgacaactggagatggtccagtacagtacagttccagtccattcatcgacgcgtcacagtctactagtgcacgtcgctggtgtggtgtggtgctggtgcctgctggttccttaatttgcttgctagctagctacgtaccgcggtccgtgtccttgtctctggctgatgtttgctgcctgcggccgtcgtgcatccgacgacgtgtcgttgcgttgcgcactggtcctccgagtcaataaagctctcgtgttcatgcgcccaaaaaaaaaaaaaaaaaaaaaaaaaaacccccc

SEQ ID NO: 1690 - DNA, 1413 bp, Zea mays
  Clone ID: ZEAMA-23APR03-CLUSTER10960_1
gcacgagaccattacctagaacatcctaatcgaaaaactgcgcgtgtgcgccactacaccaaccgtttggtccgccgttcggggattccttccgcactactacatagtagcacccgtgtggccgtgtccgagctacccacgcccccaacgccaagaacgtcgacgggcgcgacggcatggcggcggcggacccggacaccgaggtgcaggcggagttcccacccctcgtccgccagtacaaaagcggccgcgtcgagcggttcttcaacctggccccgctcccggccggcaccgacccggccacgggcgtcgtgtccaaggacgtcgtcgtcgacccggccaccggcctctgggcgcgcctcttcctccccgccggcagccacgggaagaagctccccgtcgtcgtctactaccatggcggcgcctacgtgatcggctcggcggccgacccgatgacgcacggctacctcaacgcgctcgtcgccaaggccggcgtcctcgcggtcgcgctcgagtaccgcctcgcgccggagcacccgctcccggccgcctacgaggactcatgggagggactcaagtgggtggccacccacgcctccgcctccgccgccgcgggaggaggaccggccgccgagccgtggctaaccgagcacggcgacttctcccgcgtgttcctggccggggccagcgcgggggccaccatcgctcacttcgtagcagtccgtgccggtgagcagcacaagagcggcggcctcgggatgcggatcagggggctgctgatagtgcacccctacttcagcggcgcggcggacatcggcgacgaggggacgacggggaaggcgcgcaaggcgcgggccgacgcgttctggcggttcctgtgccctggcacccccgggctcgacgaccctctctccaacccgttctcggaggccgccggcgggagcgcggcgcgcgtcgccgccgagcgcgtgctcgtctgcgtcgccgagaaggacgacctcagggacaggggcgtctggtactacgagagcctcaaggccagcggctaccctggcgaggtggagctgctcgagtccatgggcgagggccacgtcttctactgcatgaacccgcgctgcgacagggcgcgggagatggaggagcgcgtcctcggcttcctgcgcaagtgagcgagcgacggagcgcgcgccttgctacgcgattgagatggaataatttcaccgtttccagatgtggaggcgtttgagcatgaggccatgagggtcttatttgtttgcttaagatcaattgattgaagtttcgaaatcaaaaaaaaaaaaaaaatcatgtgtctaaatttaaaagaaatgaaaacgaacccataccgtcaaaaaaaaaaaaaaaaaaaaaaaaaaaaaaaaaaaaaaaaaaaaa

SEQ ID NO: 1691 - DNA, 1777 bp, Zea mays
  Clone ID: ZEAMA-23APR03-CLUSTER10961_25
atccaccttactccctccagctctcagctctcccctcgccgccgccgggtactcggcgctccatccaggcactccagctctctaccccccttccccccgccgccgggtactcagcgctccatccaggcgtccccgccccgcggccgcctgccactcgttcgggcgctccatccaggcatccagcgtactccctccagctccagtctccggcgcgatgaagatcgcggtggaggggtgcatgcatggggagctggacatagtctatgacacgctgcgaaggctcgaggaggccgagggcgtcaagattgacctcctcctctgctgcggcgatttccaggctgttaggaatgagaacgatttacagtgtgttagcgttccacaaaagtatcgtaccatgaacacattttggaagtactactcaggagaagcagttgctccgtacccaaccatctttattggtggaaaccacgaagcatccaattatctgtgggaattgtactatggaggatgggcagcacctaacatatactttttggggtttgctggtgttgttaagtttggaaacatacgaattggtggattgtcaggaatacataacaaacaccattatcatttaggacactatgagaggcctccatacaataaagatactatacggtctgtgtaccatgtaaggcattatgatgttctcaagctcatgcatttgaaggagccgctagatgtattcttgtcacatgattggcctctgggcattaccgagtatggaaactggcagaagctcattagtgtgaagaagaactttgaagatgaggttaacaatagaacactaggcagcaaacctgcagctgaattactgaacaagctaaaaccaccatactggttttcggcgcaccttcactgtaagtttcctgctgttatccagcatggcaagaatggacctacaacgaagtttcttgcacttgataagtgcattcctgggcgcaattttttgcaggttatagacattccatccaatccaggaccatatgaaatccagtatgatgaagaatggcttgcaataacacgaaaattcaacagtgttttccctttagcacggacacagtttactatgcgggatgagcagctcgacactcaagaagaccggcaatgggtcaggagcaagttgaatactagaggagctaagccttttgattttgttcagactgcaccatctttcaatccttccagtacaacatctaaacagtccataacagtttgctgcaggaatccacaaactgagtcttttcttcagcttctggaactcccatatctgctggactcatctaaatctgagatgtttggtagaaatgagtcaacctctcagacaggaaacacacttgataatgaagatatagagctaccagatgaagatgaggatgctttagaagatgacgagtgaaggacagcacttttagacaagtaccattgcacctatcatgttggttgcagggtttgcgatagatttcattgtcttttgtagattgcaatctagatatctagacgaggaactaacatgtactagattgtattgtcatagctgcttttttgttggagaacgtttgtggatctagagggtgatctgttgatcacaatgccaactctttggtgtttagttcatacagttttttgaactaactacaattaatcagtagactagatgcatccggtggaaagtgttaacaaaaatatcatctactagcaaggtagagatcagctatatatataaaacatatatttg

SEQ ID NO: 1692 - DNA, 2035 bp, Zea mays
  Clone ID: ZEAMA-23APR03-CLUSTER109740_1
aacaaatggtctcggttctcttccttgcatgaacaaactcgactcgggtccggcgctgagccgctgaccgtcgacccgaccttgccctggctcgcctcctgcgctgcggcgggattatgagatggtatttgatgctggaggatccatgcaaaacccaaacgggcaagtccttagcaccccttgagcacccccaggtgcgacgccactccaactgccgggatccagcgcctgcacgccgccgcgacgccgccctgccgggcgtgaaggggggttgagagcgggcgaggcggtgatgcagggcgccacgcggctgacgctgctactgtgcgcggcgtgggcggccgcgctgctgtacggcgagatgggcgcctactgggtctcctacctcgcatgctcgtggccctctgtcgtcctcctcgccgccgaataaccatgtcaaggttgctgttgttgctgacccacagcttatggatagcacctcccttggtcttccatcaagctcagttgctctccaagctgctgagttttacacggatttgaacatgagaaggtccttccagtccaccatactgccattcaaacctgatgtggtcttatttcttggtgatcactttgatggaggcccttacatgcccgatgaagagtggcaggaatcattgtttcgatttaaacatatattcggcctgaatgatcaaagaacaaagcaacagatccctatctactaccttccaggaaatcatgatattggttactcagcatttcattcagtccatcctgaggtgctcagtcggtatgaaaaagaatttggatcaagaaattatcaattttctgctgggaaggtggacttcgttgttgttgatgcccaaacacttgatggagctaaacaaagcaaagaaaggtcctcctcttgggagttcattaaaactctatctccaggtaacacatcaaacccaaaggttctgctaacacatattccactataccgacctgataactctccttgtggcccgcatcgttcttcacctgttataaatcagagggtatcttatgccgccttagaccaaggaatcacctaccaaaattatctaactaaagagacttctgaccttttgctaagcttgttgaagccgatccttgtgctctcaggccatgatcatgaccaatgcacagttgtccactccactccttttgggccagttacagagcataccctggggacaataagttggcagcaaggaaatctctatccatcttttatgctgctatctgctggacccaagttatcacaaaattcaactgatctggaacatgaggttgcaatgaacctttgctttttgcctaaacaaacccatatttatatctggtatatctgccagtttgtagtgaccatccttctcctagtcttttggccaacaaatggtctcggttctcttccttgcatgaacacattcatgagcttcatgaggtcggtgggcgccgaactgctttcaaggaccaaggaaaaagatgacgaggacgatggtgattatgatatggtttttgatgcggaaggatccatgcacctcgttaaaaaggcagtggcaaagaccccaagtgctagctcagactccagacctactggacgcggaagtgttgttgcaagggcaacagcaggaagacaccgattggagcctgattcatcgattcgtgtcgacatgggttctgagatgacatcagaagatgggggaaagttggcccgcgctggcaaatcgggagcaaggaaggtgctccaacggctgttccgtgtcattcagtctgttcttgtcattgccgctctgaatgcccccttgtacatgatgcttctcttcaaggattggattgatcgttgaagtatgtgagaatctattgtttttcagtaactcagtagattgatatatcaatatgaacgactgcacatgcaaaaaataaagttcgtttttgccgaggcatcaaaaaatatatataaaaaaaaaaaaaaaaacaaaaaaaaaagaaaaaaaaaaaaaaaaacaataaa

SEQ ID NO: 1693 - DNA, 1505 bp, Zea mays
  Clone ID: ZEAMA-23APR03-CLUSTER10976_1
aagatatttccggagactctgagagccccctcctggtcatgtcgctgctcgccgtcgcctcctccactcgcgccgcggcagtgcggccgctgtgcgcctcggcggcctcggacgaggcggtgccggcgcctgctgtggcggataccgcagggcggaggccggtgaaggtgatcctaccaaagaagaaaccgcagaagtggtcgacggggatggcaccgggtgagtacggcggcgggccggccaccatcaagccgcgcaagtactggtgggggaaggaggaccgcgaccccgtggggaacaccgacgacttcatctggaacaaggacttcctcccccacatggaacgcgtcatcgccaacggcggcgccgatgcagaacccaccatcacccgccttgcgccggtggatgaggagggggagtccgggtttctgagcatcaaccgcgcaatgagccttgacagcgtggaggttgatctgagccaggagcttcaggcgccgaccaggccaatcttgcaaacccaggttgaggctgcctggagaggacgggcaattggtgctgaggctgtgaatggagccagcgctcctagatggaggctagtccctactcgcagggagcaggcaaagtgggacagagcggccaaggcagccactggtggaagtgatgttatactaagggagtcaaagtcaagagtgcagcaaggagaccctaaggtattggcagctcggtccagagaagactacttacagctgaaacaaagattacagtggttcactttaggcattggtggcgttggtgtaatctctgcttatatttcatacactcctgaaattgctgtcagctttggtgcagggttgattggatcattggtgtatctccgcatgcttggaaccagtatagattccctagcaggtggaactggagaaactgtcaagagtgctgctgcacaaccaaggttgcttattccagtggtacttgtgatgatgtataacagatggaatcagatattagttccggattatggtttcatgcagcttgagttaataccaatgcttgttgggttttttacctataagattgctacattcgctcaagcaatccaggattctatacctccagtcggaaatcgtgaaggttgaaaagtgtcatgttgtatataaacgaaggtggtagccatggtccctggtcagtggtcacccagatagtaaggtatgtatagaagaatctggtctggtgtcatcgccaagtagatgagatgctcgttgaggacgccatttgaaaatctcgagtgcttaactatgttctgcacaaatattttgacgaaaggtgatgttaccacattcattccatattacacgcagatcatcagtgtataaatttacggctccgaacttttaccacaacgattaattgacaaaacaattgtatgattgaattcacatttagcactggatgcaaattatgcagtcaacaaaaaaactcatttaaaaaaaaaaaaaaaagcggcc

SEQ ID NO: 1694 - DNA, 1284 bp, Zea mays
  Clone ID: ZEAMA-23APR03-CLUSTER1097_3
gctcccaccccacctcaccatctccactccaaacaaggggaaggcgagcgacagacaaacccaccccatcgcccctcctctgtctcctctcttgcccacgcccgccccaatgtcgccgcccctcgagccccacgactacatcggcctctccgccgcggccgcggccgcgccgccgaccccgacctcctcctcctcttcctcctcctcgccggccccccgcctcacccttcgcctcggcctgccgggctccgagtcccccgaccgcgaccgggactgctgcgaggacgtcgccgccacgctctccctcggcccgctgccggcggcagccgccgtctccgccaagcgcgccttcccggaccccgcccagcgccccggcgcttccaaggctagcgacgccaagcagcaggcttcccccgccgcgccgccggccgccaaagcgcaggtggttggatggccgcccgtgcgcaactaccggaagaataccctcgccgccgcgaccgcctccaggagcaaggcgccggcggaggaggccgcgtccggagctgggcccatgtacgtaaaggtgagcatggatggcgcgccctacctcaggaaggtggacatcaagatgtactccagctacgaggacctctccctggcgctcgagaagatgttcagctgcttcatcgctggtcaaagtggtctgcataaatcatcgagcaaagacaggctgaccaatggctcaaaggtggatgccctcaaagatcaggagtatgtccttacatatgaggataaggatgcagactggatgcttgtcggtgatcttccctgggattattttacctctatctgccggaagctcaaaatcatgaggggctctgatgctgttggaatagctccacgaaccgtcgagcagacaggtcagaacaaataagctttggcctttgcctgcatccaaggaagacatctgagctagctgggagactatgttgaaggctgaagcctgaaatagttgccgggaatcgtcaaaacccgtcaaatgtttagtgtagttttcacgtgtccttgagacatgtgcatttgtatgtctgtgacgtgatccgttagatcgtgcaatcgtaggttgctgttcttgtgccctttaaaggccagacagatcagggagctctctgcttccttagtgcacttgctttgcagcattccttgttattctactctgaaatcatacatcatgccacaagaaccgatggttcgcgatgtcaaaaaaaaaaaaaaaaaaaaaaaaaaaaaaaaaaaaaaaaacac

SEQ ID NO: 1695 - DNA, 1751 bp, Zea mays
  unsure (1)..(1751): unsure at all n locations
  Clone ID: ZEAMA-23APR03-CLUSTER1103_1
ttttggaggcgcacgtcgctgcctccgcgtagccttccaaccaaaccaacccacgccatcatcttccgtcaatccatccatccgcttgtccctaccacctccaccaaccaaaacccccaaccgccgaggtcaccggcgactccgtcctcgccgcgccgcgccgtgaggatgtcgttccactaccacgaccacgggctgtccatggacgccgcggcggcgcgcggccgccgccgccgtcgtcgccgaaccctagcggcttctcccccggcatcggcggggagagggagaaggcggccatcgcggcgcacccgctgtacgagcgcctcctggaggcgcacgtcgcctgcctacgcgtcgccacccccgtcgaccagctcccccgcatcgacgcgcagatcgccgcgcgccccccgccgctcgccgcggccgccggggccgcggccgcgggaggcccgtccggcggggaggagctcgacctcttcatgacgcactatgtattgctcctttgctcattcaaggaacagctgcagcagcatgtacgtgttcatgcaatggaagcagtgatgggttgctgggagcttgaacaatctttacaaagcctaacaggggcatctccgggtgaaggcactggagcgaccatgtctgatgatgaagacaaccaggtggatagcgaagccaacatgtttgatggaaatgatggatcagatggtatgggctttggccccttaatgctgacagagggtgaacgatccttagttgagcgtgtacggaaggagctaaagaacgagcttaagcagggttacaaagaaaagcttgtcgatatcagggaagagattatgcgcaaacgcagggctgggaaacttcctggagatactgcatctgtactgaaagcttggtggcaagctcattccaagtggccgtacccaactgaagacgacaaggccagactggtgcaggaaacggggttgcagctaaagcagatcaacaactggttcattaaccaacgcaaacggaactggcacagcaacccaacatcctcggctgaaaagaccaagaagaaaaggtgatgatggcccagagcaatcttggcaaaaagctagagatgtccactatactttattatggcgaagtacattctccctcacttcgtaggcaagaggggaaaggtaatcttgggtgacttgagtggccacctaatgcgccaagtttgacgacgttgtggggctggagttggtagtgacctcagcagtatagcacaattcgctaacgttgtgggaatcaagtgttgtagaaccggcgagcgggagggggtaatttatgttgtattgtaattgtgtatttttaccttgtaatgatattttagggagaatcccaagataggcaggcccactgtactctttgcaagaagcgtgagatgtccattataccgtattctggcgaagaacatttcccgtcagttctgaggcgccacgtaatgctctatttggtgcctgggtgggccacgtattgggtaattacctcagcgttgtagcgttgggcttgctagagatgtcaaccgcgtgtcgctggcgaaccggcgggcgggggggcgcgtgtttatgttgtattgtaattactatatatgaaagacggacacaaacgtcgctcctcgtacgtccacgtcgtcacttttttcagcgaaaaaaaaaaaaaaaacatattcgcaaaaaaaaaaaaaaaaaaaaacaacccctntcgctgttaccactgct

SEQ ID NO: 1696 - DNA, 2287 bp, Zea mays
  Clone ID: ZEAMA-23APR03-CLUSTER1107_2
gcacgagaccattacctagaacatcctaatcgaaaagagagttatccaaatactctggtatggcgagatccccctcctcgggttcccactcaactgctgtatcgtagtagtcgactacttccctgcaatccgttggtcagctcacaatagcagatgagtccattggaggagttcgactagtctccaccgctgctgcgagattccgccagattataaaacttctgcccgagcaaagcggccgaccaagttaccacagagcaagtcagcgaggcgaaataggcgaccaagtcccaacaaccgagtaagaaagggagacgaaactgccgaccaagtctctaggcccacaaggttccgcgcataccctgacggcgtgccatgtaccgggtgaagagccagggcgagggcgagatgatgtcgcaggaccagatgcactcgccggtggacaacgatgtcagcagcagccgcaggtcgcctcacaggggcgtcggggcgcccctgaagaaagggccctggacggacgcggaggacgccatcctgatggactacgttaagaagcacggcgtgggcaactggaacgcggtgcggaagaacaccgagctattccgctgcggcaagagctgccgcctcaggtgggcgaaccacctcaggcccaacctcaagaaggaggccttcaccccggaggaggagcgcctcatcatccagctccacgccaagctggggaacaagtggtcgaggatggctattcatttgccagggcgtactgacaacgaaataaaaaactactggaacacacgaaaaaagagatgtgaacgagctagccttcctatctatcctgctggtgtacgtaatcaatcttcaaatgaagaccagcaattgtctggcgatttgaacggtggcgagaacatgtccaatgatcttctatccggaaacagcctttgtctaccagattttaacaatgacagtttccttgcgaaactgcaggctttaccaccacagctgccagctgtttcaataagcaatttgctcggccaaagctttgcatcaaaaggttgtagcttcatggatcaggtagaccaagcagggatgctgaaacaatctggcagtgcgcttcctacattgagcgatgccattgacgatgtgatttcctcggttgatcaattttcaaatgactctgagaagctcatgcagactttaggttttggttatctcaatgaagccaacgctaccagcaagagtattgtgcctttcggggttgcacttactggcagccatgcccctttaaatggtattttctctgcttctaggctcacaaatggtccttcgaagatggagcccccttcagtccaaaatagcaggctcaagtatactgtggatcctgcaatgcagcctactgagttagtagatccttacatgcagtctctatcagcgaccccttcagtgaaatcagagtgtgcatcgccgagaaacagtggtcttttcgaagagctgcttcatgaacctcatgcactaagatctgggaagagccaacaaccatcggtccgaagttcaagttcttctgctggcacaccttatgggactatggttagctcagaatttgatatgggtcaggaatattgggaagaacagcccggttctctcctcagcgaatatgctcacttcagcgggaattatttggctgaatgcgctcctcctgttagcgctgcatcaactgatatctttccgctccccaagatttctcctgcagaaagcccttcaatgggctctggcgagcaggcgttagagcctaaacatgagtcagcagcttcacgtcatcttggaaacttgaggcatgatgcattattctctgggaacacagcccattcatccagtttcaacgataccataacaatgctcatcggcgatgtacctgttcttggtgatggaattgtgctcgattcttcctcatgggacaacatgccacatgcttttcaaatggcggaattcaaatgagttccatataatttctttgtgatgctgaagggcttcttcctgcttgttttggggtcaatatcagggaacgccccactgattgtgacgctgcattcctgacagagatccttgtgatcttcatgcggatagtccttttgtctaattaagtgcatggaagataacctggatattatttttaattttttgctttgtattagagaaccgtttttgtcatccctgacagcatttctgttggaaacgtgtcatgacttttgtttgaacaatttaaatgtcggttatagataatgtgatgtgtgcc

SEQ ID NO: 1697 - DNA, 954 bp, Zea mays
  Clone ID: ZEAMA-23APR03-CLUSTER1109_27
gccccgtcccaaatccccctgtcccgctaggattcccccgaaaccctcccccaaaaccccagagcggagaagagcgcaagatgttcggcttcgggcaccacggccaccacggccagaacccgccggcgcacggcggcgtgcaccagcccaccttcaagatcttctgcaaggccgacgaggggtactgcctcaccgtccgcgacggcaacgtggtgctggcccccgccaacccgcgcgacgagcaccagcactggtacaaggacatgcgcttcagcacccaggtcaaggacgaggagggcaaccctgcgttcgccctcgtcaacaaggccactggggctcgccatcaagcactccctcggccagtcccacccggtgaagctggtgccgttcaacccggagtaccaggacgagtcggtgctgtggacggagagcggcgacgtgggcaagggcttccgctgcatccgcatggtgaacaacatccgcctcaacttcgacgccttccacggcggacaagggccacggcggcgtgcgcgacggcaccaacatcgtgctctggaagtggtgcgagggcgacaaccagcgctggaagatcgtcccctggtaaatgtgctgttctgtggctgcactggtcatcaccatgatctggagctttgaaggcatagccacctgtggtcagcaactgctgccgtgttgctagaataaagttggtggcgatcgatcgatcgatctttggtgatgggtgtccctccctgtgtgtttgtgtttagttccagtcgtttgtgaggaagtcagttatgtttgagtgagaggggtacttcgctcttcggttaactctgtacttgtcatgaggagagttttcatacccggagtgtagaactctgtactgtactcggatccttcctttttcatccaagtgggttttattcagaaaaaaaaaaaaaaaaaaggccccta

SEQ ID NO: 1698 - DNA, 940 bp, Zea mays
  Clone ID: ZEAMA-23APR03-CLUSTER1109_28
ccgctaggattcccccgaaaccctcccccaaaaccccagagcggagaagagcgcaagatgttcggcttcgggcaccacggccaccacggccagaacccgccggcgcacggcggcgtgcaccagcccaccttcaagatcttctgcaaggccgacgaggggtactgcctcaccgtccgcgacggcaacgtggtgctggcccccgccaacccgcgcgacgagcaccagcactggtacaaggacatgcgcttcagcacccaggtcaaggacgaggagggcaaccctgcgttcgccctcgtcaacaaggccactggggctcgccatcaagcactccctcggccagtcccacccggtgaagctggtgccgttcaacccggagtaccaggacgagtcggtgctgtggacggagagcggcgacgtgggcaagggcttccgctgcatccgcatggtgaacaacatccgcctcaacttcgacgccttccacggcggacaagggccacggcggcgtgcacgacggcaccaccgtggtgctgtgggagtgggccaagggcgacaaccagcgctggaagatcgtcccctggtaaatgtgctgttctgtggctgcactggtcatcaccatgatctggagctttgaaggcatagccacctgtggtcagcaactgctgccgtgttgctagaataaagttggtggcgatcgatcgatcgatctttggtgatgggtgtccctccctgtgtgtttgtgtttagttccagtcgtttgtgaggaagtcagttatgtttgagtgagaggggtacttcgctcttcggttaactctgtacttgtcatgaggagagttttcatacccggagtgtagaactctgtactgtactcggatccttcctttttcatccaagtgggttttattttatcaaccgtatctatactcgtggttttgctattacg

SEQ ID NO: 1699 - DNA, 1347 bp, Zea mays
  Clone ID: ZEAMA-23APR03-CLUSTER11188_1
gtctggaagcgcccgcgcggcccgcgaatattttgaactgagccatccacgcaccgccgccttttgagctcgcggcgagggtttgggcggcgggcgcgacatggccgggaagaagaccaccccagcaaagcccgccccttcttccactcagcgcaacggcagcgccgtccccggttccaagagccggcctaagcaggcttcggaggaggccgcggccgccagcgccaaggcgcagtcgccctccaaaccgcgcaaaataaccaaggagaagccggcggccgcgaagaagaagcgcgagaaaacggagccccaagagggtggcaagcgtaggaagcagcaggtgttagccgacgcggcgacgccatcgaagaagaggaagaagggcggcgaaggcccggaacccaaggaagccacgcccgcgaagaagcacaagccagccgggacgcccccgaagaagcagaaggcgcccagcaaacccgcgacgcctgctaagaagcagcagtcacccggcaaagcggagaagctcacgccgaagaagaagcagcagtcacccggcaaagcggagaagcccacgccgaagaagaagcagcagtcacccggcaaagcggagaagcccacgccgaagaagaagcagcagtcacccggcaaagcggagaaagccgcgccgaagaagcagcagcagcagccagccggcaaagcgcggaagcccgcggcggcggcgacctcgcccacgaagaagaagcaagccaagcgcgagaaggccactcccaccaagaggaagcgcggcgacgacgagcaagcaaaggaggccaagagccccaagagagcgcccgcggatggggcggcgcgcgcatctacgcccgtgaagaagaagctgaaggaccagaaggtggctgcggcaaacatgggtgtgtgcagcttctccatggcgcgggtgcggcagctgatgcgggccgaggaccccaccatccgcccttccagtgaggctgtcttcctcatcaataaggcttcagagttcttcttggggaagtttgcagaggatgcttatcacaatgccgcgaaggatcgtaagaaatccattatttacgataatctttcaacagctgtttccagccagaagactttaaagttcctttcagattttgtaccgcagagagttgcagccgaagatgctttgaagacaatgacgagcaacaactcgtaaccgattatgctagactagattgttagtcctctactcctctatttactgtcgtttctgtcttttctatgatttattaccccgagacctgtattagtccatagataagagtggattcaaatgtttcgtgaaaggatttatttaga

SEQ ID NO: 1700 - DNA, 1170 bp, Zea mays
  Clone ID: ZEAMA-23APR03-CLUSTER111_26
aaaaaaaccaacgtgcttgatctccctccgccactccatccatctcctcgctcccagtccccgggaagcatggcgtccgtcaccgcccgcgccccggtagcggcccttcgcccgtcgtcggcatcgctcaagtcgtcgtcggccttccttggccactctagccgcctcggccgcaccgcgtctcccacgaggcgcastaaggcggaggccaagggcgagtggctccccggccttccctccccctcctacctcgacggcagcctggcgggtgacaatggcttcgacccgttgggcctggcggaggaccccgagaacctgcggtggttcgtgcaggcggagctggtgaacggccggtgggccatgcttggcgtggccgggatgctcatcccggaggtgctgaccaaagccgggctgatcaacgcgccgcagtggtacgacgccggcaagtcggagtacttcgcgtcgtcgtccacgctgttcgtggtcgagttcatcctgttccactacgtggagatccggcggtggcaggacatcaagaaccccggcagcgtcaaccaggaccccatcttcaagagctacagcctgccgccgcacgagtgcggctacccgggcagcgtcttcaacccgctcaacttcgcgcccacgctcgaggccaaggagaaggagctcgccaacggtgagtagtgggaggctggcgatgctggcgttcctgggcttcctgatccagcacaacgtcaccggcaaggggcccttcgacaacctgctgcagcacctgtctgacccatggcacaacaccatcatccagaccttctccggttgagtcgaggtcgaggagggatacgatccatcgctggtgagctgatatggactggaaggcaaacattgaaaccctaaattcctttctggatcagttgtgtgtgttaatctatctggagggtacagattcgggccgtgttgcaatgcatgcatggtctgaagggagcgagggctgaggagtgactggtatgtacattagctgaaggggaggttaagggtagagatcgtttgatcagtatcatctgtatatccccatgcatggggtttcgttttgtgcgcttacttctggcttgccaaaaaaaaaaaaaaaaaaaaaaaaaaaaaaaagaaaaaaaaaaaaaaaaaaggccccta

SEQ ID NO: 1701 - DNA, 730 bp, Zea mays
  unsure (1)..(730): unsure at all n locations
  Clone ID: ZEAMA-23APR03-CLUSTER11209_3
gagcgcgccttcacttgtattcacagtttgcaagctagctagctaggacgagctgccagcggcgccagctagccatggcgatccgtggcgtggcctccacccgcgaggaggacatgacgctggaggagttcaaggagtggctgaagcagttcgacgccgacggcgacggcaggatcagccggaacgatctccggagggcgctccgccgccgccgccgcggccgccgctggttaaccgctagtaggagcgaccgcgcccttcgccacgcggacaaggacagcagtggcttcctggacgactccgagattgagaacctcatcgccttcgcccagaaggatctcggcatgaagatatccacctggtagaagtagaagtgtcttctcttttttctcttaataaagcttggacgtgacaattctcttgccgcgtctttaaaaaaaatatacgagtgggtttgggactttgggtgtatgcgtgtggtgtgtgaccgtgtgagctagttacccgtgcacagctacttgtactcgagcattgagacgataaaaaaaagctatatgatgtacgaactacgaagtgaacgaaggcacagcagtgtcgtccttgtatacttgtactgtaccaacttaaataagtttatgtggctgttgcccttgggccttggccaccctgcgttgggtgtatgcctgtgtaccaagaactanaaaaagaaaaaaaaaaaaaaaaagcggcc

SEQ ID NO: 1702 - DNA, 1459 bp, Zea mays
  unsure (1)..(1459): unsure at all n locations
  Clone ID: ZEAMA-23APR03-CLUSTER11220_2
aaacccagatagacctcgcccttggctcccatggcttccggcttcttctcctcgccgttgcgtgagaccgcgctaaaaccctaggctttgacaccccaatggcgtccgcgacggcgacggcgcccgcattcgctctcgcgtcgtccctctcgcgccgcggtttcctcccgctctctcgtcgcgccggccggcccgtgccccagtcgctgcggttcgtagcgtcagccgtgaggcggcgccgcagcgcggtcgtggtggcagcggacgcggcggcagcggccgggagcgcggagttcggcgacgaggagaacccttatgagcttctgggcatcaggccgcttgatagcttcgaccacatgaagatggcctacaagaagaagcgcaaggacgccgaggagactggagacgatgagttccttgccaagttggatagggcccacgacactgtcatgatgcagcagctgcagtatcggaagaagggagtcacatacgggtctgttcaggtgtccaaggatatcaagtatgctgacaatcaaccaatagtgctttggggaccaagattctccagatcaacagtgaaggacatgcataaatatggcaatatcagcagcatttgttgtttggatagctattatgggcaatgcagactggaagcctttgcagttcctatgttttgctttcttctgcagaatactacagaagctaagagctactgaaccactaataactccaatatacaatgaatatggcgaggttgaaggacgaggaataagaatggcaaaaagagtagtccgtgctctgggtttgatttttggatgtgtgttcactgcatccctggcttatacagcagctagtaacatggttgagctttcattgcagtatactccccgtatgttttactactatcaggagctgattgttactgcggctgcctccgttcttctgtacatcacggcttcatgctaccgataaacacgagaagcaattattgcctggcttagatgattgcgagatgttaggacatgccttgagtttcagatggagaccaacttgttacttgtggtgccttccgcatctaagggatagccaagaatccgcaaattctgtagcattcttccagctttgaggcaggtagttcttagtggaggatcatgtgaccagctatggattcagtagcacaatgaagatggccaatggatgaaaattgtttcgcgagaatatttgaacagcggtgttgtccatgcaatttttaattagatcttggacatatgcttagacgacatacttaactgtgatgtgcatgtgctttttttgcctgaatgagtgctgagcttcttctgtgtcaagctgcctctccggagctcccatttgtcggacacccaaggctgctcccatttgaatccggggttgggggaagccggggttncccccacagaggacaaggggggggggggggggg

SEQ ID NO: 1703 - DNA, 715 bp, Zea mays
  Clone ID: ZEAMA-23APR03-CLUSTER11327_4
accagccggtgttggtttcagcttgtattcccactctgtcgcacagcgtcgcccgtcgccgctgagatcctaggaagaaatggagctctctcgcaagctcttcacggccgtcctcctcgtcatgctgctgctgctgtccgcaggtacgttggtgcggccggctagccgtcttacatgtcttctgtgctgtggactcatcagccgctggcggccggcggcagcctactgatgatgatctgtctgagatgctgctgcgtgctgctgcagaggtcgggccggtggcggtggcggaggcgcgcacgtgccactctcagagccacaggttccggggcccctgcctctgccggtgcaaatgtgccaacgtgtgcagggccgaggggttctccggcggcaggtgccgcggcttccgccgccgctgtttttgcaccacgcactgccactgattcgctctcccaccgcccgcctggcgtctccgtcgatcgcgtcgcgaccactccatggctccacgcatgaatatcaagggtgtgcgcggtttgtgttgtgataccaaattgtatcctcgtcgtgtgttgagcagcggcgtgctgttgtacgtacgtctgcctctgttccacgtttcgggattttccatagcaaatacacgcgtcgatagagatctactccgaaagaaattatgcgaagtctatcgaatcccacgcgtccgcccacgcgtccg

SEQ ID NO: 1704 - DNA, 1206 bp, Zea mays
  Clone ID: ZEAMA-23APR03-CLUSTER11327_5
accggccggtgttggtttaagcttgtattcccacactctgtcgcagcgtcgcccgtcgccgctgagatcctagctaggaagaaatggagctctctcgcaagctcttcacggccgtcctcctcgtcatgctgctgctgctgtccgcaggtacgttggtgcggccggctggccgtcttccatgtcttctgtgctgtggactcgtcttctcgccggcggcagcatactgaattactgatgatgatctgtctgagatgctgctgcgtgctgcagaggtcgggccggtggcggtggcggaggcgcggacgtgccagtcgcagagccacaggttccggggcccctgcctccgccggtccaactgcgccaacgtctgcaggaccgaggggttccccggcggcaggtgccgcggcttccgccgccgctgcttctgcaccacgcactgccactgattcgctcgcccagcggccggctggcgtcgccgtcgatcgcgcgcgtcgcgaccagtccatggctccatgcatgaataacaagggtgtgcggtttgtgatgcccaattgtatcctctcgtcgtgtgttgaagcgttcgatcgtcggtctagtagtgtgcctgtgagcagcggcgtgctgttgtacgtacgtctgcctctgttgttccatgtttcgcgattttccatagcaaatgcatgcgtcgagatctacatctaaaatttttttaaaaaaaaaaaaaaccagcggccggctggcgtcgccgtcgatcgcgtcgcgaccagtccatggctccatgcatgaataacaagggtgtgcgcggtttgtgatgccaaattgtatcctcgtcgtgtgttgaagcgttcgatcgtcggtctattagtgtgcctgtgagcagcggcgtgctgttgtacgtacgtctgcctctgttccatgtttcgggattttccatagcaaatgcatgcgtcgagatctacatctaataaataaaaaaaaaaaaaaaacccatcggccggctggcgtcgccgtcgatcgcgtcgcgaccagcccatggctccatgcatgaataacaagggtgtgcgcggtttgtgatgccaaattgtatcctcgtcgtgtgttgaagcgttcgatcgtcggtctagtagtgtgcctgtgaacagcggcgtgctgttgtacgtacgtctgcctctgttcatgtttggggattttccatacaaaagcctg

SEQ ID NO: 1705 - DNA, 1336 bp, Zea mays
  Clone ID: ZEAMA-23APR03-CLUSTER1132_3
ctttcagctaagtccctgctccctctctttttcttacattcaggtcctcgcagctcctctcttttttcttgtttctttctttcgatctgcgagccgtccaggtccagtactctcctttccgtgaaggaactcttgcagccggcccctctggtttcctcgaattcttgttccccggtccctcctcctgtccccgcgtagatccgtccgtccgaggagcacaccgtccccacccccatgtttacccaccagttcctctgacggccgccgtgctccgatgaagctgagcgtgctccgtatccgccgctcccactccttctccgtcgccttcctctactggttctacgtcttctcatgaacgcatcgcccctctccacctgctgatccttcgccatctctccatctctctttctctctgagatagtctttcgaatccatctctagggctcttgtttctccccatcctccccccaccccaccccccaccaaacacaagtccccttgttcaatccgacaagacaagcatccatgtcgtcgtcacgccggagctcgagccccgacagcaacgacacgacggacgagcgcaagcggaagcggatgctgtccaacagggagtcggcgcggcggtcgcgcgcgcggaagcagcagcggctggaggagctggtggcggaggtggcccgcctgcaggcggagaacgcggcgacgcaggcccgcaccgcggcgctggagcgcgacctgggcagggtggacggcgacaacgcggtcgtgcgcgcccgccacgccgagctggccggccgcctgcagtcgctgggcggcgtcctcgaggtgctccagatggccggcgccgccgtcgacatcccggagatggtcaccgacgaccccatgctccgcccctggcagccgtccttccccccgatgcagcccatcgggttctgagaatctgagcctcagccggcgggagagagccaatttctgtcgtcgtgccgctgtctatctcgtattggtatatctattcataaatcatccttgtcatggtttgctcttcttgtcagtgttataaatttgcttcttgttagtgttataaatttggccatcggaaaggatgtgtttgtagttgtaatatcttgtttggagttgtaatatcttatcttgcttatgaaatcgaatatgcctatatataaaaaaaaaaaaaaaaaaaaaaaaaaaaaaaaacaaaaaaaaaaaaaaaagtgagacttctgtctgttatggtgaggcgatgaatccgatttgtgagcacacatgaatacctttcgagattcggcaatctttagcaagctccgcttctagacccgcggcc

SEQ ID NO: 1706 - DNA, 1144 bp, Zea mays
  unsure (1)..(1144): unsure at all n locations
  Clone ID: ZEAMA-23APR03-CLUSTER1132_4
ttcggtatcgtttaagggggcgtggaaggggggcgcagggatattagtataccggcagagtcgttgataccggcacaaccacccgtaaatagatggagatggcgagggggatcggcggtgaggaaaccttacggtacgaagggtagcgcatcgcggagcagccgcggagccagcgtggacacgggagcacagggagaggacgcggagcacataagaaccacgagcgaacaggggggccgggggcgacggccagccaaagcgcggcgccgggcaagcccgcggggggacaccaccccgaccgccnnaaagaaaaaaaatcctccccccaaccccaccccccaccaaacagattcaatccgacaagacaagcatccatgtcgtcgtcacgccggagctcgagccccgacagcaacgacacgacggacgagcgcaagcggaagcggatgctgtccaacagggagtcggcgcggcggtcgcgcgcgcggaagcagcagcggctggaggagctggtggcggaggtggcccgcctgcaggcggagaacgcggcgacgcaggcccgcaaagcggcgctggagcgcgacctgggcagggtggacggcgacaacgcggtgctgcgcgcccgccacgccgagctggccggccgcctgcagtcgctgggcggcgtcctcgaggtgctccagatggccggcgccgccgtcgacatcccggagatggtcaccgacgaccccatgctccgcccctggcagccgtccttccccccgatgcagcccatcgggttctgagaatctgagcctcagccggcgggagagagccaatttctgtcgtcgtgccgctgtctatctcgtattggtatatctattcataaatcatccttgtcatggtttgctcttcttgtcagtgttataaatttgcttcttgttagtgttataaatttggccatcggaaagggtgtgtttgtagttgtaatatcttgtttggagttgtaatatcttatcttgcttatgaaatcgaatatgcctatatatatatgttatgctgtacgagtatgtggctccaaatttgtgagccttctgtctgttatggtgaggcgatgaatccaatttgtgagcacacatgaaccaaaaaaaaaaaaaaaaaagcggcc

SEQ ID NO: 1707 - DNA, 885 bp, Zea mays
  Clone ID: ZEAMA-23APR03-CLUSTER1132_5
ttccccatctccggataaaagataaggagtgtctctctctctcttagatagtcttttgaatccatctctagggctcttgtttctccccaccccaccccacaccaaacacaagtccccttgttcaatccgacaagacaagcatccatgtcgtcgtcacgccggtgctcgagccccgacagcaacgacacgacggacgagcgcaagcgcaagcggatgctgtccaacagggagtcggcgcggcggtcgcgcgcgcggaagcagcagcggctggaggagctggtggcggaggtggcccgcctgcaggcggagaacgcggcgacgcaggcccgcaccgcggcgctggagcgcgacctgggcagggtggacggcgacaacgcggtgctgcgcgcccgccacgccgagctggccggccgcctgcagtcgctgggcggcgtcctcgaggtgctccagatggccggcgccgccgtcgacatcccggagatggtcaccgacgaccccatgctccgcccctggcagccgtccttccccccgatgcagcccatcgggttctgagaatctgagcctcagccggcgggagagagccaatttctgtcgtcgtgccgctgtctatctcgtattggtatatctattcataaatcatcgttgtcatggtttgctcttcttgtcagtgttataaatttgcttcttgttagtgttataaatttggccatcggaaaggatgtgtttgtagttgtaatatcttgtttggagttgtaatatcttatcttgcttatgaattcgaatatgcctatatataaaaaaaaaaaaaaaaaaaattggtctccttaaaaatggtaataacagggaatcttggtcacgaacaaaaaaaaaaaaaaaaaagcggcc

SEQ ID NO: 1708 - DNA, 1298 bp, Zea mays
  Clone ID: ZEAMA-23APR03-CLUSTER11372_1
aagtcgcctccgcgcctccgcatataggcagcgtcgcccctctccgctttcccgaattagcgccaccgccacctccgcctccgatcccgcctctcccgggaacgaagccgagccgcccgaatcgccctccacccatccacccacccatatagccgggccccggaccgctctccaccggctcgcgcccccgacccctccgccgtccgccgccgcatcgcgtgggagggggaggaggaggaggaggaggaggccatggccgctgccgtagcttgcaggcgcgcggcgctcctgcacgggcaccagcagtggccgcagcggtgggcggccgcgccctgcccccgctccatctcgcagctcgtcaagaccaacggccgccgcgccttcctcgtagacaccctcgccctggtcaggaagctggagtcgcagggcgtgcccaccaagcaggcggaggcgatcacctccgccatcacggaggtcctcaacgacagcctcgagagcatctccgagtccttcgtctccaaggccgagatgcagaagagtgagatgctgcaggagtccaatatctccaagttcaagtcccaagtgcagagctcgcaggaaaaccatttctctttactacagcgggagactgagaaacttcgcggagatattgataagatgaggagtgaactgaagtatgagatcgacaaggtcaccgcaggacagcgattggatctgaatcttgaaagagggcgcatacgtgatgagcttgccaagcagaatgaggaaaccactgagcttaccacaaagcttgacaaggaaatccactcactgaaggcccagttggaggcagcaaagtacgatgtcatcaagtactgcataggtaccattgtttcgatctcagccgtcggcctcgccgtcctccgcatcgtgatgtgaaggcagcaaagcaaatacgttctttggttttacccatattcgtcgcccgtccgtggaaacccgcaagaagagaataggttctaattctgttcctagtttttaaaggggacaaaacgtgctcaggggagggggacacttggtagtagggagatgttgctcaaacttgtaaaaatagattgcccgtggaagaaatgcatccgaaatgattctttacctgtgctgaagcgtgcctggtctccagagctgctgaagccactgttactgtgggggatcctgaactgtgttagcctcgtcctgtgttggagccagcaatttgggctctgccatctggccgttatcagttctgcccactcgtttgaaaaaaaaaaaaaaaaaaaaaa

SEQ ID NO: 1709 - DNA, 1638 bp, Zea mays
  Clone ID: ZEAMA-23APR03-CLUSTER113771_1
gcacgagaccattacctagaacatcctaatcaaaaacgacctcgagagatatctgagcttgctccactcatagccatcacacactagtcacaagtacaccaactagccagtgggctacacgagctgagcttgctccgctagcagctcaatctcacaaagcctcagagccaccaccaccagtgtgttctagccagctagctctagctccgctctctgatctcaaagcttgataacgaacgggcaaacaagagctcagaggtgggagctagctagctagagagagagagaggacgacggagagggaaaaaaaaccagctagcgagcgcgcgtgcgtggcgatgatgcatgtcatgtgttaacatgtacaatccagagcagcaccaggccgcgccgcccttcatggcgccgcgcatgtccttctccagcgacttcgccgtggagccgccgcccccggcggccgcgcgcgggggcgcggcggggccgggggacgccgacttcgagttctccgtcggcagccacccgatgatggccgccgaccagctcttctccaagggccggctcctgccgctgagggaggcgccgcagcaggcaggcggcggcgcgcggcccgtgacgctgcgcgaggagctgcgcgccgacgagcgccacggccgcgtgccccgcgcgccgaacatccggtggaaggagctgctcgggctgaagaaggcgcccaagaagcaggccgccgccgacgccgccgccggcacgtccgccgacgcccatatggatctcggagggcagcagggaagcacgagagactgaaaagccgcaggatatatatcagattcagctgtgacttgtgagcgggtgaaatatattgcattgttaggcgtggccatcgaagtgtatctttcagcgcgctctggctgtttggcatcgagctagctgatctgtacctctcgatgtcgatcatcatgtcattggcttagcctacgggagatgaggaaaccacacacatacgaagacgcgcgcgcgtacgtacgtctatggcggtggctcacaccaccaatgcgcatttcctctttacctctttattgccggccgcagcttgtttcctctctttaatttatcctgggtgtataagggaatttgaccatttgtttcacgtacggcagtaattcgttcgtgtcgagtagctagatgtatcatgtatccaaccatgcatggataatgatggatgtttcatgctttgcattattgtaatggtcgtcgcgtgtagtgtagcagtagtagtgaaattaactctccgcttgctgtgtgccgtgcctatctactagtatatctctggtgttttgaaaggggccgggccgggccggttgaatgcagtgctttctccccctttcacatggcgtggtccctgctggtgtacgtgttgtttagctgttcccatgcttgtctgcttttggcacagccgccctggcctcatcaggtcatgcattatattggtggctaatcatgagtagtagtatctagcttttgagtcgtccaatggagattatgtatgcatgtcctgaatttcgcaggaaatatgatgtttttaattttaaaaaaaatctgcaaaactactattacatggctcaaacaaaaaaaaaaaaaaaa

SEQ ID NO: 1710 - DNA, 2057 bp, Zea mays
  Clone ID: ZEAMA-23APR03-CLUSTER11381_2
atcatttcaccagaagctgcaaattgcaagctctcctccctaggtagcctctccagcagcccaaccacacagcctgcagctcgcgttggcacagcgccgcctgaacgcgtgctaatttaagctctgtatctcgtcgcggccgccgggctttcgccgacgacgtcaaaatggccggtggtagcagtgccgagcagcttctctccaggatcgcctccggcgatggccacggcgagaactcgtcctacttcgacgggtggaaggcctacgacatggaccctttcgacctgcgccacaaccgcgacggcgtcatccagatgggcctcgccgagaaccaactgtccctggacctgatcgagcaatggagcacggagcacccggaggcgtccatctgcacggcgcagggcgcgtcgcagttcaggaggatagccaacttccaggactaccacggcctgccggagttcagagaggcgatggccaagttcatgggccaggtgagggccgggaaggtgacgttcgaccccgaccgcgtcgtcatgtgcggaggcgccaccggcgcgcaggacactctcgccttctgcctcgctgacccgggcgacgcctacctcgtcccgacgccatactacccagctttcgaccgtgactgttgctggaggtcaggcgtgaagctgctgcccatcgaatgccacagctcaaacaacttcaccctcacacgggaggcgctcgtgtcggcctacgacggcgcgcggaggcagggcgtccgcgtcaagggcgtcctcatcaccaacccctccaacccgctgggcaccaccatggaccgcgccacgctggcgatgctcgccaggttcgccacggagcaccgtgtccacctcatctgcgacgagatctacgcgggctccgtcttcgccaagccggacttcgtgagcatcgccgaggtcatcgagcgcgacgtcccgggctgcaacagggacctcatccacatcgcgtacagcctctccaaggacttcggcctcccgggcttccgcgtcggcatcgtctactcgtacaacgacgacgtcgtggcctgcgcgcgcaagatgtccagcttcggcctcgtctcctcgcagacgcagcacttcctggcgaagatgctgtcggacgcggagttcatggcccgcttcctcgcggagagcgcgcggcggctggcggcgcgccacgaccgcttcgtcgcgggactccgcgaggtcggcatcgcgtgcctgcccggcaacgcggggctcttctcgtggatggacctgcggggcatgctccgggacaagacgcacgacgcggagctggagctgtggcgggtcatcgtacacaaggtgaagctcaacgtgtcgcccggcacgtcgttccactgcaacgagcccggctggttccgcgtctgccacgctaacatggacgacgagaccatggaggtcgcgctcgacaggatccgccgcttcgtgcgccagcaccagcacaaggccaaggccgagcgctgggcggcacgcggcccatgcgcctcagcttgccgcgccggggaggcgccaccgcttcgcacctccccatctccagccccttggcgttgctgtcgccgcagtccccgatggttcacgccagctagtcaccgagcatccggcaacactggctgtagggtgtgcccgtacatccgtacgcacaccttttttttcccattcacgtgactgcaatcaagtctatgggatggttgacaaaagactatctagacaagagtgggcgtagtacgtaactagtttgacgttgtacaggcgtcagcaggtatcggtaagcagctagtcaaaagcacgcaagcaggacgcatttgtcctcgatactttcgtgtaaatctctctctattttttttttcgaaattcgcgtgtatggtttggtttgacgttggtataacgtatggtagaataacgatcggaaatggcaatttagtcctcccgatcaattgttattgtaaaccactgacgaaagttaagtacagaagctgtaccagaagggtgaataaaaataccagcttaccattcataatt

SEQ ID NO: 1711 - DNA, 1760 bp, Zea mays
  Clone ID: ZEAMA-23APR03-CLUSTER113839_1
aaaacaacaaatcgtccactagtcactggtaactggtcactcactgctcaccactcaccagtccgtccggcgtccacaccacacccccgccccgcgtctccggcttgccaacagacagagcgcctgcacggctgcactgcaccgcgcgctactgcagcctcgtctcgtcaggccacgcccgctcggggatggcgaccgtcccaaaccccaagacgaccagggccaggagggagccggcgctgcgtccccgaagcaacaacgtcgcggcggctccggctccggctccggccgtggcgagcgtcaggcgcgggccggcggcatccgccgagaaggagaaccagccgcccaagagcctcggccacgggaaggcggcggctgcggcgacggccgccgagccgccgaagcccgcggagccggcgccggttgtagcgccacctccgccgccgctgaggccgtcgtcgctgcagctccgcatgaaggacgaggcggcggcggcggcgctgcccgcgttcgtcgtcgggcccaggggcagggagctgctcccgccgccgtcctccaactacgaggcgtgggacctctccgacagcgagtccgcgccggcctcctcctgggccacgctccccaacagggcgctgctgtgccggcctctgcctcaggacgtcggacggtgcacgtgcgtcatcgccagggaggcggccaccggcgccagaggcgtcgcgctctactccctctataccaatgaggggcaggggcggcaggaccgcaagctggcggtggcgcggcaccggaggaggaggggcaggtccgagttcgtcgtggcgcagaaccaggacggcatcttctgcaccgccgacaccagcttcctcggcgcggtgcgcgccaacctggtcggatccaagtaccgaatctggggccagggtgacgagctcaagaaccagtcgaagcggctccttgccgttgtcgcgtttgcccccaccatcaccacgctcaccgggagtttcaggagcttgagggcatggatccccaagaaccagtccatgcagctcaaggcaaacagttctgctcagatccagcatgtcagtgggctcccaaaggattggcaggagaagaagagcagagctgaccagttgtgctcaagagccccgttctacaaccatatgacaaagcgctacgaactggacttcagagaaagggcaggaaggatggggtacaaggtgcaaacatcggtcaagaattttcagatgactttggaggaaaatgggaggcagacggtgttgcagcttggtagggttggcaaatccaagtacataatggactttagatacccgctgaccggctaccaagcgttctgcatctgcctggcatcgatcgacgcgaagttgtgctgcaccctgtgaaatagggagccgttcgaggaagaagtgtttgtttgttatgctgcactctgtacttgcagcttctccccttgagaaggcaattgaataatagaccatgctataatgtgcgattatccttttgcaacttctgttgcttaatcggtcaagcagtatttaccatacttgaggacagcgtgtcgcaaacacatcgtcagtttgtaatcccccttttacactgacgaaagcaccgatgggaaggcacacctgtagcatttctatactgaatgtaaggcaacatgtaacattgcacagataaaccaattcaaatgactgtcagctccaaaaaaaaaaaaaaaaaaaaaaaaaacaaaaaaaaaaaaaaaa

SEQ ID NO: 1712 - DNA, 964 bp, Zea mays
  Clone ID: ZEAMA-23APR03-CLUSTER114052_1
tttttttttttttttttttttacgtccagagcacgcccaacaaaacctaatccccgtggtgatacggatcgttttttttttttttttgcacactagaggaccttcggcaatagcagtcagtggagcgaagcgcagcagcctcccccaagttagctgaaccagctaagcgcatatacaggtctagcagaatcaaggttcgggcgccaaacgataagtcgcagtatctagcggctgctcacagccaaaacacgatcagttttagaactgacacagcctagccaccgctcccccgcggtagtcaatatggcgtcaaggcagcaagcctgcgcggaggagtcctagatcttgggcgtgatggccttgcactcttgaaattctgtataggacctctgctgaatgcccagtcaacattgatagtttttgtgaacagctgactcccgttcattgctctgatcgctgcttgtgcttcctcaaagttttcgtattcaatcagcgcgtatcccttggcatatccagtgcggcgttctagattgagatgcaagtccttgacatgaccaaaatcactgaaagcattgtaaagatcatcttcttcagcatcgtctttaactccagaaacaagaattgcccagccttcgatagagcgctgcggtagtgggatgggaccatggtctccgttgttagtggtgaagtcgaagcggtagcggctggaggtgagaacggaggggctgcgaccaacgaagcgcccgcgggtgcgcaccacggcgggggagacgatgcggggcacggggagcgcacgggcggcgcggccgtcctcctccatggcgtcctcgtcgtccaggtcgtagtcagcaaactccacgtcaccctcctcctccgccgctcgtcccatcgccgccaccgtcacagagagcgagaacgggaagactggtaacgtgagagactgagggtccaagtggcggtttaa

SEQ ID NO: 1713 - DNA, 1298 bp, Zea mays
  Clone ID: ZEAMA-23APR03-CLUSTER114219_1
ttttttttttttttttcatgactagatcgatgcccagccaacatccagctcgaaattatgtccatataagacaaggggcagcagcatcatacacataacaaccttgctctctaggttacataacaataataaattaacgaaataagaaactggaacctaagtaaggagaacgagaggacacacacacacacacacacacagagagagagagagagagagagagagagagagagagatttgcggtagacatttcgagattcctccggcaaccgggatacacagaggggcttcagaagacagaaccctagtgggggtgaagacgtgaagtcagaatggagaaaagcccatgctggcgtagagaccgtccatgaaaagcatgcactcagctccctcattcttggcagccgcgctgaaagcttccctgtgagtgatgtccggattgctggccttgatgcgctggatttcatctttgatgaaacggttgtacgcggaaggaactctctgccgcttctctgaagttctgttcaccgacgctgcggtcctgggcagctgctgcgcctcctgcagtgcatgtttggccggtggcggcgccatggacgacatggccgacgacgtggtggtgttgccaccgcacgtgttgttgatgctcgtgacgccgctcacgcaagcgctcggcggttcagcacccggcaggctcggcgcctggaacgacatcgcctcagcgtcaagtagaccgtgcggggaggtgggggagaggagaggctggccgaagggtggtagctggttattattggcggccgccgccggcagcaggagggcgcggaggttgacgtagagcaggttggagcagtggccgcaccgcacggtgactgtctggaacaagctgctgcacggcacgcccaccgcgaggatggtgtcgcagtagctgcagtgcacgtagcaaatctgctcctgctccgccggcggaggctgctgctggtccaggttgaacaacgtctcctccggcgccgacgacatcatggcgccaaaagaagcaagagccgcggatgggcgtgcttcttctgttgtgtgcagctcgaagcaatgcaatccggtctttgttggagttggaggagggggggcgatggagcgtgaagcagcagcgtcgggcaggaagctaagggcttgggcggcgagtggatgggtgtgcaagggaaggggagggagtacgttggagagagtgaagcagcgttgggcagggacgaaggccggcttgggcgagtggatgtggatgggttgggtgtgcaggggagtgtggg

SEQ ID NO: 1714 - DNA, 1329 bp, Zea mays
  Clone ID: ZEAMA-23APR03-CLUSTER114219_2
cagccgaatatccagctcgaattatgtccatataaagataagaggccgcacatcgtcatacacataacaacctctctagaggttgcataataacaaattaacaaagtaagaagctggaaactgaggagaactattagagatatatgggtactgagagacatttcgagattctccggctgggatagacattgaagctatctctcactcaagcaaccgggagataacgagggaactgagacatcagaaccctaagcggctaggcgcgcacagagaggcagaacgctatagaccattccgcggtggagctgaagtcatcagaatggagagatgcccatgctggacgccgctgtggcggcggcggcggcggcgtatagaccgtccttgaaaagcatgcattcagctccctcctgagtttgcatggggtgcttcttcagaccctgatcgggcatgaggccgaaatggatgtgtgggaaatgggcccaattcttggcagccgcgctgaaagcttccctgtgagtgatgtcgggattgctggccttaatgcgctggatctcatctttgatgaaacggttgtatgcggaaggaactctctgccgcttctctgaagtcttgttcgctgacgctgcgctcctgggcagctgcggcggctcgtgcagtgcaggtttggccggtggcggcgccatggccgacgcggcgttgttgccaccgcaggcggtgttgttgatgctcgtgatgccgctcacgcaggcggcgctcggcggttcagcgctcggcaggctcggcgcttggaacgacgacgacgacatcgtctcagcatcgagtagaccgtgcggtgaggtcggggagaggagagcctggccgaagggcggtagatggttggcggccgcgggcgccgtcgccggcggcagcaggagggcgcggaggttgacgtagagcaggttggcgcagtggccgcaccgcacggtgaccgtctggaacaggctgctgcacggcacgcccaccgcgaggatggtgtcgcagtagctgcagtgcacgtagcagatctgctcctgctccgctggcggcggcggcggcggctgctggtcctgcaggctgaacgtctccggcaccggcgacgtcatggcgccagaagaagcaaaggaccgcggacgatggtgctgcttcgtcgtctcctgtgcaggtggagaggatgatgctatctatcgctggagagagtgaagcagcgttgggcagggacgaaggccggcttgggcgagtggatgtggatgggttgggtgtgcaggggagtgtgggttttcgattaggatgttctaggtaatggtctcgtgc

SEQ ID NO: 1715 - DNA, 1977 bp, Zea mays
  Clone ID: ZEAMA-23APR03-CLUSTER11424_2
gaagcaaactgaaaacagcacccgctcatgcgttcgcgctgcacacctgtttgctgtttttcttctcccgttcacctcgcgtgcgcgacaactagggcgaccgccgacgctctacgtccagctgcccatgtcttcgtcgggctctttgccggcgacaggaacccacaacaccaggtcaacaccatttcatgtaattcatattttgggaaacttcatgaggatttggtctgtttactccttgtatagctccttatccaacagtggagattcaatagttggctttatcttcagttgtcttgtacccagttcaatcatattcttggtcttacagaaaccttggagaggccggcctttgcccaactcacaggttgttcctacagttgtcaatggaggaatcatggcattctactttgtcttatgggtgctctactggcagagtatgcaggtgctgttcttggagttctctctgctgctttatatggaaggaaagttaacatctggaaaaagattggtggacttgctgctatgttagtagcatattatctattgtcaattggatggtctacaagaacacattctcctttatatagctttggaagtgaaccaattgagaaggcaagacaaacatttggagtgaaagaaatggtggtgccaattaccgctgggatcttatctgctctgaggagagtattagctcggcgtgtctctctcaagaatcaacttaaaaggcggctccatgctataactattgcttctgctacttgttttctttttccgtttgccatgtgggatacaatcctaggctcagcgtccgacagcatagttaaatttcagctaccaaattgggcatacttgagtactgttttgttcggaatggtgcttatattctatgtcgacaatgttactgaagaaaagttgcatctggtcttctcttctccaaggcacttaatggtttcaacagggtgcatcatcgtgttggagatagtgtaccaaatggatttctccctttttggatttctggtctgttctgttattttgggattaggtatttttgaaacaacctccttggaacgctcaaagaaaagccctttggagacccatgaactatcgaatggggtgttccacaatcaattgccaattacagaacttccaagctgaagaatatatgacctgggtgagtgagatgcattgaaaaaaatttgtgtttgcttaagtatgatttttgaatgatttatctgttaggtcgagattgtggtgcaagttaatattagatagcatgtttcaatggtggactgttacggtttgagcattagtatcgattgcggaagaatttcttcctgacatgtttatatagcccctcaaccaatagacgttaagccccttttccctattcttgtaccccagctgccacatggtgaatggccgcggttgcacacctcaaaatcagtggctcgattctttgtgcgaaggtttagaaccacagacagaaagcacggatatttttgacctgcaaatttgtctttgtgatcttccattcttgttggccacctgcatcctgtacatgccaactactcccagccccagtagatgtgtatcggtatcccccttggagatattgcaattgtcacagcatcctgtctcccgacttgggtagttgcgaaattttgcttttctcgcttggagacgcagatggttaaaaggcggctgttttgactgctgtagctgtggtgcaatccacaggaataaaatattgtagaagtagtagaagccggtatggattaaagttgtgaccgaagtgcattgatacatgtaagtatgtgacccgtccatgatatgattaacatgccgactttatctttgacctgtccgtgactgcaatcagcgagtctcctgcatgctcgacagaatgcacatgtaggcataccattatgggaaatggtttgaaccccttgattaataataaggtgtttgatttaa

SEQ ID NO: 1716 - DNA, 1823 bp, Zea mays
  Clone ID: ZEAMA-23APR03-CLUSTER11439_3
gcacgagaccattacctagaacatcctaatcgaaaatatagctagtctcttggagttgctcttatattgtctgtttagattgtgcaagattttgattggatttagtgtaaggagtttgttgatgctgcttaacatttgacagcaatattatgattgtaacttatataaatcaactaaggtttggaactgctatgccaggtctttgtcaattatgaatagaataacattaattgctttctttttgggcaaacattttttctataaaaattaatccctctctgtttagtttactcggtgccattttgattttgaaggtggactgcagggataaactcaaagaggaagaaactgaagagtgctgtcatggtcactatacatatggggatttgggtgacaggtgcttcgggactataggccgatgcttgacagagaccctcgtccttgtttcgcaggctggtggttctgtagcatacctgatattcattggccaaaatctccattccacattcagccagctgatgtcaccagctggcttcatctttgccatcctcctgcctctgcagatagcgctctccttcatccgctcactgtcgtccctttctccgttcagtatatttgcagacgtgtgcaatgtccttgccatggcaatcgttatcaaagaggatcttcagctctttgaccaccccttttcaaacagaagcgcttttaatggactgtgggcagtaccattcaccttcggtgttgcagtcttctgtttcgaaggattcagcatgacccttgcactagaagcgtcgatggcagaccggagaaagttccgctcggtgctttcccaagcagttgccgccattatagccgtgtatgtctgttttggagtttgtgggtacttggcctatggcgaggccaccaaagacatcataacacttaatcttccgaacaattggtcgtctgctgcagttaaggttggcctatgcatcgcactggcattcaccttcccagtcatgatgcacccgatccatgagatcgtcgagacaaggttcagatccaacagatgctttcggaagctcagccacaacgatggcggcgcggagtggataggcttgcacgcaagccgcgtcctcgtggtggcggtcctcactgtggtggcgtccttcatccccttctttgggtccttcatctcgttcgtcgggagcaccatgtgcgcgcttctctcctttgtgctgccggctctcttccatctcagcattgtaggctcgtcaatacccttgtggaggcgggtgctggactacggcatccttctctttggtctggctttcgctggatatggtcttgtcactgctctctcctcgcattgaacaatggcccaaacagtcaaaaaagtgcagagatcaggatatcttgtgatgacaggagtcaaatggatgctaggagcaccatatatcagatagcacggctcggattagtgcgtgattgaactgatccgcttcaacccatatagccgcagtcatccatggaagatataccttagcggattggaatggtgatttcgagaaaccaagttgacattgttctatgcatgttacaaaaatctacagatgtcatgaactttaagagccatatcttaatcgcgtatgcatgttacacatctacatgtgtcacgtttcaaaaaaaaagtttatgttgactgccttgttcgtttgtgtcggattggtgggatggaacaattcccggccggattgcttctctaatttatataaaattttgattgatcggaacgattccgggtgcaatctcgacgcaaacgaacaagggctcaacccatatag

SEQ ID NO: 1717 - DNA, 1674 bp, Zea mays
  Clone ID: ZEAMA-23APR03-CLUSTER11459_2
gcacgagaccattacctagaacatcctaatcgaaaacgcccgccgctatcatatccatccccgttctcctcctcgccgtcgccactctctttgcgcgcgccacgccgaaaggtgagctgccgggcgtcgtctatagacgtagagcggggcagagggccgtgagctttgggagaggaggagataattaatggcggctaaggagagtagtaggacgatgaaggcggcgcgctctgcgggaaggatcggggtcgtggcctctgtggcgatgaacctcgcgtggcttgcgatgtacatccgccagcgctacggggagatcaccacggtggaggcgtcccgaggcaagccgccggtcactcaggactccgtcgtcatcctcgatcacggcgacccggtcatgtacgaggagttctggcgccgcgagggagacagcgcctcgatcctgatccccgcgtggcagacgatgagctacttctccaacctcggcggcatctgctgcttcctggagcctggcctggagcgcgaggtgcggcgcctccaccggctcgtcggaaacgccgtggtcgatggataccatgtgatcgtcgggactgggtccacgcagctgttccaggccgtgctatacgcgatctcgcctgcaagtgacggcacgcccatcgacgtcgtctcgccggcgccttactactcgtgttacccagttgcgtcgagctttctaaactctgggctctaccgttggggtggtgacgccaatacatttgccggcgacgacaccagctgtgttgaggtcgtctgctcgccaaacaaccctgacggtggcatccgacatgccgtcgtcaagtccaaatccagcaaggcgatctatgacttcgcctactactggccgcagtacacgcccatcaccgaggcggctgcccatgatgtcatgctgttcaccttctccaaatgctccggccatgccggtactaggctggggtgggcactggtgaaggacactgaagtggccaagaagatgaccaagttcatggagctcaccacgattggcgtgtccaaggactctcagcttcgtgccgctaagattcttggggcgatctgtaacggctatgagcagctgccatcccccgcgggccaaacaagaagccacctcttccattttgctcgggagaaaatggcggcacgatggactaggctccgcgcagctttggcggcctcggacatctttactctcccagatgagctatctgagtactgtggtttcttcaagaagactgtcaccgccaatcctgcgttcgcatggcttcgctgcaagaaggatggtattgaagatctggagagctttctacgcgagaacaagatagtcactcgaggtggcacaaagtttggagtggacgggagggttgtcagggtcagtatggttgacacagaccaagccttcaacgtgttcctggatcgtctagccacgatgaagtgagatactactagtgcaaataaacactttgtcgctgcatggatggatgacattgttctaagtttagtgcaaggatgatccttcggaaaacttaataatgttctatttgttctataattagatcatgttttctagtatagtagaatattcactgtcaaatgctatatataattgaggttgtgatctatttgattatcataaaaaacaattta

SEQ ID NO: 1718 - DNA, 1485 bp, Zea mays
  Clone ID: ZEAMA-23APR03-CLUSTER1148_78
acgtgtctgttccttggagccgcccgtcgccagccgcccccaccgcccacaccaccggccgcccctgccttggccccttccgccgcggccgcggccgcccccgaccccggccccgcccggcgcttccgtttccttggataaccacaacgctcgcccgcccgccggcaagcgaaagcgaagcgagccaacctagccatggagaaggcgatcgatcggcagcgggtcctcctggcgcacctcctcccctccccctccgccacctcctcacagcctcagcttgcggcgtcggcgtgcgcggccggggatagcgccgcctaccagaggtcctcctccttcggggacgatgtcatcactgcctacaggaccccaatatgcaaggccaagcgaggaggcttcaaggacacctacctagaggacctcctcactgttgttctcaaggttcccttcccttcaaggtcaaccgccagtgttcatctaggctacaggcagtagccgatgtcgtagctgctataaaggttggttactatgacataggtacatagtatctgaatatacatgctactttcgctcttgtgctttagtttggctgctgaatcgctgctctcccggcttgttcggttagctctcaatccatgtggattgagtgggattaattaggtttaaatcccaagtaagtcaaatttcttcacaattttttccaatcccgtccaatccataggtaacgggattaaccgaacaaggcctaaacagggattggtgctggtttggaatccatgtccataaattccattgctagggaaggacaagttaacccaaaaataagcacattctagaaagcacaggattgtcttctgcccccatgggaattacttctgaaaatgttgcccatcgatatggtgtaaccagacaagagcaagatcaggccacctctgagtctcataggagagctgctgcagccacgacctctggaaaattcaaggatgagatcgtccccgtgccaacaaaggcaattccagtcaagtgagtgatggtgctggagctgttcttctcatgaaaagatctgtggctctgaagaaagggctgcccattcttggtgttttcaggtgcccggcgcgtggctactcttctaaatgaaatgaagcgccggggcagagactgcagatttggtgttgtcaccatgtgtatcggatctagaatgggggcagcagctatgttcgagctgtgttcggcccggctggaggtatcgaccatcactcaacactgtaacccgatggtgatcggcgaccgtgagcttccatgttattgcgttctgatacttgagacttttattatgactatgtatgagatattgtctcttattagtactggatgatgagatgtgtcttattatgactatggatgagacttttgtgatgtaattgatgagacttttgtgatgtaattgatgagactatggatttaaatattgttatgtgattgtgtgtg

SEQ ID NO: 1719 - DNA, 1299 bp, Zea mays
  unsure (1)..(1299): unsure at all n locations
  Clone ID: ZEAMA-23APR03-CLUSTER11584_2
agttcgaaaggttcaacttcaaacacactccaaactccaagcctcaataatctcgacctctgtaatgaccaagaagctcatctccatctccaccatggccgggaagcaaggttgcaaggagcagtccaatgatcggaggatccaggcttcgatccaaggagacgccaagagcgtggtggtggggttcggcggcaggctggtcacccgtgagcaggagcaggaggacgccatcatcgtcgcggcgctgcggcacgtggtgtccgggtacagcacgccgccgccggaggtcgtcgtcacggtggcgggcggggaggcgtgcgggacctgcggcatcgacgggtgcctcggctgcgacttcttcggggcgccggagctggcgcaggaggcagtggcctgcggcacatggcaggtggcgacgacggcgtcggtcgngggcgtgggcancggcggcggcgctgaggcccnnnnnnncgtaggnncaggaacatgtacnncggcgtgcggcagcggccgtggggcaagtgggcggcggagatccgcgatccnngnngcgcgcggcgcgcgtgtggctgggcacgttctgacaccgcggaggaggctgccagggcctacgactgcgccgcggtcgagttccgcggcccccgcgcgaagctcaacttcccgggccacgaggcgctgttccagggccacggcgacaccgcggcggcgaacaccgagacacagacgccgtcgccgtcgccgtcgccgggagagtggcagctgggcggcggagcaggagacgagctgtgggaaggtctacaggacctgatgaagcaggacgaggtggaccgctggctcgcgccggttttcggcgccgcgtctagtttttgagctattgtactgtgcacgcaagcgtggttactgacaggatcacagctagactgaccagcatatctagttggttcttttgtagcgtatttttttagggaaacatgattctttttttttgttgtcgtgtattgattgggatatagagagtttttttcctctcttgatggaagtagttggaaagctgtgttgatagactgaacatttttttgtaaaaaaaaaaaaaaaaaaaaaaaaaaaaaaaaaaaaaaaaaaaaaaaaaaaaaaaaaaaaaaaaaaaaaaaaaaaaaaaaaaaaaaaaaaaaaaaaaaaaaaaaaaataaggggggcccgtcaaagatattcaatccttagacccgtcggcatctagcggcaaattcctcttcgaattaacccaaaaaaattttgctgcccccaattataaacccaccg

SEQ ID NO: 1720 - DNA, 1767 bp, Zea mays
  Clone ID: ZEAMA-23APR03-CLUSTER115900_1
agcacgagaccattacctagaacatcctaatcgaaaaacagcgacagcaacacagcctcgcaagagaaagcaaagcaaagccaggagggaaagaaagaaatccttttcctacacctaaagagaccaccaaaccctgcgagcccaaaaaaaagccatggagtacaagagatcatcgcatgcggaagaggaagaagaggatgaggaggaagaagaagacgacgagaacgaggaagaagaggaggatgaggatgaggccagaggccttcgctacaccacggcggcggtggcacccgtaggcgctccgcagcagcagcggcagcaggtgcacgcccaagctcttggcctcggctcacacccctcccagctgatggattctgccgccttctcgaggccgctcttgcctcccaactcatctctggtgatgcagccaccgctgcctccaccaggcttcccgccggctcaccgccaacaaccgccgcatgcgcagctccatccgaggaaagcggagagggagagggacagagccgcgggagcgcagccccatgtccggcgccaccaccaagaaccagccaagaatggcgttctcggcggtggcgccgcgccaacgtcggcaccctctacgctcggcctcgtgcccgtggtggaagcggcccagctgtggaggtaccgggagtgcctgcggaaccacgcggcgcggcttggcgcgcacgtgctcgacggctgctgcgagttcatgccgtccgggggcgaaggggccgccgcgctggcctgcgccgcctgcggctgccaccgcagcttccaccggcgcgaggcggtccccggcggcggcgtggcggtgtcgccctcggcggcagtaacccccaccgccggcgccggcgccaactcctcccgcgccattccgctgctgctggccccgccgcacatgcacacgcgcccgccgcaccacgtgccggcgtccccggcgtccgcgcccgccgcgctggccgagtcgtccagcgaggagctgcgcggccccgcgcccccgacgcacgcgcacgcgcacccgccccacgcgcaggtggccgtagtaggagggtcggcctccgctccccccgcgccgagcaagaagcgtttccggaccaagttcacggcggagcagaaggacctcatgcgcgagttcgcgcaccgcgtcgggtggcgcgtccacaagcccgacgccgacgccgtggacgccttctgcgcccaggtcggcgtctcccggcgcgtcctcaaggtgtggatgcacaacaacaagcacctcgccaaggtcccgccctcgcccccatcctcctcctacccacagccactgcctcgccaccacccgcctccacctccgctccacatccaccatcatccgccgccgcagcagcagcagcagcagcagcatgatgcatgagtatcgagtagccgcagagcagcgcgagaggatcagacgatgccattagcttattagctcctttatttatccttcttcttcttcttcttcttcccttgtaatttcagtgacatcccagttgttaaggagttgactcatcatgcagcagttaggagggattaatatgattgtgtgacctaatctcatctcagccatactcctactacaagtcatcccctcgtcctcgttgctttcttggacgacctacctccattattaggttattagcatcagtggcgcttgcattggtatcttgcttatggtaatgacctaataatgatcactgtgttttagagctaaaaaaaaaaaaaaaa

SEQ ID NO: 1721 - DNA, 662 bp, Zea mays
  Clone ID: ZEAMA-23APR03-CLUSTER11593_14
attcgtcttgctccagccgccgtcggatcggatccgatccaaagcaagcagcagcagccggctcctcctccgcctcccgcagcagccacaccccgtccgtcaccagaggaagaggaggaggatgtcgggatcgaaggtgtacacccttgaggaggtggccaagcacaacaccaaggacgactgctggctcgtcatcggcggcaaggtgtacaatgtgaccaagtttctggaggaccaccctggaggtgatgatgtcctgctgtcttccactgccaaggatgctaccgatgatttcgaagatgtggggcacagcaccaccgcccgtgcaatgatggacgacacgcaccccatcctggctactgctggtggtggtggtggtggtggtgctggggaaaaaaagaaagggaagaggagggaagaaattgaatggccagggtgcgcggtgggtgagtgagacagaggagggaggagaggggaatttgaaattcaaatggagatggctcggtcgctgtgctgcagctgcaggggttggatttcaacgagtcaaagtcaatccacgtggaatgactccagtggaccaccttactccgactggcctctgctttgtgctttgagtgggccggcccaaacaactctgctggttcttaaaaaaaaaaaaaaaa

SEQ ID NO: 1722 - DNA, 1962 bp, Zea mays
  Clone ID: ZEAMA-23APR03-CLUSTER115_3
aacagccagcccaataatgacatatgggacacgtcactatcgaagagcttgtagttgtaggagcagatcgcggtaagcttaccacctaggcaccggcggacccgcagtccgccctgcatccagtgatccagtcaatcgcggacgcccgcttggccgcttccatgggttccatgaggcggagttccgtgcggcttctcatagggttcctgctaattcggctcaattggtgctcggcggtgggcgacaagggcgcggagaaagtaggcgtggctttcccggtggtggtgagcacctggccgttccgtgaggcggtcagagcggcgtggaaggtggtttcgaccggtgaaggatggggttcggccgtcgatgctgtcgtcgctggctgctccgcctgcgaggacctccgctgcgatggtacaggtcggtccaggtggaagtccagatgagaatggggaaaccactttagatgctcttgtcatgaatggggaaactgtcaggcaacaatggaaattggagctgtggcggccatgagatatgtgaaggatggaatcaaggcagcaaagttagtcatggagcacagcgagcatactctgctcgttggagagaaagcaacagcatttgcaatttcaatgggtcttccaggaccaactaacctcagttcaccagagtcaattgagaaatgggaaaagtggaaacagaaccactgccaaccaaacttctggaaaaatgttgatcctgtcggtaagtgtggtccataccatcctatcaatttagcctcagttgaagttgagggttctgtaaagaatgaggtagtggggagtcaaggtggtctctgccaggggtattttgaaagtgataatttactggagccaataaagtccaatttgaaggttgttaatcgccacaaccatgacacaatttctatggctgtgattgacaagatgggccacatagcagttgggacatcaaccaatggtgctacatttaaaattccaggaagggtgggcgatggaccaataccaggatcttcttcatatggtgatgatgaagttggggcttgtggagcaactggtgatggtgatattatgatgcgcttccttccatggtaatgaaaacataatttctgttgaaaatgacatttgaaaaaggatggctgagtgtgatgtctagcttgtcaattggaaccggattagttgctccaatctatgatttaatttgaaagaaagatgacagagttgtgctctgattattatgaacttctttttccctcatgtttattttttcaagtgtagcatcctagtacatgatggtatgcaatttcaatcatctttgggcaatcaattttaaacagtccctgatccaactgcaaacactaatgctggtaacagcatatgctagttgtttactctatcgtaactctatcgactcttgtgcacttcgtgccaatcttattataaattctgttgtagctaccaagtggtagagagcatgcgacaagggatggatcctcgagatgctgccacagatgctatatcgagaattgcccgcaaatacccagatttcatcggtgccgtatttgcagtcaacaaggaaggggtgcatgccggggcatgccacggatggacattccaatactccgtacggaattccagcatgcaagatgtggaggtcattacagtatatccttagcaatcgcaattcaacgaaaacaaaagtttgctttatcagcatgtttaaaaatgtcacggctgcccccctgttgatgttttaaaaatgttctgtgcggattatttcaatgttttcttaaagtcgattgttttgaaactagtagtactgtatgtaccaatctgaccttagttgttttttccctggaaagtgttgaatgtcttggaaagtcgaaaccttggatcttctctgttggagttggagttgattgtacagaagttagacttggatatagtc

SEQ ID NO: 1723 - DNA, 1547 bp, Zea mays
  Clone ID: ZEAMA-23APR03-CLUSTER11625_1
ctcacttcttctcccccgccccctttttcctagcggcacggcaccaggcccgccctggtggcatcttcgtaatttcgcgcctcttctccgccacggcggctgggggtgagaggaggtatgggaaacgccagcggccgcgacgaggacgccgcggctgttgacggcgacggcgccgacgtggaggacggcggaggggactcgtcggagcgcgacttcccatcgtacggtagcggaggagccaaccacgtgcggcgcgcgtgctcagtgggcgtcgtagggggcggcgccgccgccggatcgccacccgggagccccggtcactcgctctcgccgcggatgttcgtgccccagacccctgtacctccactgcaacgggctgctgatgtaaccccagtgttcaaccagatattgatggatgaacaagaagaatacgatggcccccctcaaaaagaaattcctgctttaattgtctggacccttggaggaaagaatgtatatgttgaaggatcatgggataactggaaatcaagaaaagccatgcaaaaatctgggaaagatcattctcttttgctggtactcccagcaggagtttaccgatacagatttgttgtagatggagaaaggagatgtcttcctgatctcccctgtgaaatcgatgcaatgggcaatgcggttaaccttcttgatgttaatgattatgtccctgaaagtgttgagagcgtggcagagtttgagccacctccttctccagactctagctacagtttccaggcacctgaggacaaggacttcgccaaggagcctcctgttcttccatctcaactccatctcggtgttcttaactcacagaactcggaagaaagctgtgcgcggccgcagcacatagtcctcaatcacctcttcatagagaagggctggggcgcccaccctctggtgtctctcggcctaacccacaggttcgagtccaaatatgtaacagtcgtcctgtacaaacccatcgaacgatagcaatagcccgcgcctgaagagcggaagttgacaactcactgtgggagcagcgatgaacagcgccgaagtggtacatgcttgtaaaagcggttgaggtccaggagtattttttttcccgtgcccttagcttgcacaacctgtggtactctggtggttagctgtacatgctgcgctgtcatgatggttggtttgctgttacagagagccaaggcgtccttgattccgaagtacacgtacgtttgtcgtcgtcgttcctctccccatcccatcccaggaatgaaatgtttgtaggtgtcactgaaaaccgtggaaacccacagaaatgctaggagacagagattagaccatgtgattcctagatttttgtttgttttttggttggtcaagaactctagacgatgttgttgttatgaaatgaactcaagaaaatttttatgcgaatgcgatgtttttttctgtcaaaaataaaaaaaaaatatgtcattcgtttcttaaatgatcctaaacttacttttcgcttgtctttctaactttcataa

SEQ ID NO: 1724 - DNA, 1417 bp, Zea mays
  Clone ID: ZEAMA-23APR03-CLUSTER11628_3
aatataatatcgacggcgactgccgactggcttggttggctcgtggtcgctttgcccatctgatgatctcccgctagcttccttcttgctactcccgcagtccccagtccccacccgctgcgccctcgccatggatccgagctccgaaatcatactggacactccatacttccgcatctacagcgaccgccgcatcgaccgcttgatgggcaccgaaacggtgccggccggctttgatcccagcaccggcgtcacctccaaagatgtcgtcatagacagcgacgccggcctctacgtccgcctctacctcccgctcccggacacggtggctgccgccgcgtcaccaccgcccagcgttaacgacagcaagaccaagctcccggtgctggtctacttccacggcggcggcttcgtcacgcagtcggcagcgtctccgatctaccagcgcctcctcaacgcgctggccgcgagggccggcctgctcatcgtgtccgtgaactaccgcctcgcgccggagcacccgctgccggcaggctacgaggactccttccgcgcgctggagtgggtggcggcctccggcggggacccctggctgtcgcgccatggcgacctgcgccgcgtcttcctggccggcgacagcgccggcggcaacatcgtccacaacgtcgccatgatggccgccgcgtcggggccgcgggtcgagggcgccgtcctcctgcacgccgggttcgggggcaaggagcccgtcgatggcgaggcgccggcgtctgtggcgctgatggagaggctgtggggcgtcgtgtgccccggggcgacggacggcgtggacgacccgcgggtgaatcccttggccgccgcggcgccgcccaggcccagcctgcgggacatgccgtgcgagagggtgctcgtgtgcggggcggagctggactccctgctgccgagggacagggcctactacgaggccctcgcggcaagcgggtggagcggcacggtggagtggttcgagtcccagggccaggaccacgtcttcttcctcttcaaacccgactgcggtgagtccgtggcgctcatggatcgactcgtcgcgttcttcgctgcgaactgaaattcgtcatgtgcactcagtgttttatacatagtagttattgccgaggttttcaaatatgtaaaagtgccctataatttgaaaataggtatattttatataatatagggcaccaataaaatatctcgctgttgaaatgtcaaatctagattacagagcagtatgatgtagtatatttaagagcttgaaaaggtattttatatttttttaccaaattttatgaaacaagttattgttggagttgttttaaaaaaaaaaaaaaaaaattctgtgtagaaccctatattttaatttaagacgtcagtttaaggt

SEQ ID NO: 1725 - DNA, 1071 bp, Zea mays
  Clone ID: ZEAMA-23APR03-CLUSTER11769_9
atatagtaaacatcatatatttggatagagtataaacatgaacggtactagcaaacacacacatatttcaaaactgaagatatgttcttatggacacttgaaacccaagaacgccctatatatctgttatgtactgactacttcactattaatgtatatatctgtacactgtactaaaaggagcaatagacaaaagccgatagagccgtaccgctgccggtgccgcaaatgatgtgcagccattagctgctaacttgctaagctctgcttccgaacatcaggtatccaagaagtgaagataacaagaagacaagcagcacaaacgcagagaagccccgaggagacgcctttgttttccggaggagatccagctctttctgaatcttcttgttttcctgtgcgtatcttctttccagttccaacttggatgtagaatcatccatgtcagggacaatgtccttctgcgtcgtcccctcctccacagcaatgctctgaacaagaaacttgtccttgcagtggtagtccgggggcatctccttgggcgcttgcatcgttattgtgatgccacaggatcccctgggcggcacgacaccggaggcagagcgcaccgagtacttcctagggttcgtcgtcttgaccttgaaagccacccaccggtcggtcttgttgacgagctcaagacacgctgagttctgcttcctgagctcgaatggcatcttcaggtcggaagggtagactcgaagcagcgtgttgctcatggcggcgatcaaggaacaaggatcaggagggggggaattgagcgccccgctttctcctatccaagaacccgaaaactgatggaatatccaagccggggccacggcgacggttgctgctcccggaagcaaaaaaaaaaaaaaagaaaagaaaaaaaaagaaaaagagtatcggggcacgagagagacaaagtgtgacggcttgacgagtatggttggcagcgcggaggcggagctgaggcctgaggggggctcggccttttggtagggggaaaagaactgaatccgaggatcagatgggctcgggctctttccc

(The sequence listing continues in the following parts.)
